United States Patent Application Publication US 2011/0183924 A1 - sequence listing, part 4

SEQ ID NO: 8634 - DNA, 455 bp, Homo sapiens
gagataatcactttaaatttccacaaaaggacatgaaagaatgaagactgaatccactgcgtgaggccatcagatgtctcccataagcagatttcaaacactgtcataagtgagtggccctctaaggttcagacttctagtccacaacaatttccatttaggtaatgtataatttttccaacaggggcacaaaggcattactattagaaaatgcgttcctgggcacccctcctcaacattcaataaatacgaactcagtgacctcttatcaccgagcctcaaagctgaccatgagaagaggacatctagtataaacttccttcaggggtgaagctcccctctgtaacaccctttcccagaagctcttggttgaaccctacagtaccctggagctcatgagacagcttattccattgttagtagatctaattgtcaaaaagttctttttgtgtttc

SEQ ID NO: 8635 - DNA, 285 bp, Homo sapiens
tcatcatataaaagcagcattttatcctactaaacttattttatctttctgaatttatattttctcagtatcaagtcagtaagaacaatgacgagggttcctggtagcccatgtcacaccactgcaaatgagaaagagggtatccttcttcccagctgagacatcccaaaatccagccaccatatgcagagcataccatacaagtgtgtgacagatcactgccaacacaatgttctagtgaataagcctattctaatgaaaacaaaaatttggaatgggaagcta

SEQ ID NO: 8636 - DNA, 410 bp, Homo sapiens
ccccgtggacccaggcgaccctggttctaggcctgggtgcacctcaggcccgctaggtgtaccccaaagcaggcagaaggcccatgaggagaaggtgaggtttgagggaggagaggtgacgcacctgcggcagaaaaatacaaacgtgccgaggagaagcggggcctggttctcccacagacgaaagtgccttctcatcagcccctgcgctgggcctcctggaccctggcgaccctagttcaaggatcagaagagactccggcacgctagggtaccctaaggaagccagaaagcccatgaggggaaagtgagatttgagggaggagaggtgagtcacctgtggcagaaaaaaaaaatatatatatatatatatatcagcgcctctgagaagccgggcctgggtccccact

SEQ ID NO: 8637 - DNA, 443 bp, Homo sapiens
ccaaaattattgcttaagaacgctgtcaactaaaatatcaaacatttcagtgcaaaagcattaagtatatagaaacagggccctcttaaatgtgataatcccacattttttcagccttattcggagtattctccagctatttccactcaaagattaacactgtcaatgcctactaaatgtgcactttggaaggctaaggtgggcggatcacttgaggtcaggagttcaagaccagcctggtcaacatggtgaaaccccatctttaccacaaatacaaaaattagctgggagtggcagcaggcacctgtaatcccagctactcgagaggctaaggtaggagaattgcttgaacccaggaggcggaggttgcagtgagccgggatcacactactgcattccagcctgtgagacagagcaagaccccatctgggaaaaaaaaaaaa

SEQ ID NO: 8638 - DNA, 513 bp, Homo sapiens
actttgaccaatgtcgactttttttttttttaaagatagagtctcattctgtcacccaggctggaaggcagtggcacagtcttggctcactgcaacctccgcctcccaggttcatgaaattctcctgcctcagcctcctgagtagctgggattacaggcacacgccaccaggcccggctaatttttgcatttttgtagagatgaggtttcaccatgttggccaggctggtctcgaactcctcacctcaggtgatctgcccatctcagcctcccaaagtgctggcattacaagtgtgagccactgcacccagccctgaccagtgatttttaaggagaagtttgctgggcttccggtgatgaagaagttgtttttcattttccctcagctcctgctttggactctgcaatgtaaggccaggctccatgaggctagtggaaccattttggacccacaaggtgacaaggatcaggacaagggaacacacacagagtcgacgaacagagaaaaagcag

SEQ ID NO: 8639 - DNA, 679 bp, Homo sapiens
tcttgccctccatggcctcggcgggctctgcagctgcctggggctcactctccttcggggaccctcctcttcccttgccgcgccctcatccttcttgtctttgtccttggctttctcgtcgttcacattgtagcccttcttcttgctgagtttgcctgtcatcttggagtttggctctgggtgcctgtgcagcccctgggtgagcgcggtgcccccaagaggccagggtccctggcggtgtctagctcatgcctggccgctggcggaggctctctcctggctccatggcggaggccagagcgaggagccagttgtagtgctagctccgcctttgtcgcagctgccactactgccaccgggaaaacatttttcttaaaaaatgtgttcttatggccgggcgtggcggctcatgcctgttatctcagcactttgggaggccaaggcgggcggatcacgaggtcaggagaacaagaccatcctggctaacatggtgaaacctcgtctttactaaaaatacaaaaaatttgccagggtggtggcaggcgccagtagttcgacctactcaggaggctgaggcaggagaatggcgtgaacctgggaggccgagcttgcagtgagccgagattgcactactgcactccagcctgagcaacggagcgagactccatctcaaaaaaaa

SEQ ID NO: 8640 - DNA, 280 bp, Homo sapiens
taaaccaaaggtagtaacaagaattgaatctttaaaaagggggaggagaagcatttaatatctttaattctaaaatcacatggtttgttggcacagtgatgtcagtgatgtcagtgtagttgcatcattgcgttaggaggactacaggaattcattagccactcagacaatatgatttggagtttcactctggtcatcatctgaaaatggctacagtgttccagaccaaaaagtaagtgcctagtggaacctttagctattataagaaacatctttagca

SEQ ID NO: 8641 - DNA, 411 bp, Homo sapiens
cccattttaaatgccactacagtttataaccaacttttttatatttaaatgttcttttatttagtgaatattcataagatggatacaattttataccatatgccttttccacattgctaacattgtttttcattgagttcttgtatttaacaaagcaatgcatatagatagttttaacaggttaatagtacagcaagcttgataaagaaaaacaagtattctctcccatctccttgctcctaatttcccactctacagagacaatcactttcaagtcctttagtatttacccccatatcagtacattacatgcttaactggatgtatatttatttactttttttttttttttttgagacacagtcttactcttgtcacccaggttggagtgcagtgtcacaatcttggctc

SEQ ID NO: 8642 - DNA, 340 bp, Homo sapiens
tagcaaagtttcatatcctttattcaccaaaacaaacgtaattgttgataggagcagcagagaagaaatatgcccaatatctgggacccttagtggtctagaaaagctgtgagagcaaacttctgaaaaatgatgcctattttgacccagttgtgccagtatttatttcttgcattggccttaggatgtttatctcacacagatgatgataagctgtttaccacgcaagaacaagcactgaatacaccagttggcatggagtcagagactactatgtatctccttatatttcattgccttatttcataagttatgtgaaaaaataaaggtaaatacaaat

SEQ ID NO: 8643 - DNA, 1948 bp, Homo sapiens
ccccaccccgcctccaaagctaaccctcgggcttgaggggaagaggctgactgtacgttccttctactctggcaccactctccaggctgccatggggcccagcacccctctcctcatcttgttccttttgtcatggtcgggacccctccaaggacagcagcaccaccttgtggagtacatggaacgccgactagctgctttagaggttgagatccgtagcattttagtgtccgagaggataattgctaagggagcagagacctcttcacaccttcatgcgcttagacctgcctagaggctcagatggctcagtggcactgctcacagagaacacaggctggaggacatggagtcggggaacggctggcccagtgccaggaccagagtagtcggcatgctgctgagctgcgggacttcaagaacaagatgctgccactgctggaggtggcagagaaggagcgggaggcactcagaactgaggccgacaccatctccgggagagtggatcgtctggagcgggaggtagactatctggagacccagaacccagctctgccctgtgtagagtttgatgagaaggtgactggaggccctgggaccaaaggcaagggaagaaggaatgagaagtacgatatggtgacagactgtggctacacaatctctcaagtgagatcaatgaagattctgaagcgatttggtggcccagctggtctatggaccaaggatccactggggcaaacagagaagatctacgtgttagatgggacacagaatgacacagcctttgtcttcccaaggctgcgtgacttcacccttgccatggctgcccggaaagcttcccgagtccgggtgcccttcccctgggtaggcacagggcagctggtatatggtggctttctttattttgctcggaggcctcctggaagacctggtggaggtggtgagatggagaacactttgcagctaatcaaattccacctggcaaaccgaacagtggtggacagctcagtattcccagcagaggggctgatccccccctacggcttgacagcagacacctacatcgacctggcagctgatgaggaaggtctttgggctgtctatgccacccgggaggatgacaggcacttgtgtctggccaagttagatccacagacactggacacagagcagcagtgggacacaccatgtcccagagagaatgctgaggctgcctttgtcatctgtgggaccctctatgtcgtctataacacccgtcctgccagtcgggcccgcatccagtgctcctttgatgccagcggcaccctgacccctgaacgggcagcactcccttattttccccgcagatatggtgcccatgccagcctccgctataacccccgagaacgccagctctatgcctgggatgatggctaccagattgtctataagctggagatgaggaagaaagaggaggaggtttgaggagctagccttgttttttgcatctttctcactcccatacatttatattatatccccactaaatttcttgttcctcattcttcaaatgtgggccagttgtggctcaaatcctctatatttttagccaatggcaatcaaattctttcagctcctttgtttcatacggaactccagatcctgagtaatccttttagagcccgaagagtcaaaaccctcaatgttccctcctgctctcctgccccatgtcaacaaatttcaggctaaggatgccccagacccagggctctaaccttgtatgcgggcaggcccagggagcaggcagcagtgttcttcccctcagagtgacttggggagggagaaataggaggagacgtccagctctgtcctctcttcctcactcctcccttcagtgtcctgaggaacaggactttctccacattgttttgtattgcaacattttgcattaaaaggaaaatccactgct

SEQ ID NO: 8644 - DNA, 1796 bp, Homo sapiens
ccccaccccgcctccaaagctaaccctcgggcttgaggggaagaggctgactgtacgttccttctactctggcaccactctccaggctgccatggggcccagcacccctctcctcatcttgttccttttgtcatggtcgggacccctccaaggacagcagcaccaccttgtggagtacatggaacgccgactagctgctttagaggaacggctggcccagtgccaggaccagagtagtcggcatgctgctgagctgcgggacttcaagaacaagatgctgccactgctggaggtggcagagaaggagcgggaggcactcagaactgaggccgacaccatctccgggagagtggatcgtctggagcgggaggtagactatctggagacccagaacccagctctgccctgtgtagagtttgatgagaaggtgactggaggccctgggaccaaaggcaagggaagaaggaatgagaagtacgatatggtgacagactgtggctacacaatctctcaagtgagatcaatgaagattctgaagcgatttggtggcccagctggtctatggaccaaggatccactggggcaaacagagaagatctacgtgttagatgggacacagaatgacacagcctttgtcttcccaaggctgcgtgacttcacccttgccatggctgcccggaaagcttcccgagtccgggtgcccttcccctgggtaggcacagggcagctggtatatggtggctttctttattttgctcggaggcctcctggaagacctggtggaggtggtgagatggagaacactttgcagctaatcaaattccacctggcaaaccgaacagtggtggacagctcagtattcccagcagaggggctgatccccccctacggcttgacagcagacacctacatcgacctggcagctgatgaggaaggtctttgggctgtctatgccacccgggaggatgacaggcacttgtgtctggccaagttagatccacagacactggacacagagcagcagtgggacacaccatgtcccagagagaatgctgaggctgcctttgtcatctgtgggaccctctatgtcgtctataacacccgtcctgccagtcgggcccgcatccagtgctcctttgatgccagcggcaccctgacccctgaacgggcagcactcccttattttccccgcagatatggtgcccatgccagcctccgctataacccccgagaacgccagctctatgcctgggatgatggctaccagattgtctataagctggagatgaggaagaaagaggaggaggtttgaggagctagccttgttttttgcatctttctcactcccatacatttatattatatccccactaaatttcttgttcctcattcttcaaatgtgggccagttgtggctcaaatcctctatatttttagccaatggcaatcaaattctttcagctcctttgtttcatacggaactccagatcctgagtaatccttttagagcccgaagagtcaaaaccctcaatgttccctcctgctctcctgccccatgtcaacaaatttcaggctaaggatgccccagacccagggctctaaccttgtatgcgggcaggcccagggagcaggcagcagtgttcttcccctcagagtgacttggggagggagaaataggaggagacgtccagctctgtcctctcttcctcactcctcccttcagtgtcctgaggaacaggactttctccacattgttttgtattgcaacattttgcattaaaaggaaaatccactgct

SEQ ID NO: 8645 - DNA, 348 bp, Homo sapiens
ccgagttgggcctctccctgcctgggagttgtaaccctgcagcctccctcctgatcccccatcccttcaggaacggctggcccagtgccaggaccagagtagtcggcatgctgctgagctgcgggacttcaagaacaagatgctgccactgctggaggtggcagagaaggagcgggaggcactcagaactgaggccgacaccatctccgggagagtggatcgtctggagcgggaggtagactatctggagacccagaacccagctctgccctgtgtagagtttgatgagaaggtgactggaggccctgggaccaaaggcaagggaagaaggaatgagaagtacgatat

SEQ ID NO: 8646 - DNA, 2512 bp, Homo sapiens
agcggagcggcgagctggctttctcctggccacttgccggggtgaggggcagccggaggagtccgagaggaagcggaggcgcgagctggaggcggcggctcccgtcggcctccggcaggactgagcgctgggaggccggaaggcgggcgcgcacggcggagaggcgggcgggaggccggagcatattaatgaaaagtgccataaactgaaaaaccaaacatgagggtagcaggtgctgcaaagttggtggtagctgtggcagtgtttttactgacattttatgttatttctcaagtatttgaaataaaaatggatgcaagtttaggaaatctatttgcaagatcagcattggacacagctgcacgttctacaaagcctcccagatataagtgtgggatctcaaaagcttgccctgagaagcattttgcttttaaaatggcaagtggagcagccaacgtggtgggacccaaaatctgcctggaagataatgttttaatgagtggtgttaagaataatgttggaagagggatcaatgttgccttggcaaatggaaaaacaggagaagtattagacactaaatattttgacatgtggggaggagatgtggcaccatttattgagtttctgaaggccatacaagatggaacaatagttttaatgggaacatacgatgatggagcaaccaaactcaatgatgaggcacggcggctcattgctgatttggggagcacatctattactaatcttggttttagagacaactgggtcttctgtggtgggaagggcattaagacaaaaagcccttttgaacagcacataaagaacaataaggatacaaacaaatatgaaggatggcctgaagttgtagaaatggaaggatgcatcccccagaagcaagactaatggaaatgtggagagaattgaagaaagcgcactttcactcttaatgggagagctataaatggcagagctatgtgtaaatattttaagagcatgcagccatcttggtgtgtgcatgagtattgtctcttttgatatcaggattatttattgctaacgtaaatagatagcattgtaaataatcatcacaatgatcaaatcactgaaccatgtctccgcacatttccctaaaagtacaatgtttagactgctatggtaatacatattttaaattctaaaagcatacacaatgtgtaactgaatggtttgtgaaaaatatattgatatatatactagttgctatgaaaatatcatggaataatagggattttagggtggatactttattttcttttatgtttctatatgttgcgttgtgatgacattatcttttaaattaaaaagagatttggctagttgtgtgtgtaatgttactttacagtccgactctcctgatgtacctcttttcatgatctttttctttccttcccaagaaactgaggaatgtttaatatgaaaacatacatcggatatgtgaaaagcacaacaaaattcttaatgtacacagtaaaaaagtaaatatataaatgtagatggcatttaggaccacagcttgctggatttgtgttagctatgggaataacttgattttgtataagctatttagagtgaggctggaggtggcagcttcacagaactggagaaccaggccaagtcccctccccaacctaattaggtcattcaggacagctaagtcagtatatttagagcaatactagcatacgtttttcttaattgttatcagcattgaccaagtggtttggaaggaggcatgctttaatatcacaataattttgatttgtaaaccaagaaattaatcctgtgtttatctaacttcataatagcaattattgcccgaagctatagtggcatatttacaaaagttcttattactgggcggactgataacatttaaaaaataattgtgtttgaccccaaatgactttatacccaattctacataaaaatatagaagatctatctttttttgttaccttcagatgttcactaaataactcagtttttaagcagaagttttcagggcattaaatatatgttgtgtatgaagtatctcaaactggaacataaatttagtgatcaaactgccattcacagtgtaaggcagcacttaaatttcgaacctaaagtttagatgcattgtataaaaaaacctaaaagcagtatctgttatttagctgtaaaccaagttggaagctattcggataatttcttaaatattgatgaactttggagtactgtttcttccttcaaactgaatgtaattaattcatgaataaatgcaccttatatgtttaaacaatctttgtatacttttgggatttttggtgcttatatgctaaatcacattcagcatgtgtattttgacatttaaaatacttccctcaattctgtaaattaaaagaatagttattttacagttccagggattgtgaaataaatgttgcagttttttaaaataatgaaaataaatactcttggttttgctttgtga

SEQ ID NO: 8647 - DNA, 1193 bp, Homo sapiens
tattaccttgaagttttgagttaaaagaactcacaattttagtttaataattctaatttgagcaattgaacaaactgaactgataaccagcaaatttgtcactggtaccttccattttacagtgtcattgtctttatatagtggtctgtgagctgcccatggaagtcgattatttcaggtagtcaccacgtaagtgactgtcattcaatgcagtgatttcatgagtgcaatatttcttagtgtagacgaactttacagtgataatcactaggagaatgttcacaattaggtaaaacattcatgaaagagtgctcccccactctgtttgcttttagatttaaatgatgggggtagtatctcgcttctgtttcatgtcacgctggtattgaagagagcagaaaagagattatcttttgtttgataccttaagaatgatgcagaacatatgcttaatgtccatgttttaagaataatctgaagcagtgtagcacaaaaatggtctattatttcaggcctaatattttttaatatgtatttctatttgtgaaatattatttaaggacattgctttaaaattattcagtattagactgtcttctctgacttagtagagatctttttaatttcctccgcagcactgaacaattgaaaatatgtataatattcctaactttttttgcaagactttatttttctgatatgttattgtacaatatttaattctaaatttatttcaatttctcccccttcagtttaatgagtggtgttaagaataatgttggaagagggatcaatgttgccttggcaaatggaaaaacaggagaagtattagacactaaatattttgacatgtggggaggaggtaagcataaataacatgactgtgttcttttgctggcactgacttaatcacctcaatacaatgtagcccattaatgagagaatgatgatgctatttgcgttagttcattttgtttcccttactttctgttcactaaatgtccagctgtatttaagttatcattcatgttttatatactttcttcttcttagaaaaaaatttttgtggtgtataattgaagatagtaatatcaaaattgagatttttttaaaaaaagtcatcttgttttctacaggacaaccaattcaaaagttttgggctcctttaagtgtgtctaaaatttaaaaaaaaa

SEQ ID NO: 8648 - DNA, 517 bp, Homo sapiens
actcaatctaaggaggaatgtttgctctagagctaatgatatttgctttttgttttgattttttaggagcatattaatgaaaagtgccataaactgaaaaaccaaacatgagggtagcagaagatatttaatttagtagaagtaattgtactttttgtgtaacctgtttgttaaagaataactaaaggagaggttaaataatctttatattgagaaggttaaactgaaataaactaaatcattcagccctttgtttttaggtagttggcaaatcacaaattggacatttagtcagtatcacataaatttttttttttgttcaagtcttttgttgaaattacacattgagcttcttaaatctgaagatctgaaatgctccaaaatctaaaactttatgagcagcaacacatgatgctcaaaggaaatgctcatttgagtatttaggtttcagattttcagatttgggaagttcagctggtaagtatgatgcaaatattctaaaatctgaaaaaaaaaa

SEQ ID NO: 8649 - DNA, 411 bp, Homo sapiens
  misc_feature (20)..(20): n is a, c, g, or t
  misc_feature (31)..(31): n is a, c, g, or t
tcagcacatttagtccaacntgagggtagcnggtgctgcaaagttggtggtagctgtggcagtgtttttactgacattttatgttatttctcaagtatttgaaataaaaatggatgcaagtttaggaaatctatttgcaagatcagcattggacacagctgcacgttctacaaagcctcccagatataagtgtgggatctcaaaagcttgccctgagaagcattttgcttttaaaatggcaagtggagcagccaacgtggtgggacccaaaatctgcctggaagataatgttttaatgagtggtgttaagaataatgttggaagagggatcaatgttgccttggcaaatggaaaccggagaagtattagacccataaatgtgctgaagggatcctctagaacagcatcgcg

SEQ ID NO: 8650 - DNA, 537 bp, Homo sapiens
  misc_feature (102)..(102): n is a, c, g, or t
  misc_feature (309)..(309): n is a, c, g, or t
  misc_feature (312)..(312): n is a, c, g, or t
cttcaatccttctgtctctcgaggaactaggctccaacacggggatccaggttttcaatccagattgtgaagtcgaggcctcatgaccaacatcgtgatctnttccccatgggattgcgtcgggtcctggggatgcttcagcttgggggccggacggcaggaccaagaagcagctcgccatggtgatgagatacggcgtaaatggagttggtaaaatattaaagaagatcaacaaggccatcggtctccaagaagaataaagacattgtgacgaggtgtaacgccggtgtttgttaagaatgcctctgnaantgaagtgccttttgttactgctatggtaatacatattttaaattctaaaagcatacacaatgtgtaactgaatggtttgtgaaaaatatattgatatatatactagttgctatgaaaatatcatggaataatagggattttagggtggatactttattttcttttatgtttctatatgttgcgttgtgatgacattatcttttaaattaaaaagagatttggcta

SEQ ID NO: 8651 - DNA, 558 bp, Homo sapiens
tcatcttgggcctgtgttatctgtggggaggagatgtggcaccatttattgagtttctgaaggccatacaagatggaacaatagttttaatgggaacatacgatgatggagcaaccaaactcaatgatgaggcacggcggctcattgctgatttggggagcacatctattactaatcttggttttagagacaactgggtcttctgtggtgggaagggcattaagacaaaaagcccttttgaacaggcgcggtggctcacgcctgtaatcccagcactttgggaggccgaggcgggtggatcatgaggtcaggagatcgagaccatcctggctaacaaggtgaaaccccgtctctactaaaaatacaaaaaattagccgggcgcggtggcgggcgcctgtagtcccagctactcgggaggctgaggcaggagaatggcgtgaacccgggaagcggagcttgcagtgagccgagattgcgccactgcactctacctggatgatagagcaagactctgtctcaaaaaaaaaaaagagagagatacacaggcccaagatgaa

SEQ ID NO: 8652 - DNA, 2568 bp, Homo sapiens
agcggagcggcgagctggctttctcctggccacttgccggggtgaggggcagccggaggagtccgagaggaagcggaggcgcgagctggaggcggcggctcccgtcggcctccggcaggactgagcgctgggaggccggaaggcgggcgcgcacggcggagaggcgggcgggaggccggagcatattaatgaaaagtgccataaactgaaaaaccaaacatgagggtagcaggacagggaaaagttatctctggttgcatgtgcctatgattgctagaaaataagatggtgctgcaaagttggtggtagctgtggcagtgtttttactgacattttatgttatttctcaagtatttgaaataaaaatggatgcaagtttaggaaatctatttgcaagatcagcattggacacagctgcacgttctacaaagcctcccagatataagtgtgggatctcaaaagcttgccctgagaagcattttgcttttaaaatggcaagtggagcagccaacgtggtgggacccaaaatctgcctggaagataatgttttaatgagtggtgttaagaataatgttggaagagggatcaatgttgccttggcaaatggaaaaacaggagaagtattagacactaaatattttgacatgtggggaggagatgtggcaccatttattgagtttctgaaggccatacaagatggaacaatagttttaatgggaacatacgatgatggagcaaccaaactcaatgatgaggcacggcggctcattgctgatttggggagcacatctattactaatcttggttttagagacaactgggtcttctgtggtgggaagggcattaagacaaaaagcccttttgaacagcacataaagaacaataaggatacaaacaaatatgaaggatggcctgaagttgtagaaatggaaggatgcatcccccagaagcaagactaatggaaatgtggagagaattgaagaaagcgcactttcactcttaatgggagagctataaatggcagagctatgtgtaaatattttaagagcatgcagccatcttggtgtgtgcatgagtattgtctcttttgatatcaggattatttattgctaacgtaaatagatagcattgtaaataatcatcacaatgatcaaatcactgaaccatgtctccgcacatttccctaaaagtacaatgtttagactgctatggtaatacatattttaaattctaaaagcatacacaatgtgtaactgaatggtttgtgaaaaatatattgatatatatactagttgctatgaaaatatcatggaataatagggattttagggtggatactttattttcttttatgtttctatatgttgcgttgtgatgacattatcttttaaattaaaaagagatttggctagttgtgtgtgtaatgttactttacagtccgactctcctgatgtacctcttttcatgatctttttctttccttcccaagaaactgaggaatgtttaatatgaaaacatacatcggatatgtgaaaagcacaacaaaattcttaatgtacacagtaaaaaagtaaatatataaatgtagatggcatttaggaccacagcttgctggatttgtgttagctatgggaataacttgattttgtataagctatttagagtgaggctggaggtggcagcttcacagaactggagaaccaggccaagtcccctccccaacctaattaggtcattcaggacagctaagtcagtatatttagagcaatactagcatacgtttttcttaattgttatcagcattgaccaagtggtttggaaggaggcatgctttaatatcacaataattttgatttgtaaaccaagaaattaatcctgtgtttatctaacttcataatagcaattattgcccgaagctatagtggcatatttacaaaagttcttattactgggcggactgataacatttaaaaaataattgtgtttgaccccaaatgactttatacccaattctacataaaaatatagaagatctatctttttttgttaccttcagatgttcactaaataactcagtttttaagcagaagttttcagggcattaaatatatgttgtgtatgaagtatctcaaactggaacataaatttagtgatcaaactgccattcacagtgtaaggcagcacttaaatttcgaacctaaagtttagatgcattgtataaaaaaacctaaaagcagtatctgttatttagctgtaaaccaagttggaagctattcggataatttcttaaatattgatgaactttggagtactgtttcttccttcaaactgaatgtaattaattcatgaataaatgcaccttatatgtttaaacaatctttgtatacttttgggatttttggtgcttatatgctaaatcacattcagcatgtgtattttgacatttaaaatacttccctcaattctgtaaattaaaagaatagttattttacagttccagggattgtgaaataaatgttgcagttttttaaaataatgaaaataaatactcttggttttgctttgtga

SEQ ID NO: 8653 - DNA, 2773 bp, Homo sapiens
tattaccttgaagttttgagttaaaagaactcacaattttagtttaataattctaatttgagcaattgaacaaactgaactgataaccagcaaatttgtcactggtaccttccattttacagtgtcattgtctttatatagtggtctgtgagctgcccatggaagtcgattatttcaggtagtcaccacgtaagtgactgtcattcaatgcagtgatttcatgagtgcaatatttcttagtgtagacgaactttacagtgataatcactaggagaatgttcacaattaggtaaaacattcatgaaagagtgctcccccactctgtttgcttttagatttaaatgatgggggtagtatctcgcttctgtttcatgtcacgctggtattgaagagagcagaaaagagattatcttttgtttgataccttaagaatgatgcagaacatatgcttaatgtccatgttttaagaataatctgaagcagtgtagcacaaaaatggtctattatttcaggcctaatattttttaatatgtatttctatttgtgaaatattatttaaggacattgctttaaaattattcagtattagactgtcttctctgacttagtagagatctttttaatttcctccgcagcactgaacaattgaaaatatgtataatattcctaactttttttgcaagactttatttttctgatatgttattgtacaatatttaattctaaatttatttcaatttctcccccttcagtttaatgagtggtgttaagaataatgttggaagagggatcaatgttgccttggcaaatggaaaaacaggagaagtattagacactaaatattttgacatgtggggaggagatgtggcaccatttattgagtttctgaaggccatacaagatggaacaatagttttaatgggaacatacgatgatggagcaaccaaactcaatgatgaggcacggcggctcattgctgatttggggagcacatctattactaatcttggttttagagacaactgggtcttctgtggtgggaagggcattaagacaaaaagcccttttgaacagcacataaagaacaataaggatacaaacaaatatgaaggatggcctgaagttgtagaaatggaaggatgcatcccccagaagcaagactaatggaaatgtggagagaattgaagaaagcgcactttcactcttaatgggagagctataaatggcagagctatgtgtaaatattttaagagcatgcagccatcttggtgtgtgcatgagtattgtctcttttgatatcaggattatttattgctaacgtaaatagatagcattgtaaataatcatcacaatgatcaaatcactgaaccatgtctccgcacatttccctaaaagtacaatgtttagactgctatggtaatacatattttaaattctaaaagcatacacaatgtgtaactgaatggtttgtgaaaaatatattgatatatatactagttgctatgaaaatatcatggaataatagggattttagggtggatactttattttcttttatgtttctatatgttgcgttgtgatgacattatcttttaaattaaaaagagatttggctagttgtgtgtgtaatgttactttacagtccgactctcctgatgtacctcttttcatgatctttttctttccttcccaagaaactgaggaatgtttaatatgaaaacatacatcggatatgtgaaaagcacaacaaaattcttaatgtacacagtaaaaaagtaaatatataaatgtagatggcatttaggaccacagcttgctggatttgtgttagctatgggaataacttgattttgtataagctatttagagtgaggctggaggtggcagcttcacagaactggagaaccaggccaagtcccctccccaacctaattaggtcattcaggacagctaagtcagtatatttagagcaatactagcatacgtttttcttaattgttatcagcattgaccaagtggtttggaaggaggcatgctttaatatcacaataattttgatttgtaaaccaagaaattaatcctgtgtttatctaacttcataatagcaattattgcccgaagctatagtggcatatttacaaaagttcttattactgggcggactgataacatttaaaaaataattgtgtttgaccccaaatgactttatacccaattctacataaaaatatagaagatctatctttttttgttaccttcagatgttcactaaataactcagtttttaagcagaagttttcagggcattaaatatatgttgtgtatgaagtatctcaaactggaacataaatttagtgatcaaactgccattcacagtgtaaggcagcacttaaatttcgaacctaaagtttagatgcattgtataaaaaaacctaaaagcagtatctgttatttagctgtaaaccaagttggaagctattcggataatttcttaaatattgatgaactttggagtactgtttcttccttcaaactgaatgtaattaattcatgaataaatgcaccttatatgtttaaacaatctttgtatacttttgggatttttggtgcttatatgctaaatcacattcagcatgtgtattttgacatttaaaatacttccctcaattctgtaaattaaaagaatagttattttacagttccagggattgtgaaataaatgttgcagttttttaaaataatgaaaataaatactcttggttttgctttgtga

SEQ ID NO: 8654 - DNA, 3118 bp, Homo sapiens
agcggagcggcgagctggctttctcctggccacttgccggggtgaggggcagccggaggagtccgagaggaagcggaggcgcgagctggaggcggcggctcccgtcggcctccggcaggactgagcgctgggaggccggaaggcgggcgcgcacggcggagaggcgggcgggaggccggagcatattaatgaaaagtgccataaactgaaaaaccaaacatgagggtagcaggtgctgcaaagttggtggtagctgtggcagtgtttttactgacattttatgttatttctcaagtatttgaaataaaaatggatgcaagtttaggaaatctatttgcaagatcagcattggacacagctgcacgttctacaaagcctcccagatataagtgtgggatctcaaaagcttgccctgagaagcattttgcttttaaaatggcaagtggagcagccaacgtggtgggacccaaaatctgcctggaagataatgttttaatgagtggtgttaagaataatgttggaagagggatcaatgttgccttggcaaatggaaaaacaggagaagtattagacactaaatattttgacatgtggggaggagatgtggcaccatttattgagtttctgaaggccatacaagatggaacaatagttttaatgggaacatacgatgatggagcaaccaaactcaatgatgaggcacggcggctcattgctgatttggggagcacatctattactaatcttggttttagagacaactgggtcttctgtggtgggaagggcattaagacaaaaagcccttttgaacagcacataaagaacaataaggatacaaacaaatatgaaggatggcctgaagttgtagaaatggaaggatgcatcccccagaagcaagactaatggaaatgtggagagaattgaagaaagcgcactttcactcttaatgggagagctataaatggcagagctatgtgtaaatattttaagagcatgcagccatcttggtgtgtgcatgagtattgtctcttttgatatcaggattatttattgctaacgtaaatagatagcattgtaaataatcatcacaatgatcaaatcactgaaccatgtctccgcacatttccctaaaagtacaatgtttagactgctatggtaatacatattttaaattctaaaagcatacacaatgtgtaactgaatggtttgtgaaaaatatattgatatatatactagttgctatgaaaatatcatggaataatagggattttagggtggatactttattttcttttatgtttctatatgttgcgttgtgatgacattatcttttaaattaaaaagagatttggctagttgtgtgtgtaatgttactttacagtccgactctcctgatgtacctcttttcatgatctttttctttccttcccaagaaactgaggaatgtttaatatgaaaacatacatcggatatgtgaaaagcacaacaaaattcttaatgtacacagtaaaaaagtaaatatataaatgtagatggcatttaggaccacagcttgctggatttgtgttagctatgggaataacttgattttgtataagctatttagagtgaggctggaggtggcagcttcacagaactggagaaccaggccaagtcccctccccaacctaattaggtcattcaggacagctaagtcagtatatttagagcaatactagcatacgtttttcttaattgttatcagcattgaccaagtggtttggaaggaggcatgctttaatatcacaataattttgatttgtaaaccaagaaattaatcctgtgtttatctaacttcataatagcaattattgcccgaagctatagtggcatatttacaaaagttcttattactgggcggactgataacatttaaaaaataattgtgtttgaccccaaatgactttatacccaattctacataaaaatatagaagatctatctttttttgttaccttcagatgttcactaaataactcagtttttaagcagaagttttcagggcattaaatatatgttgtgtatgaagtatctcaaactggaacataaatttagtgatcaaactgccattcacagtgtaaggcagcacttaaatttcgaacctaaagtttagatgcattgtataaaaaaacctaaaagcagtatctgttatttagctgtaaaccaagttggaagctattcggataatttcttaaatattgatgaactttggagtactgtttcttccttcaaactgaatgtaattaattcatgaataaatgcaccttatatgtttaaacaatctttgtatacttttgggatttttggtgcttatatgctaaatcacattcagcatgtgtattttgacatttaaaatacttccctcaattctgtaaattaaaagaatagttattttacagttccagggattgtgaaataaatgttgcagttttttaaaataatgaaaataaatactcttggttttgctttgtgaatttttttttttttttgtattatctggcaaagtaatatacctacagaacttcacaaaaactcacacaaggtttttcaagcatttattatactgcctaacttggaaaaaaaattgttgctgtggttaaaaatagtaatatcctagatgtgtcttaacatgtaagaagctaagtatctagatggcggaaaaagcccttttattaagactgtaaaaggatagcttttccagatatataaaatgttaaaagaagacaaagattggttatgttaactggtgtggtttccttttgtctcagttcaatcttgtatagattgtgccaacttaactttgaaagcaataactttatactacattttcagatacctctttaaaatcggttttagacatgaaacagtgctcatttaatattaagaatgttctttattaaaatcaaattaacattgacatagtatttgaaatggtgcttatgggcttatcgatgcatattttttatttgtaatccgatgctgtcccagaataagtgtattgtaatgtgaatgttaaaattgaacaagagaaagcaggaaaataagtggtatttgggaaattaaaggaagattgaaccag

SEQ ID NO: 8655 - DNA, 2315 bp, Homo sapiens
agcggagcggcgagctggctttctcctggccacttgccggggtgaggggcagccggaggagtccgagaggaagcggaggcgcgagctggaggcggcggctcccgtcggcctccggcaggactgagcgctgggaggccggaaggcgggcgcgcacggcggagaggcgggcgggaggccggagcatattaatgaaaagtgccataaactgaaaaaccaaacatgagggtagcaggtgctgcaaagttggtggtagctgtggcagtgtttttactgacattttatgttatttctcaagtatttgaaataaaaatggatgcaagtttaggaaatctatttgcaagatcagcattggacacagctgcacgttctacaaagcctcccagatataagtgtgggatctcaaaagcttgccctgagaagcattttgcttttaaaatggcaagtggagcagccaacgtggtgggacccaaaatctgcctggaagataatgttttaatgagtggtgttaagaataatgttggaagagggatcaatgttgccttggcaaatggaaaaacaggagaagtattagacactaaatattttgacatgtggggaggagatgtggcaccatttattgagtttctgaaggccatacaagatggaacaatagttttaatgggaacatacgatgatggagcaaccaaactcaatgatgaggcacggcggctcattgctgatttggggagcacatctattactaatcttggttttagagacaactgggtcttctgtggtgggaagggcattaagacaaaaagcccttttgaacagcacataaagaacaataaggatacaaacaaatatgaaggatggcctgaagttgtagaaatggaaggatgcatcccccagaagcaagactaatggaaatgtggagagaattgaagaaagcgcactttcactcttaatgggagagctataaatggcagagctatgtgtaaatattttaagagcatgcagccatcttggtgtgtgcatgagtattgtctcttttgatatcaggattatttattgctaacgtaaatagatagcattgtaaataatcatcacaatgatcaaatcactgaaccatgtctccgcacatttccctaaaagtacaatgtttagactgctatggtaatacatattttaaattctaaaagcatacacaatgtgtaactgaatggtttgtgaaaaatatattgatatatatactagttgctatgaaaatatcatggaataatagggattttagggtggatactttattttcttttatgtttctatatgttgcgttgtgatgacattatcttttaaattaaaaagagatttggctagttgtgtgtgtaatgttactttacagtccgactctcctgatgtacctcttttcatgatctttttctttccttcccaagaaactgaggaatgtttaatatgaaaacatacatcggatatgtgaaaagcacaacaaaattcttaatgtacacagtaaaaaagtaaatatataaatgtagatggcatttaggaccacagcttgctggatttgtgttagctatgggaataacttgattttgtataagctatttagagtgaggctggaggtggcagcttcacagaactggagaaccaggccaagtcccctccccaacctaattaggtcattcaggacagctaagtcagtatatttagagcaatactagcatacgtttttcttaattgttatcagcattgaccaagtggtttggaaggaggcatgctttaatatcacaataattttgatttgtaaaccaagaaattaatcctgtgtttatctaacttcataatagcaattattgcccgaagctatagtggcatatttacaaaagttcttattactgggcggactgataacatttaaaaaataattgtgtttgaccccaaatgactttatacccaattctacataaaaatatagaagatctatctttttttgttaccttcagatgttcactaaataactcagtttttaagcagaagttttcagggcattaaatatatgttgtgtatgaagtatctcaaactggaacataaatttagtgatcaaactgccattcacagtgtaaggcagcacttaaatttcgaacctaaagtttagatgcattgtataaaaaaacctaaaagcagtatctgttatttagctgtaaaccaagttggaagctattcggataatttcttaaatattgatgaactttggagtactgtttcttccttcaaactgaatgtaattaattcatgaataaatgcaccttatatgttta

SEQ ID NO: 8656 - DNA, 1733 bp, Homo sapiens
tgatcggccggtcccctagttagaagttcaatagcacataaagaacaataaggatacaaacaaatatgaaggatggcctgaagttgtagaaatggaaggatgcatcccccagaagcaagactaatggaaatgtggagagaattgaagaaagcgcactttcactcttaatgggagagctataaatggcagagctatgtgtaaatattttaagagcatgcagccatcttggtgtgtgcatgagtattgtctcttttgatatcaggattatttattgctaacgtaaatagatagcattgtaaataatcatcacaatgatcaaatcactgaaccatgtctccgcacatttccctaaaagtacaatgtttagactgctatggtaatacatattttaaattctaaaagcatacacaatgtgtaactgaatggtttgtgaaaaatatattgatatatatactagttgctatgaaaatatcatggaataatagggattttagggtggatactttattttcttttatgtttctatatgttgcgttgtgatgacattatcttttaaattaaaaagagatttggctagttgtgtgtgtaatgttactttacagtccgactctcctgatgtacctcttttcatgatctttttctttccttcccaagaaactgaggaatgtttaatatgaaaacatacatcggatatgtgaaaagcacaacaaaattcttaatgtacacagtaaaaaagtaaatatataaatgtagatggcatttaggaccacagcttgctggatttgtgttagctatgggaataacttgattttgtataagctatttagagtgaggctggaggtggcagcttcacagaactggagaaccaggccaagtcccctccccaacctaattaggtcattcaggacagctaagtcagtatatttagagcaatactagcatacgtttttcttaattgttatcagcattgaccaagtggtttggaaggaggcatgctttaatatcacaataattttgatttgtaaaccaagaaattaatcctgtgtttatctaacttcataatagcaattattgcccgaagctatagtggcatatttacaaaagttcttattactgggcggactgataacatttaaaaaataattgtgtttgaccccaaatgactttatacccaattctacataaaaatatagaagatctatctttttttgttaccttcagatgttcactaaataactcagtttttaagcagaagttttcagggcattaaatatatgttgtgtatgaagtatctcaaactggaacataaatttagtgatcaaactgccattcacagtgtaaggcagcacttaaatttcgaacctaaagtttagatgcattgtataaaaaaacctaaaagcagtatctgttatttagctgtaaaccaagttggaagctattcggataatttcttaaatattgatgaactttggagtactgtttcttccttcaaactgaatgtaattaattcatgaataaatgcaccttatatgtttaaacaatctttgtatacttttgggatttttggtgcttatatgctaaatcacattcagcatgtgtattttgacatttaaaatacttccctcaattctgtaaattaaaagaatagttattttacagttccagggattgtgaaataaatgttgcagttttttaaaataatgaaaataaatactcttggttttgctttgtga

SEQ ID NO: 8657 - DNA, 1756 bp, Homo sapiens
  misc_feature (43)..(43): n is a, c, g, or t
  misc_feature (61)..(61): n is a, c, g, or t
  misc_feature (63)..(63): n is a, c, g, or t
tggccgggcctggccctggcaccgcccgcgcccctgtctttancacggctggtgcggggcnanaagccacatttggatacaaacaaatatgaaggatggcctgaagttgtagaaatggaaggatgcatcccccagaagcaagactaatggaaatgtggagagaattgaagaaagcgcactttcactcttaatgggagagctataaatggcagagctatgtgtaaatattttaagagcatgcagccatcttggtgtgtgcatgagtattgtctcttttgatatcaggattatttattgctaacgtaaatagatagcattgtaaataatcatcacaatgatcaaatcactgaaccatgtctccgcacatttccctaaaagtacaatgtttagactgctatggtaatacatattttaaattctaaaagcatacacaatgtgtaactgaatggtttgtgaaaaatatattgatatatatactagttgctatgaaaatatcatggaataatagggattttagggtggatactttattttcttttatgtttctatatgttgcgttgtgatgacattatcttttaaattaaaaagagatttggctagttgtgtgtgtaatgttactttacagtccgactctcctgatgtacctcttttcatgatctttttctttccttcccaagaaactgaggaatgtttaatatgaaaacatacatcggatatgtgaaaagcacaacaaaattcttaatgtacacagtaaaaaagtaaatatataaatgtagatggcatttaggaccacagcttgctggatttgtgttagctatgggaataacttgattttgtataagctatttagagtgaggctggaggtggcagcttcacagaactggagaaccaggccaagtcccctccccaacctaattaggtcattcaggacagctaagtcagtatatttagagcaatactagcatacgtttttcttaattgttatcagcattgaccaagtggtttggaaggaggcatgctttaatatcacaataattttgatttgtaaaccaagaaattaatcctgtgtttatctaacttcataatagcaattattgcccgaagctatagtggcatatttacaaaagttcttattactgggcggactgataacatttaaaaaataattgtgtttgaccccaaatgactttatacccaattctacataaaaatatagaagatctatctttttttgttaccttcagatgttcactaaataactcagtttttaagcagaagttttcagggcattaaatatatgttgtgtatgaagtatctcaaactggaacataaatttagtgatcaaactgccattcacagtgtaaggcagcacttaaatttcgaacctaaagtttagatgcattgtataaaaaaacctaaaagcagtatctgttatttagctgtaaaccaagttggaagctattcggataatttcttaaatattgatgaactttggagtactgtttcttccttcaaactgaatgtaattaattcatgaataaatgcaccttatatgtttaaacaatctttgtatacttttgggatttttggtgcttatatgctaaatcacattcagcatgtgtattttgacatttaaaatacttccctcaattctgtaaattaaaagaatagttattttacagttccagggattgtgaaataaatgttgcagttttttaaaataatgaaaataaatactcttggttttgctttgtga

SEQ ID NO: 8658 - DNA, 1100 bp, Homo sapiens
gccctacctaacattgacgtgaagatggggagagcctttgactccaccatacatcggatatgtgaaaagcacaacaaaattcttaatgtacacagtaaaaaagtaaatatataaatgtagatggcatttaggaccacagcttgctggatttgtgttagctatgggaataacttgattttgtataagctatttagagtgaggctggaggtggcagcttcacagaactggagaaccaggccaagtcccctccccaacctaattaggtcattcaggacagctaagtcagtatatttagagcaatactagcatacgtttttcttaattgttatcagcattgaccaagtggtttggaaggaggcatgctttaatatcacaataattttgatttgtaaaccaagaaattaatcctgtgtttatctaacttcataatagcaattattgcccgaagctatagtggcatatttacaaaagttcttattactgggcggactgataacatttaaaaaataattgtgtttgaccccaaatgactttatacccaattctacataaaaatatagaagatctatctttttttgttaccttcagatgttcactaaataactcagtttttaagcagaagttttcagggcattaaatatatgttgtgtatgaagtatctcaaactggaacataaatttagtgatcaaactgccattcacagtgtaaggcagcacttaaatttcgaacctaaagtttagatgcattgtataaaaaaacctaaaagcagtatctgttatttagctgtaaaccaagttggaagctattcggataatttcttaaatattgatgaactttggagtactgtttcttccttcaaactgaatgtaattaattcatgaataaatgcaccttatatgtttaaacaatctttgtatacttttgggatttttggtgcttatatgctaaatcacattcagcatgtgtattttgacatttaaaatacttccctcaattctgtaaattaaaagaatagttattttacagttccagggattgtgaaataaatgttgcagttttttaaaataatgaaaataaatactcttggttttgctttgtga

SEQ ID NO: 8659 - DNA, 1137 bp, Homo sapiens
tcttttccttaccttcccaaggaagtgaggaacgtgtaatatgaagacattgatcgtatatgtgacctagcaccaatcctgttcttaatgtagctagcatgtgagaatacatgtcacatatataaatcgtcagcagtggcataacggaccatacgtgttgcagaaactcaagatgtgagctcatgagggatactaacatctgggtatctgtactaacgacgtgatgtcacaagtgaggctggaggtggcagcttcacagaactggagaaccaggccaagtcccctccccaacctaattaggtcattcaggacagctaagtcagtatatttagagcaatactagcatacgtttttcttaattgttatcagcattgaccaagtggtttggaaggaggcatgctttaatatcacaataattttgatttgtaaaccaagaaattaatcctgtgtttatctaacttcataatagcaattattgcccgaagctatagtggcatatttacaaaagttcttattactgggcggactgataacatttaaaaaataattgtgtttgaccccaaatgactttatacccaattctacataaaaatatagaagatctatctttttttgttaccttcagatgttcactaaataactcagtttttaagcagaagttttcagggcattaaatatatgttgtgtatgaagtatctcaaactggaacataaatttagtgatcaaactgccattcacagtgtaaggcagcacttaaatttcgaacctaaagtttagatgcattgtataaaaaaacctaaaagcagtatctgttatttagctgtaaaccaagttggaagctattcggataatttcttaaatattgatgaactttggagtactgtttcttccttcaaactgaatgtaattaattcatgaataaatgcaccttatatgtttaaacaatctttgtatacttttgggatttttggtgcttatatgctaaatcacattcagcatgtgtattttgacatttaaaatacttccctcaattctgtaaattaaaagaatagttattttacagttccagggattgtgaaataaatgttgcagttttttaaaataatgaaaataaatactcttggttttgctttgtga

SEQ ID NO: 8660 - DNA, 1355 bp, Homo sapiens
agcggagcggcgagctggctttctcctggccacttgccggggtgaggggcagccggaggagtccgagaggaagcggaggcgcgagctggaggcggcggctcccgtcggcctccggcaggactgagcgctgggaggccggaaggcgggcgcgcacggcggagaggcgggcgggaggccggagcatattaatgaaaagtgccataaactgaaaaaccaaacatgagggtagcaggtgctgcaaagttggtggtagctgtggcagtgtttttactgacattttatgttatttctcaagtatttgaaataaaaatggatgcaagtttaggaaatctatttgcaagatcagcattggacacagctgcacgttctacaaagcctcccagatataagtgtgggatctcaaaagcttgccctgagaagcattttgcttttaaaatggcaagtggagcagccaacgtggtgggacccaaaatctgcctggaagataatgttttaatgagtggtgttaagaataatgttggaagagggatcaatgttgccttggcaaatggaaaaacaggagaagtattagacactaaatattttgacatgtggggaggagatgtggcaccatttattgagtttctgaaggccatacaagatggaacaatagttttaatgggaacatacgatgatggagcaaccaaactcaatgatgaggcacggcggctcattgctgatttggggagcacatctattactaatcttggttttagagacaactgggtcttctgtggtgggaagggcattaagacaaaaagcccttttgaacagcacataaagaacaataaggatacaaacaaatatgaaggatggcctgaagttgtagaaatggaaggatgcatcccccagaagcaagactaatggaaatgtggagagaattgaagaaagcgcactttcactcttaatgggagagctataaatggcagagctatgtgtaaatattttaagagcatgcagccatcttggtgtgtgcatgagtattgtctcttttgatatcaggattatttattgctaacgtaaatagatagcattgtaaataatcatcacaatgatcaaatcactgaaccatgtctccgcacatttccctaaaagtacaatgtttagactgctatggtaatacatattttaaattctaaaagcatacacaatgtgtaactgaatggtttgtgaaaaatatattgatatatatactagttgctatgaaaatatcatggaataatagggattttagggtggatactttattttcttttatgtttctatatgttgcgttgtgatgacattatcttttaaattaaaaagagatttggcta

SEQ ID NO: 8661 - DNA, 630 bp, Homo sapiens
agcggagcggcgagctggctttctcctggccacttgccggggtgaggggcagccggaggagtccgagaggaagcggaggcgcgagctggaggcggcggctcccgtcggcctccggcaggactgagcgctgggaggccggaaggcgggcgcgcacggcggagaggcgggcgggaggccggagcatattaatgaaaagtgccataaactgaaaaaccaaacatgagggtagcaggtgctgcaaagttggtggtagctgtggcagtgtttttactgacattttatgttatttctcaagtatttgaaataaaaatggatgcaagtttaggaaatctatttgcaagatcagcattggacacagctgcacgttctacaaagcctcccagatataagtgtgggatctcaaaagcttgccctgagaagcattttgcttttaaaatggcaagtggagcagccaacgtggtgggacccaaaatctgcctggaagataatgttttaatgagtggtgttaagaataatgttggaagagggatcaatgttgccttggcaaatggaaaaagttgttaacattccttgagctgcattactttaatgtgtctgcttaaaagtctcaaggtatgtgtagaaatcgaa

SEQ ID NO: 8662 - DNA, 2377 bp, Homo sapiens
agcggagcggcgagctggctttctcctggccacttgccggggtgaggggcagccggaggagtccgagaggaagcggaggcgcgagctggaggcggcggctcccgtcggcctccggcaggactgagcgctgggaggccggaaggcgggcgcgcacggcggagaggcgggcgggaggccggagcatattaatgaaaagtgccataaactgaaaaaccaaacatgagggtagcagctacaaagcctcccagatataagtgtgggatctcaaaagcttgccctgagaagcattttgcttttaaaatggcaagtggagcagccaacgtggtgggacccaaaatctgcctggaagataatgttttaatgagtggtgttaagaataatgttggaagagggatcaatgttgccttggcaaatggaaaaacaggagaagtattagacactaaatattttgacatgtggggaggagatgtggcaccatttattgagtttctgaaggccatacaagatggaacaatagttttaatgggaacatacgatgatggagcaaccaaactcaatgatgaggcacggcggctcattgctgatttggggagcacatctattactaatcttggttttagagacaactgggtcttctgtggtgggaagggcattaagacaaaaagcccttttgaacagcacataaagaacaataaggatacaaacaaatatgaaggatggcctgaagttgtagaaatggaaggatgcatcccccagaagcaagactaatggaaatgtggagagaattgaagaaagcgcactttcactcttaatgggagagctataaatggcagagctatgtgtaaatattttaagagcatgcagccatcttggtgtgtgcatgagtattgtctcttttgatatcaggattatttattgctaacgtaaatagatagcattgtaaataatcatcacaatgatcaaatcactgaaccatgtctccgcacatttccctaaaagtacaatgtttagactgctatggtaatacatattttaaattctaaaagcatacacaatgtgtaactgaatggtttgtgaaaaatatattgatatatatactagttgctatgaaaatatcatggaataatagggattttagggtggatactttattttcttttatgtttctatatgttgcgttgtgatgacattatcttttaaattaaaaagagatttggctagttgtgtgtgtaatgttactttacagtccgactctcctgatgtacctcttttcatgatctttttctttccttcccaagaaactgaggaatgtttaatatgaaaacatacatcggatatgtgaaaagcacaacaaaattcttaatgtacacagtaaaaaagtaaatatataaatgtagatggcatttaggaccacagcttgctggatttgtgttagctatgggaataacttgattttgtataagctatttagagtgaggctggaggtggcagcttcacagaactggagaaccaggccaagtcccctccccaacctaattaggtcattcaggacagctaagtcagtatatttagagcaatactagcatacgtttttcttaattgttatcagcattgaccaagtggtttggaaggaggcatgctttaatatcacaataattttgatttgtaaaccaagaaattaatcctgtgtttatctaacttcataatagcaattattgcccgaagctatagtggcatatttacaaaagttcttattactgggcggactgataacatttaaaaaataattgtgtttgaccccaaatgactttatacccaattctacataaaaatatagaagatctatctttttttgttaccttcagatgttcactaaataactcagtttttaagcagaagttttcagggcattaaatatatgttgtgtatgaagtatctcaaactggaacataaatttagtgatcaaactgccattcacagtgtaaggcagcacttaaatttcgaacctaaagtttagatgcattgtataaaaaaacctaaaagcagtatctgttatttagctgtaaaccaagttggaagctattcggataatttcttaaatattgatgaactttggagtactgtttcttccttcaaactgaatgtaattaattcatgaataaatgcaccttatatgtttaaacaatctttgtatacttttgggatttttggtgcttatatgctaaatcacattcagcatgtgtattttgacatttaaaatacttccctcaattctgtaaattaaaagaatagttattttacagttccagggattgtgaaataaatgttgcagttttttaaaataatgaaaataaatactcttggttttgctttgtga

SEQ ID NO: 8663 - DNA, 2474 bp, Homo sapiens
agcggagcggcgagctggctttctcctggccacttgccggggtgaggggcagccggaggagtccgagaggaagcggaggcgcgagctggaggcggcggctcccgtcggcctccggcaggactgagcgctgggaggccggaaggcgggcgcgcacggcggagaggcgggcgggaggccggagcatattaatgaaaagtgccataaactgaaaaaccaaacatgagggtagcaggtgctgcaaagttggtggtagctgtggcagtgtttttactgacattttatgttatttctcaagtatttgaaataaaaatggatgcaagtttaggaaatctatttgcaagatcagcattggacacagctgcacgttctacaaagcctcccagatataagtgtgggatctcaaaagcttgccctgagaagcattttgcttttaaaatggcaagtggagcagccaacgtggtgggacccaaaatctgcctggaagataatgttttaatgagtggtgttaagaataatgttggaagagggatcaatgttgccttggcaaatggaaaaacaggagaagtattagacactaaatattttgacatgtggggaggagatgtggcaccatttattgagtttctgaaggccatacaagatggaacaatagttttaatgggaacatacgatgatggagcaaccaaactcaatgatgaggcacggcggctcattgctgatttggggagcacatctattactaatcttggttttagagacaactgggtcttctgtggtgggaagggcattaagacaaaaagcccttttgaacagcacataaagaacaataaggatacaaacaaatatgaaggatggcctgaagttgtagaaatggaaggatgcatcccccagaagcaagactaatggaaatgtggagagaattgaagaaagcgcactttcactcttaatgggagagctataaatggcagagctatgtgtaaatattttaagagcatgcagccatcttggtgtgtgcatgagtattgtctcttttgatatcaggattatttattgctaacgtaaatagatagcattgtaaataatcatcacaatgatcaaatcactgaaccatgtctccgcacatttccctaaaagtacaatgtttagactgctatggtaatacatattttaaattctaaaagcatacacaatgtgtaactgaatggtttgtgaaaaatatattgatatatatactagttgctatgaaaatatcatggaataatagggattttagggtggatactttattttcttttatgtttctatatgttgcgttgtgatgacattatcttttaaattaaaaagagatttggctagttgtgtgtgtaatgttactttacagtccgactctcctgatgtacctcttttcatgatctttttctttccttcccaagaaactgaggaatgtttaatatgaaaacatacatcggatatgtgaaaagcacaacaaaattcttaatgtacacagtaaaaaagtaaatatataaatgtagatggcatttaggaccacagcttgctggatttgtgttagctatgggaataacttgattttgtataagctatttagagtgaggctggaggtggcagcttcacagaactggagaaccaggccaagtcccctccccaacctaattaggtcattcaggacagctaagtcagtatatttagagcaatactagcatacgtttttcttaattgttatcagcattgaccaagtggtttggaaggaggcatgctttaatatcacaataattttgatttgtaaaccaagaaattaatcctgtgtttatctaacttcataatagcaattattgcccgaagctatagtggcatatttacaaaagttcttattactgggcggactgataacatttaaaaaataattgtgtttgaccccaaatgactttatacccaattctacataaaaatatagaagatctatctttttttgttaccttcagatgttcactaaataactcagtttttaagcagaagttttcagggcattaaatatatgttgtgtatgaagtatctcaaactggaacataaatttagtgatcaaactgccattcacagtgtaaggcagcacttaaatttcgaacctaaagtttagatgcattgtataaaaaaacctaaaagcagtatctgttatttagctgtaaaccaagttggaagctattcggataatttcttaaatattgatgaactttggagtactgtttcttccttcaaactgaatgtaattaattcatgaataaatgcaccttatatgtttaaacaatctttgtatacttttgggatttttggtgcttatatgctaaatcacattcagcatgtgtattttgacatttaaaatacttccctcaattctgtaaattaaaagaatagttattttacagttccagggattgtgaaataaatgttgcagtttttta

SEQ ID NO: 8664 - DNA, 2138 bp, Homo sapiens
agcggagcggcgagctggctttctcctggccacttgccggggtgaggggcagccggaggagtccgagaggaagcggaggcgcgagctggaggcggcggctcccgtcggcctccggcaggactgagcgctgggaggccggaaggcgggcgcgcacggcggagaggcgggcgggaggccggagcatattaatgaaaagtgccataaactgaaaaaccaaacatgagggtagcaggtgctgcaaagttggtggtagctgtggcagtgtttttactgacattttatgttatttctcaagtatttgaaataaaaatggatgcaagtttaggaaatctatttgcaagatcagcattggacacagctgcacgttctacaaagcctcccagatataagtgtgggatctcaaaagcttgccctgagaagcattttgcttttaaaatggcaagtggagcagccaacgtggtgggacccaaaatctgcctggaagataatgttttaatgagtggtgttaagaataatgttggaagagggatcaatgttgccttggcaaatggaaaaacaggagaagtattagacactaaatattttgacatgtggggaggagatgtggcaccatttattgagtttctgaaggccatacaagatggaacaatagttttaatgggaacatacgatgatggagcaaccaaactcaatgatgaggcacggcggctcattgctgatttggggagcacatctattactaatcttggttttagagacaactgggtcttctgtggtgggaagggcattaagacaaaaagcccttttgaacagcacataaagaacaataaggatacaaacaaatatgaaggatggcctgaagttgtagaaatggaaggatgcatcccccagaagcaagactaatggaaatgtggagagaattgaagaaagcgcactttcactcttaatgggagagctataaatggcagagctatgtgtaaatattttaagagcatgcagccatcttggtgtgtgcatgagtattgtctcttttgatatcaggattatttattgctaacgtaaatagatagcattgtaaataatcatcacaatgatcaaatcactgaaccatgtctccgcacatttccctaaaagtacaatgtttagactgctatggtaatacatattttaaattctaaaagcatacacaatgttagctatgggaataacttgattttgtataagctatttagagtgaggctggaggtggcagcttcacagaactggagaaccaggccaagtcccctccccaacctaattaggtcattcaggacagctaagtcagtatatttagagcaatactagcatacgtttttcttaattgttatcagcattgaccaagtggtttggaaggaggcatgctttaatatcacaataattttgatttgtaaaccaagaaattaatcctgtgtttatctaacttcataatagcaattattgcccgaagctatagtggcatatttacaaaagttcttattactgggcggactgataacatttaaaaaataattgtgtttgaccccaaatgactttatacccaattctacataaaaatatagaagatctatctttttttgttaccttcagatgttcactaaataactcagtttttaagcagaagttttcagggcattaaatatatgttgtgtatgaagtatctcaaactggaacataaatttagtgatcaaactgccattcacagtgtaaggcagcacttaaatttcgaacctaaagtttagatgcattgtataaaaaaacctaaaagcagtatctgttatttagctgtaaaccaagttggaagctattcggataatttcttaaatattgatgaactttggagtactgtttcttccttcaaactgaatgtaattaattcatgaataaatgcaccttatatgtttaaacaatctttgtatacttttgggatttttggtgcttatatgctaaatcacattcagcatgtgtattttgacatttaaaatacttccctcaattctgtaaattaaaagaatagttattttacagttccagggattgtgaaataaatgttgcagttttttaaaataatgaaaataaatactcttggttttgctttgtga

SEQ ID NO: 8665 - DNA, 3234 bp, Homo sapiens
  misc_feature (1)..(1): n is a, c, g, or t
  misc_feature (3)..(5): n is a, c, g, or t
  misc_feature (7)..(7): n is a, c, g, or t
  misc_feature (1277)..(1277): n is a, c, g, or t
  misc_feature (1362)..(1362): n is a, c, g, or t
ngnnngnggcccagaactccctgtaggaattgccaaggggagaaggaaggaagggtgtttctacagagatgacagaatgtggctagagtaggctttctcaaccttggtactgttgactcttggggtgggataattctttgttgtgggggcagtcctgtgtgtcgtaggatgccaagcagtgtccatggcttctactcactggataccagtagccccctcccttctccacaagtcatgacaatgacaaatgtctctaggctgagcatgctggctcatgcctgtaatcccagcactttgggaagctgaggaaggaggatcacttgagcccaggagttcaagaccagcctgagcaacacagtgagacctcatctctacaaaaataaaataaaattagccaggtgtgatggcgtgcacccataatcccagctactcgggaggctgaggtgggcggatcacttgagcctgcgaggtggaggctgcagtgagctgagattgtgccactgcgctagagcctgggggacagagcgagaccctgtctagaaaaaaataagtctccagacattgccaaatgtttttggaaggcagaatcacccgctgattgaaaactactgggcctttggagatggggagcatacgggcaagactggagagtggattgggagctgagtaggctgcagcgacaatgcaaagtgatggaaggggagaggcgggcctacagcaaggaagtccaccagcgcatcaacaagcaacttgaggagatccggcgcttggaggaggtacggggcgatctccaggtgcagatcagcgcagcccagaaccaggtcaagcggcttcgggacagtcagcggctggagaacatggaccgcctgctgaagggccgggcccaggtgcaggcggagatcgaggagctgcaggagcagaccagggccctggacaagcagatccaggagtgggagacgcggatctttacccacagtaagaatgtcaggtccccgggattcatcctggatcagaaggtcaagatcaggcgaaggatcaggatcctagaaaaccagttggacagggtcacctgtcactttgacaaccagctggtacggaatgcggccctgcgggaggagctggatctgctgcggatcgacaggaaccgctatctgaacgtggaccgcaagctgaagaaggagatccaccacctgcatcacctggtcagcacccttatcctctcctccacctctgcctacgccgtcagggaggaggcgaaggccaagatgggcttgctncgggagcgcgcggagaaagaggaggcccagagcgagatggaggcgcaggtcctgcagcggcagatcttgcacctggagcagctgnaccacttcctcaagctcaagaacaacgaccggcagccggatcccgatgtcctggagaagcgtgaaaagcaggccggggaggtggccgagggcgtctggaagacctcccaggagaggctggtgctttgctacgaggacgccctgaataaactgtcccagctgatgggggagagtgaccctgacctgttggtgcagaagtatctggagatcgaggagcgcaactttgctgagttcaacttcatcaacgagcagaacttggagctggagcatgtgcaggaagagatcaaggagatgcaggaggctttggtgagcgcacgtgccagcaaggatgaccagcatttgctgcaggagcagcagcagaaggtgttgcagcagcgcatggacaaggtgcactcggaggctgagcgccttgaggcccgcttccaggatgtgcggggacagctggagaagctcaaggctgatatccagctcctcttcaccaaggcccattgcgacagcagcatgatcgatgacctccttggggtcaagaccagcatgggagaccgggacatgggcctcttcctgagcctcattgagaagcggctggtggagctcctgacagtgcaggccttcctacatgcccagagcttcacctccctggccgacgctgccctcctagtgctgggccagagcctggaggaccttccgaagaagatggccccacttcagccccctgacactctagaagaccccccgggttttgaggccagcgatgactaccccatgagcagggaggagctgctgagccaagtggagaagctggtggagctccaggagcaggcggaggcgcagcgccagaaggacctggccgccgccgccgcgaagctggacggcaccctgagcgtggacctggccagcacccagagggccggctccagtaccgtcctggtgcccaccaggcacccccatgccatccccgggtccattttgagccacaagactagcagagaccgtggctctcttggccacgtcacttttggcggcctcagctccagcactgggcatttgcccagccacatcacgcacggtgaccccaacactggccacgtgaccttcggctccaccagtgcctcgagtgggggccacgtgaccttcagacccgtcagcgccagcagctacctgggctccactggatacgtggggtccagcaggggcggagaaaacacagagggtggtgtggagagcggaggcacagcgtctgattcgagcggaggcctcgggtccagcagagaccacgtctccagcaccggccctgcctccagcactggcccgggctcctccaccagcaaagactcccggggctaacacgaggggcacgcagcccccaccctgccctggctctctgtggggtctttttttgtgtctctacttcccctgtttgccttgtgggtctctgtctttttctcccagtggcaggcctctgtctttttgccccttcaactgttttcatctgcccttcatcaccgcctcacctgtgtctcccggttcctttctctctgctcctgacactgcttttccctctgactcctgatctcctgttctctgggcttcctggtcagtgtctgtccgtcttgtctccatatctgccccttccctgtctgctgagccctggccccctgtggatcccccacctcctgtttccggctctctctcctcatctccatctcccaggctctccacgcatcctgtgtccctgtctctgtagctccttactccccaagagccccccagtgctgacaggtgtgggaaaagtcagggcgaagacgccaggttcagcatgggaaaatgggactgtggaaataaagtatatgtgtggagagccggcttcagccat

SEQ ID NO: 8666 - DNA, 3305 bp, Homo sapiens
  misc_feature (1)..(1): n is a, c, g, or t
  misc_feature (3)..(5): n is a, c, g, or t
  misc_feature (7)..(7): n is a, c, g, or t
  misc_feature (1277)..(1277): n is a, c, g, or t
  misc_feature (1362)..(1362): n is a, c, g, or t
ngnnngnggcccagaactccctgtaggaattgccaaggggagaaggaaggaagggtgtttctacagagatgacagaatgtggctagagtaggctttctcaaccttggtactgttgactcttggggtgggataattctttgttgtgggggcagtcctgtgtgtcgtaggatgccaagcagtgtccatggcttctactcactggataccagtagccccctcccttctccacaagtcatgacaatgacaaatgtctctaggctgagcatgctggctcatgcctgtaatcccagcactttgggaagctgaggaaggaggatcacttgagcccaggagttcaagaccagcctgagcaacacagtgagacctcatctctacaaaaataaaataaaattagccaggtgtgatggcgtgcacccataatcccagctactcgggaggctgaggtgggcggatcacttgagcctgcgaggtggaggctgcagtgagctgagattgtgccactgcgctagagcctgggggacagagcgagaccctgtctagaaaaaaataagtctccagacattgccaaatgtttttggaaggcagaatcacccgctgattgaaaactactgggcctttggagatggggagcatacgggcaagactggagagtggattgggagctgagtaggctgcagcgacaatgcaaagtgatggaaggggagaggcgggcctacagcaaggaagtccaccagcgcatcaacaagcaacttgaggagatccggcgcttggaggaggtacggggcgatctccaggtgcagatcagcgcagcccagaaccaggtcaagcggcttcgggacagtcagcggctggagaacatggaccgcctgctgaagggccgggcccaggtgcaggcggagatcgaggagctgcaggagcagaccagggccctggacaagcagatccaggagtgggagacgcggatctttacccacagtaagaatgtcaggtccccgggattcatcctggatcagaaggtcaagatcaggcgaaggatcaggatcctagaaaaccagttggacagggtcacctgtcactttgacaaccagctggtacggaatgcggccctgcgggaggagctggatctgctgcggatcgacaggaaccgctatctgaacgtggaccgcaagctgaagaaggagatccaccacctgcatcacctggtcagcacccttatcctctcctccacctctgcctacgccgtcagggaggaggcgaaggccaagatgggcttgctncgggagcgcgcggagaaagaggaggcccagagcgagatggaggcgcaggtcctgcagcggcagatcttgcacctggagcagctgnaccacttcctcaagctcaagaacaacgaccggcagccggatcccgatgtcctggagaagcgtgaaaagcaggccggggaggtggccgagggcgtctggaagacctcccaggagaggctggtgctttgctacgaggacgccctgaataaactgtcccagctgatgggggagagtgaccctgacctgttggtgcagaagtatctggagatcgaggagcgcaactttgctgagttcaacttcatcaacgagcagaacttggagctggagcatgtgcaggaagagatcaaggagatgcaggaggctttggtgagcgcacgtgccagcaaggatgaccagcatttgctgcaggagcagcagcagaaggtgttgcagcagcgcatggacaaggtgcactcggaggctgagcgccttgaggcccgcttccaggatgtgcggggacagctggagaagctcaaggctgatatccagctcctcttcaccaaggcccattgcgacagcagcatgatcgatgacctccttggggtcaagaccagcatgggagaccgggacatgggcctcttcctgagcctcattgagaagcggctggtggagctcctgacagtgcaggccttcctacatgcccagagcttcacctccctggccgacgctgccctcctagtgctgggccagagcctggaggaccttccgaagaagatggccccacttcagccccctgacactctagaagaccccccgggttttgaggccagcgatgactaccccatgagcagggaggagctgctgagccaagtggagaagctggtgagagtggggcctgcgggggtggggccaggcctcagtgtgtgtcggggcccagttcaccttccctgcaggtggagctccaggagcaggcggaggcgcagcgccagaaggacctggccgccgccgccgcgaagctggacggcaccctgagcgtggacctggccagcacccagagggccggctccagtaccgtcctggtgcccaccaggcacccccatgccatccccgggtccattttgagccacaagactagcagagaccgtggctctcttggccacgtcacttttggcggcctcagctccagcactgggcatttgcccagccacatcacgcacggtgaccccaacactggccacgtgaccttcggctccaccagtgcctcgagtgggggccacgtgaccttcagacccgtcagcgccagcagctacctgggctccactggatacgtggggtccagcaggggcggagaaaacacagagggtggtgtggagagcggaggcacagcgtctgattcgagcggaggcctcgggtccagcagagaccacgtctccagcaccggccctgcctccagcactggcccgggctcctccaccagcaaagactcccggggctaacacgaggggcacgcagcccccaccctgccctggctctctgtggggtctttttttgtgtctctacttcccctgtttgccttgtgggtctctgtctttttctcccagtggcaggcctctgtctttttgccccttcaactgttttcatctgcccttcatcaccgcctcacctgtgtctcccggttcctttctctctgctcctgacactgcttttccctctgactcctgatctcctgttctctgggcttcctggtcagtgtctgtccgtcttgtctccatatctgccccttccctgtctgctgagccctggccccctgtggatcccccacctcctgtttccggctctctctcctcatctccatctcccaggctctccacgcatcctgtgtccctgtctctgtagctccttactccccaagagccccccagtgctgacaggtgtgggaaaagtcagggcgaagacgccaggttcagcatgggaaaatgggactgtggaaataaagtatatgtgtggagagccggcttcagccat

SEQ ID NO: 8667 - DNA, 2741 bp, Homo sapiens
  misc_feature (713)..(713): n is a, c, g, or t
  misc_feature (798)..(798): n is a, c, g, or t
caccctgtttggccaggatgcctttgggacgcttggcagggagcgcccgctccgaggagggaagcgaggcatttctggagggaatggtggattgggagctgagtaggctgcagcgacaatgcaaagtgatggaaggggagaggcgggcctacagcaaggaagtccaccagcgcatcaacaagcaacttgaggagatccggcgcttggaggaggtacggggcgatctccaggtgcagatcagcgcagcccagaaccaggtcaagcggcttcgggacagtcagcggctggagaacatggaccgcctgctgaagggccgggcccaggtgcaggcggagatcgaggagctgcaggagcagaccagggccctggacaagcagatccaggagtgggagacgcggatctttacccacagtaagaatgtcaggtccccgggattcatcctggatcagaaggtcaagatcaggcgaaggatcaggatcctagaaaaccagttggacagggtcacctgtcactttgacaaccagctggtacggaatgcggccctgcgggaggagctggatctgctgcggatcgacaggaaccgctatctgaacgtggaccgcaagctgaagaaggagatccaccacctgcatcacctggtcagcacccttatcctctcctccacctctgcctacgccgtcagggaggaggcgaaggccaagatgggcttgctncgggagcgcgcggagaaagaggaggcccagagcgagatggaggcgcaggtcctgcagcggcagatcttgcacctggagcagctgnaccacttcctcaagctcaagaacaacgaccggcagccggatcccgatgtcctggagaagcgtgaaaagcaggccggggaggtggccgagggcgtctggaagacctcccaggagaggctggtgctttgctacgaggacgccctgaataaactgtcccagctgatgggggagagtgaccctgacctgttggtgcagaagtatctggagatcgaggagcgcaactttgctgagttcaacttcatcaacgagcagaacttggagctggagcatgtgcaggaagagatcaaggagatgcaggaggctttggtgagcgcacgtgccagcaaggatgaccagcatttgctgcaggagcagcagcagaaggtgttgcagcagcgcatggacaaggtgcactcggaggctgagcgccttgaggcccgcttccaggatgtgcggggacagctggagaagctcaaggctgatatccagctcctcttcaccaaggcccattgcgacagcagcatgatcgatgacctccttggggtcaagaccagcatgggagaccgggacatgggcctcttcctgagcctcattgagaagcggctggtggagctcctgacagtgcaggccttcctacatgcccagagcttcacctccctggccgacgctgccctcctagtgctgggccagagcctggaggaccttccgaagaagatggccccacttcagccccctgacactctagaagaccccccgggttttgaggccagcgatgactaccccatgagcagggaggagctgctgagccaagtggagaagctggtgagagtggggcctgcgggggtggggccaggcctcagtgtgtgtcggggcccagttcaccttccctgcaggtggagctccaggagcaggcggaggcgcagcgccagaaggacctggccgccgccgccgcgaagctggacggcaccctgagcgtggacctggccagcacccagagggccggctccagtaccgtcctggtgcccaccaggcacccccatgccatccccgggtccattttgagccacaagactagcagagaccgtggctctcttggccacgtcacttttggcggcctcagctccagcactgggcatttgcccagccacatcacgcacggtgaccccaacactggccacgtgaccttcggctccaccagtgcctcgagtgggggccacgtgaccttcagacccgtcagcgccagcagctacctgggctccactggatacgtggggtccagcaggggcggagaaaacacagagggtggtgtggagagcggaggcacagcgtctgattcgagcggaggcctcgggtccagcagagaccacgtctccagcaccggccctgcctccagcactggcccgggctcctccaccagcaaagactcccggggctaacacgaggggcacgcagcccccaccctgccctggctctctgtggggtctttttttgtgtctctacttcccctgtttgccttgtgggtctctgtctttttctcccagtggcaggcctctgtctttttgccccttcaactgttttcatctgcccttcatcaccgcctcacctgtgtctcccggttcctttctctctgctcctgacactgcttttccctctgactcctgatctcctgttctctgggcttcctggtcagtgtctgtccgtcttgtctccatatctgccccttccctgtctgctgagccctggccccctgtggatcccccacctcctgtttccggctctctctcctcatctccatctcccaggctctccacgcatcctgtgtccctgtctctgtagctccttactccccaagagccccccagtgctgacaggtgtgggaaaagtcagggcgaagacgccaggttcagcatgggaaaatgggactgtggaaataaagtatatgtgtggagagccggcttcagccat

SEQ ID NO: 8668 - DNA, 2140 bp, Homo sapiens
ctctgtttctctccttacccatatctaccgttctccccgcctgcatctccccatctcccttgctattgccgagtctctggctttccctctctgccttgctgtgtatttctgtgtcccacctgccgtatcttcccacacctctttgtctctgtgactcctctctgttcgtctctctgccttggtttctgtgtggccttcctcatcttcactttctttggccttctgtatgcctctctgtctctgttctctctgtctctgtttctctgtctccctctctctgggccccgccttgcccaactctcccagtcgaggagcgcaactttgctgagttcaacttcatcaacgagcagaacttggagctggagcatgtgcaggaagagatcaaggagatgcaggaggctttggtgagcgcacgtgccagcaaggatgaccagcatttgctgcaggagcagcagcagaaggtgttgcagcagcgcatggacaaggtgcactcggaggctgagcgccttgaggcccgcttccaggatgtgcggggacagctggagaagctcaaggctggctggagtgcaatggcatgatctcggctcactgcaacctccgcttcctgggttcaagcgattctcctgcctcagcctctccagtagctgggactacagatatccagctcctcttcaccaaggcccattgcgacagcagcatgatcgatgacctccttggggtcaagaccagcatgggagaccgggacatgggcctcttcctgagcctcattgagaagcggctggtggagctcctgacagtgcaggccttcctacatgcccagagcttcacctccctggccgacgctgccctcctagtgctgggccagagcctggaggaccttccgaagaagatggccccacttcagccccctgacactctagaagaccccccgggttttgaggccagcgatgactaccccatgagcagggaggagctgctgagccaagtggagaagctggtgagagtggggcctgcgggggtggggccaggcctcagtgtgtgtcggggcccagttcaccttccctgcaggtggagctccaggagcaggcggaggcgcagcgccagaaggacctggccgccgccgccgcgaagctggacggcaccctgagcgtggacctggccagcacccagagggccggctccagtaccgtcctggtgcccaccaggcacccccatgccatccccgggtccattttgagccacaagactagcagagaccgtggctctcttggccacgtcacttttggcggcctcagctccagcactgggcatttgcccagccacatcacgcacggtgaccccaacactggccacgtgaccttcggctccaccagtgcctcgagtgggggccacgtgaccttcagacccgtcagcgccagcagctacctgggctccactggatacgtggggtccagcaggggcggagaaaacacagagggtggtgtggagagcggaggcacagcgtctgattcgagcggaggcctcgggtccagcagagaccacgtctccagcaccggccctgcctccagcactggcccgggctcctccaccagcaaagactcccggggctaacacgaggggcacgcagcccccaccctgccctggctctctgtggggtctttttttgtgtctctacttcccctgtttgccttgtgggtctctgtctttttctcccagtggcaggcctctgtctttttgccccttcaactgttttcatctgcccttcatcaccgcctcacctgtgtctcccggttcctttctctctgctcctgacactgcttttccctctgactcctgatctcctgttctctgggcttcctggtcagtgtctgtccgtcttgtctccatatctgccccttccctgtctgctgagccctggccccctgtggatcccccacctcctgtttccggctctctctcctcatctccatctcccaggctctccacgcatcctgtgtccctgtctctgtagctccttactccccaagagccccccagtgctgacaggtgtgggaaaagtcagggcgaagacgccaggttcagcatgggaaaatgggactgtggaaataaagtatatgtgtggagagccggcttcagccat

SEQ ID NO: 8669 - DNA, 1623 bp, Homo sapiens
ctctgtttctctccttacccatatctaccgttctccccgcctgcatctccccatctcccttgctattgccgagtctctggctttccctctctgccttgctgtgtatttctgtgtcccacctgccgtatcttcccacacctctttgtctctgtgactcctctctgttcgtctctctgccttggtttctgtgtggccttcctcatcttcactttctttggccttctgtatgcctctctgtctctgttctctctgtctctgtttctctgtctccctctctctgggccccgccttgcccaactctcccagtcgaggagcgcaactttgctgagttcaacttcatcaacgagcagaacttggagctggagcatgtgcaggaagagatcaaggagatgcaggaggctttggtgagcgcacgtgccagcaaggatgaccagcatttgctgcaggagcagcagcagaaggtgttgcagcagcgcatggacaaggtgcactcggaggctgagcgccttgaggcccgcttccaggatgtgcggggacagctggagaagctcaaggctggctggagtgcaatggcatgatctcggctcactgcaacctccgcttcctgggttcaagcgattctcctgcctcagcctctccagtagctgggactacagatatccagctcctcttcaccaaggcccattgcgacagcagcatgatcgatgacctccttggggtcaagaccagcatgggagaccgggacatgggcctcttcctgagcctcattgagaagcggctggtggagctcctgacagtgcaggccttcctacatgcccagagcttcacctccctggccgacgctgccctcctagtgctgggccagagcctggaggaccttccgaagaagatggccccacttcagccccctgacactctagaagaccccccgggttttgaggccagcgatgactaccccatgagcagggaggagctgctgagccaagtggagaagctggtgagagtggggcctgcgggggtggggccaggcctcagtgtgtgtcggggcccagttcaccttccctgcaggtggagctccaggagcaggcggaggcgcagcgccagaaggacctggccgccgccgccgcgaagctggacggcaccctgagcgtggacctggccagcacccagagggccggctccagtaccgtcctggtgcccaccaggcacccccatgccatccccgggtccattttgagccacaagactagcagagaccgtggctctcttggccacgtcacttttggcggcctcagctccagcactgggcatttgcccagccacatcacgcacggtgaccccaacactggccacgtgaccttcggctccatatctgccccttccctgtctgctgagccctggccccctgtggatcccccacctcctgtttccggctctctctcctcatctccatctcccaggctctccacgcatcctgtgtccctgtctctgtagctccttactccccaagagccccccagtgctgacaggtgtgggaaaagtcagggcgaagacgccaggttcagcatgggaaaatgggactgtggaaataaagtatatgtgtggagagccggcttcagccat

SEQ ID NO: 8670 - DNA, 426 bp, Homo sapiens
gcaggaggctttggtgagcgcacgtgccagcaaggatgaccagcatttgctgcaggagcagcagcagaaggtgttgcagcagcgcatggacaaggtgcactcggaggctgagcgccttgaggcccgcttccaggatgtgcggggacagctggagaagctcaaggctggtgagcacccatgggcgccccctcccgagcctggcttctccacttggaaggacaccatcagcccgcggggcttggaggcattgcatggacaacctggttcacttgcttatcagttgccccatatctgtccatctttccaaccagggtctatccctccaactgtcccatgtccatctatccatccatcatctgtccctccaactgtcctacacccatccatccatccatctatcaatgcatccatccatccatctagggt

SEQ ID NO: 8671 - DNA, 270 bp, Homo sapiens
aaacgggaaaaatggataaatgtcacaaacagttcaagaagactttcaaatagtccctaaacacatacaaataatttagtcttactaaagaaatgcaaattaaagcaacaattagatacaatgtattttgtaacacatcgtggaaaatgtaaaaacagaagacacaatgctcaataccagccatggtataggagaccagtattctttttttctttttttgagatggagtccagcctgggtaacaagatggaaagtacatctcaaaaaaaa

SEQ ID NO: 8672 - DNA, 379 bp, Homo sapiens
cgagatctctgtgcagcctcgtgggaagccagcctaaaacctggaaaccttaacctccgtctcctgttgcttctcagtcaggactttcttggttgcaagtgatggaaaatcccacccatgctggcttagggaaggacaagggaggatttttctggctaaccaaggagtttttggggagtgttctgattcagctcagggaggaagtccatgtttacttcctcaaaggtggctgagggatgaggctcttcttgctggcccctgaggtcacaccagccctcagaagaaactgagaaactcctagtaattttcgctaaagaagatggttcaagggttgtgtgtgtttcctctgcctgctgtaataaattactacaaactaagt

SEQ ID NO: 8673 - DNA, 1674 bp, Homo sapiens
atgatttcatctactctcatgttttcaagcatcatttacatgctgatgacattccagtttgtatcgtcagcccagacctgtcccctgactttcagatgatatttcctagatgccccatagacatctcagatataacatgtcttctttccattggcagtaccagcaagccagacactccagctaggaactcaaggagtcagcctagaccccacatctcccaccctcagccaaccaagtcctggtggtttgattaggttggtgcaaaagtaattgtggtttttgccattacttctaatatattacttctttgcatttgctgttccagttgcaatgctctttccccagacatctgcatgttcttgtcctcacttgctttaggtctctctttcccttatcaaaaaggcttttgctgactatcctaaatacaatagcactccctcccaactattctttaatgctgtacctagctttatttttcttcagaatatttattactctttaacatagttatttctttattgtctatctccccactcccagaatgtaagcttcatgaaagcagagtctctgttctgttccctgttatatctccagcatctggaacagagcctgggacaagctaggtctccataactatttattggatagttgagtgactggttgtggatgtacagtataagcatctaattcaatcagggagtgcttcctggaggagctgatacctgtgttcagtcttaaagggcaggagtttggataggggaatgttagttaatagaatgaaaatttcaaaattaaagggcaggagtaattaattgggtggttgagatgcatgcctggcagagcaagcagagtatggaaaaacccagaagtggagatatctggaaggtgattggtatggctggagtagaggacactggcaggagagtagctggagatgaggcaggagaggaaggcaaggaccaggatcaggtttgaagggtcttgagcatcaggtgaaggcgttagactgatttgaagcaggaactggtcacttttgtgttaataggctatgtggaagagaagctggggtagggagacaggaagtagcaagcttcatgtttaaagaaccaaagagttctgctaacttaggaacccagagtaagttgaaaacaaattgctctctggctgaaagccttcagtggtgatagttggaaagtagaatgattgcagagatgtgctttggagatttggaaagcaggctgtgttatttgtggctgttttctccttgatgcatgtgcagaatttccatgaacgctaatggagctattctgagcatttgctgaagggaaggaagcttgcagacatccctcccaatcttgcccacacactgagaagtaactcggagctacagtctgttaaaaatgaaaaggttgaggccgggtgcattggttcatgcctgtaatcccagcgctttgggaggtcgaggcaggcagatcacctgaggtcaggagtttgaaaccagcctggccaacatggcgaaaccctgtctgtactaaaaatacaaaaattagccagatatgatggcaggcgcctgtaatcccagctacttggaaggctgaggtatgagaatcgcttgaacctgggagatggaggctgcagtaagccaagattgtaccactgcactccagcctgggc

SEQ ID NO: 8674 - DNA, 593 bp, Homo sapiens
agttttcttctctcccaactcccaaccaggaagccactgcagaacagcagccctgctcttcttgccaatgcccctgggtttggtgtctctcctctccctcctgcatcatcttgggtccaattctaagcacttatgtgtccccatcctagcagggagccatgtgaggtcaggacgaagtgtttggaaggtactgctgggaccctgcttgcatcccagggaccttgccatgtcaccgtgctctgctgtcttaaagatgccagcatctgcatcttgtgcctgggggatttttctggaatggtggaaggctgctctgcctatgtgcacagtgggagaaaggtgccagggagtgagcaccccccaggagcagctcctaaccagtgacccttggtatagaagcacccggctctactgctccttaggtgggattattctgaagtccacatttgaccccgtttcccagagtttcctaggggcagtcatccaccagggtaactggcctcatgccatactctatcagctgctttctttccctgaatcctgcctctactccctgctcaagcacctctccaataaactactggcactttcagagg

SEQ ID NO: 8675 - DNA, 440 bp, Homo sapiens
tgttttgtaaggttgttactaaaccttgttataggaggttgtaaaagacatattttaaaggtctaaaaatagaggaatggataaataaatgatacatttgtgcaatagaatatattaccataaaggtctagaatattaaataatatgaaaatgctgacagccatactaataagtaggaaactatagcacaaaacagtatgaagaatatgatttcatttttgttcccccaaatgggcacttatttacatgtaaacagctaaaggacaggaaaatatatttaacaagatgttaacaagtatggtggagttataggtaataaaaaaatttttttttgcttatttgtatttccttcaatgaacatgtattatttggttatgacgggaaagtaaaatgtttcttaaaaactagtctttattgtatcataaatagatgtcagaaat

SEQ ID NO: 8676 - DNA, 399 bp, Homo sapiens
ttttttctttatttttagtagacacagagttgcaccctgttggccaggatggtcttgatctcttgaccttatgatctgcctgcctcagcctcccacagtgctgggattacaggcgtgagccactgcgcccagccagaaatgtggtttcaccatgttgtccaggatggtcttgaactcctgggctccagtgatcctcccatcttggcctcccaaagtgctgcaattacaggactaagccaccacacctggcccctatactactttctgattgtctttattccttacttctccatgctttccccttccttaccttctctttctcatttgtttttctccttctagtgtgttcagatgaattctcctgaactaatgctgtcattatattatgagacttcacag

SEQ ID NO: 8677 - DNA, 503 bp, Homo sapiens
actatcaactgaggttgtcctcctccctgcaagatagagtggaggcctggattttagtggagagagggaaactttcctgtgttgttctgagtttaggaaactacacaggaaacaccttggactatattatgcttttgcttcttctgattttatctgatcattttcaaaatatcaataacagagctgtacttctaagaggtcaagtggtttggagttctataaagctataaggatgggcagaacctaggaaatgctgttagtaaaggagaaaaataaaatctaatggctagtaggaacaagggaattttagggaagatgagcttcccagttatattgagaggtccctttccacagtaagtagtagtttgatagagagattacatggctgggcatggtggctcatgcctataatctcagcactttgggaggctgagacaggcagatcgcttgagcccaggagcttgagaccagcctgggcaacatagcgagaccccgtcttttta

SEQ ID NO: 8678 - DNA, 307 bp, Homo sapiens
gcctgtaatcccagccacttgggaggctgaggcaggagaatcacttgaacctgggaggtggaggttgaagtgagctgagatcacgccactgcactccagcctggcgacagagcaaaactccttctcacaaaaaaataaaactagtgtgggggaggggggagggatagcattgggagatatacctaatgctagatgacaagttagtgggtgcagcgcaccagcatggcacatgtatacatatgtaactaacctgcacattgtgcacatataccctaaaacttaaagtataataataaataaataaaaa

SEQ ID NO: 8679 - DNA, 584 bp, Homo sapiens
cagcgtctcgctctgtcgcccaggctggagtgcagtggtgtgatttcagctcactgcaacctccacctcctgggttcaagagattctcctcctcagcctcccgggtagcggggattactggcgcatgccactacactcagccaatttttgtatttttagttcgagaccagcctggcccacaacatggtgaaaccccgtctccgctaaaaaactaaaaaaacaattagcctggcatggtggcaggcacctgtaagctactagggaagctgagatatgagaatcgcttgatcccagaaggcagaggttgcagtgagccaagattgcaccactgcactttagcctggacgacggagcatgactccgtctacaaaaaaaaaaaacaaaaaaacaagcaatttatagatatgattaaatgaaagctcttaaggagattatcctagattatccaatgagcctaaagtaatcacaagtccttacaaaagggaagaaagagggaagccacccagatttcaccctatatatctctcccttttgctgcttccaacatgtatcttttttgctataataaaactgtaagtccagca

SEQ ID NO: 8680 - DNA, 700 bp, Homo sapiens
tatttttcatgatattctgattcccgcacagggatcgcatggcatgaatgcttcttgccctggtcggtgctgccctagaatccttgtctgaagtgtggtgctctgtggttgtttttctgcctcccccagagttgaggctccaggcaactgtaatgcagagatgagaccagcacgttggctgccaatctgcccacgacatatctgcatggatcctctctgtccaccccaaggctgccgccgtggttctgagactcagcatgtcaccccgtaaatcctgtaaaagtcctgatggcagcctcctccaagccatcctgattgcgctatggggatgaatcttatcacaggctcggtcatttatcactcctgcccaaactttcagtggacagcggtggtgctgcccccactgggctggcctcattcctctctcaagggcactgtgctctctgctccctctaaccacacacagatggacctcatgtacaccttgtctatgtctcctcagccttggctcagtgtggccccacttcctccagcaccccctgagctctgccccaaatgatggcttcaaaatcagccgtccttcaagaccacatcccggaggctctcctccataaggagccattgaaccctgctctgcactctgcacacccaacactatggccagccccgcagaggcacctccttcttagggcctgagcgt

SEQ ID NO: 8681 - DNA, 571 bp, Homo sapiens
tggccttttgaccgcataggtaaagtcctgcttgctgctgttgacctgatgaagggcagcatgttggaacttccatctgttttacactcttttggcgggtcatttctcccactgtgagccaggcttgagaatctaggcagatgtcagaggtctgtccctatgtttctttcaagctggcaagaattccaccatgactgccacttgctcccccatgggtgtcagaatctgtcataatggttggatgtttttgtaaaacataaacattcctgattttaaggtgtacaatgagacacattttgtaatttgggaaggtacaccatttcagtttagcaatagggagctatggagttaggcagggagtcaatagaatatgtgcagtcttggcagtatttcagtgtcagttgatccttgattgttcacagtgatatataatgccttagtatttaatgagaaaaacagtagaaaaatttatgtggttcctcatcatcccccatgtcttataccttgcttgtccctatctttaaagtaacctccaaaacggatgaaaggttttatatttaaaaaaaaaaaa

SEQ ID NO: 8682 - DNA, 292 bp, Homo sapiens
gtagaatatattcgatccatagcccagaaacataaaaacaatattagcaaaagtttaatccaatgctaatgttcatttatttattatagacgtggggtcttgctatgttgcccaggtgggtcctgaactcttggcctcaagcagtcttcccgcttcagcctcctcaagtgttgagatgaaaggcatgagctgctgtgtccagcctatttatttatttttaatgacatagattttgttgtgtttcaactcccccaaatcctgtaacctgaataaacccctagattttaagatg

SEQ ID NO: 8683 - DNA, 2405 bp, Homo sapiens
ggcacgaggtcaaaagtggcgggtgtggcgcggggctggtagcggccggagccgtgcgagttctctaccctgcttcgcgagcgggcgagagaacgcgagtcccaggatccccggcacccagttctcttccactgcattcccccggcgcgtgtgggaccgaggtggacatggatccgcagaggtcccccctattggaagtaaaggggaacatagaactgaagagacctctgattaaggccccttcccagctgcctctctcaggaagcagactcaagaggaggcctgaccagatggaagatggcctggagcctgagaagaaacggacaagaggcctgggtgcaacgaccaaaattaccacatcccacccaagagttccatccctcactacagtgccacagacacaaggccagaccacagctcaaaaagtttccaagaagacaggaccccggtgttccacagctattgccacagggttgaagaaccagaagccagttcctgctgttcctgtccagaagtctggcacatcaggtgttcctcccatggcaggagggaagaaacccagcaaacgtccagcctgggacttaaagggtcagttatgtgacctaaatgcagaactaaaacggtgccgtgagaggactcaaacgttggaccaagagaaccagcagcttcaggaccagctcagagatgcccagcagcaggtcaaggccctggggacagagcgcacaacactggaggggcatttagccaaggtacaggcccaggctgagcagggccaacaggagctgaagaacttgcgtgcttgtgtcctggagctggaagagcggctgagcacgcaggagggcttggtgcaagagcttcagaaaaaacaggtggaattgcaggaagaacggaggggactgatgtcccaactagaggagaaggagaggaggctgcagacatcagaagcagccctgtcaagcagccaagcagaggtggcatctctgcggcaggagactgtggcccaggcagccttactgactgagcgggaagaacgtcttcatgggctagaaatggagcgccggcgactgcacaaccagctgcaggaactcaagggcaacatccgtgtattctgccgggtccgccctgtcctgccgggggagcccactccaccccctggcctcctcctgtttccctctggccctggtgggccctctgatcctccaacccgccttagcctctcccggtctgacgagcggcgtgggaccctgagtggggcaccagctcccccaactcgccatgatttttcctttgaccgggtattcccaccaggaagtggacaggatgaagtgtttgaagagattgccatgcttgtccagtcagccctggatggctatccagtatgcatctttgcctatggccagacaggcagtggcaagaccttcacaatggagggtgggcctgggggagacccccagttggaggggctgatccctcgggccctgcggcacctcttctctgtggctcaggagctgagtggtcagggctggacctacagctttgtagcaagctacgtagagatctacaatgagactgtccgggacctgctggccactggaacccggaagggtcaagggggcgagtgtgagattcgccgtgcagggccagggagtgaggagctcactgtcaccaatgctcgatatgtccctgtctcctgtgagaaagaagtggacgccctgcttcatctggcccgccagaatcgggctgtggcccgcacagcccagaatgaacggtcatcacgcagccacagtgtattccagctacagatttctggggagcactccagccgaggcctgcagtgtggggcccccctcagtcttgtggacctggccgggagtgagcgacttgaccccggcttagccctcggccccggggagcgggaacgccttcgggaaacacaggccattaacagcagcctgtccacgctggggctggttatcatggccctgagcaacaaggagtcccacgtgccttaccggaacagcaaactgacctacctgctgcagaactctctgggtggtagtgctaagatgctcatgtttgtgaacatttctccactggaagagaacgtctccgagtccctcaactctctacgctttgcctccaaggtgaaccagtgtgttattggtactgctcaggccaacaggaagtgaagacggatccagatctctgtgtgtgtgtgtgtgtgtgtgtgtccctatgtctatgtatcgggtgaggggtgggagggttgctggagggtgctttattgggtggagggcaccatgtcccagggctatcaaataaagaatagtttggttttttttttaaataaaggttttattagcatttgcccaagaaggcagatactttcatatctgtaaaaaaaa

SEQ ID NO: 8684 - DNA, 2366 bp, Homo sapiens
ggcacgaggtcaaaagtggcgggtgtggcgcggggctggtagcggccggagccgtgcgagttctctaccctgcttcgcgagcgggcgagagaacgcgagtcccaggatccccggcacccagttctcttccactgcattcccccggcgcgtgtgggaccgaggtggacatggatccgcagaggtcccccctattggaagtaaaggggaacatagaactgaagagacctctgattaaggccccttcccagctgcctctctcaggaagcagactcaagaggaggcctgaccagatggaagatggcctggagcctgagaagaaacggacaagaggcctgggtgcaacgaccaaaattaccacatcccacccaagagttccatccctcactacagtgccacagacacaaggccagaccacagctcaaaaagtttccaagaagacaggaccccggtgttccacagctattgccacagggttgaagaaccagaagccagttcctgctgttcctgtccagaagtctggcacatcaggtgttcctcccatggcaggagggaagaaacccagcaaacgtccagcctgggacttaaagggtcagttatgtgacctaaatgcagaactaaaacggtgccgtgagaggactcaaacgttggaccaagagaaccagcagcttcaggaccagctcagagatgcccagcagcaggtcaaggccctggggacagagcgcacaacactggaggggcatttagccaaggtacaggcccaggctgagcagggccaacaggagctgaagaacttgcgtgcttgtgtcctggagctggaagagcggctgagcacgcaggagggcttggtgcaagagcttcagaaaaaacaggtggaattgcaggaagaacggaggggactgatgtcccaactagaggagaaggagaggaggctgcagacatcagaagcagccctgtcaagcagccaagcagaggtggcatctctgcggcaggagactgtggcccaggcagccttactgactgagcgggaagaacgtcttcatgggctagaaatggagcgccggcgactgcacaaccagctgcaggaactcaagggcaacatccgtgtattctgccgggtccgccctgtcctgccgggggagcccactccaccccctggcctcctcctgtttccctctggccctggtgggccctctgatcctccaacccgccttagcctctcccggtctgacgagcggcgtgggaccctgagtggggcaccagctcccccaactcgccatgatttttcctttgaccgggtattcccaccaggaagtggacaggatgaagtgtttgaagagattgccatgcttgtccagtcagccctggatggctatccagtatgcatctttgcctatggccagacaggcagtggcaagaccttcacaatggagggtgggcctgggggagacccccagttggaggggctgatccctcgggccctgcggcacctcttctctgtggctcaggagctgagtggtcagggctggacctacagctttgtagcaagctacgtagagatctacaatgagactgtccgggacctgctggccactggaacccggaagggtcaagggggcgagtgtgagattcgccgtgcagggccagggagtgaggagctcactgtcaccaatgctcgatatgtccctgtctcctgtgagaaagaagtggacgccctgcttcatctggcccgccagaatcgggctgtggcccgcacagcccagaatgaacggtcatcacgcagccacagtgtattccagctacagatttctggggagcactccagccgaggcctgcagtgtggggcccccctcagtcttgtggacctggccgggagtgagcgacttgaccccggcttagccctcggccccggggagcgggaacgccttcgggaaacacaggccattaacagcagcctgtccacgctggggctggttatcatggccctgagcaacaaggagtcccacgtgccttaccggaacagcaaactgacctacctgctgcagaactctctgggtggtagtgctaagatgctcatgtttgtgaacatttctccactggaagagaacgtctccgagtccctcaactctctacgctttgcctccaaggtgaaccagtgtgttattggtactgctcaggccaacaggaagtgaagacggatccagatctctgtgtgtgtgtgtgtgtgtgtgtgtgtgtgtgtgtgtgtgtgtgtgtccctatgtctatgtatcgggtgaggggtgggagggttgctggagggtgctttattgggtggagggcaccatgtcccagggctatcaaataaagaatagtttggtttttttttt

SEQ ID NO: 8685 - DNA, 1288 bp, Homo sapiens
cccacccaagagttccatccctcactacagtgccacagacacaaggccggagccgtgcgagttctctaccctgcttcgcgagcgggcgagagaacgcgagtcccaggatccccggcacccagttctcttccactgcatgatttttcctttgaccgggtattcccaccaggaagtggacaggatgaagtgtttgaagagattgccatgcttgtccagtcagccctggatggctatccagtatgcatctttgcctatggccagacaggcagtggcaagaccttcacaatggagggtgggcctgggggagacccccagttggaggggctgatccctcgggccctgcggcacctcttctctgtggctcaggagctgagtggtcagggctggacctacagctttgtagcaagctacgtagagatctacaatgagactgtccgggacctgctggccactggaacccggaagggtcaagggggcgagtgtgagattcgccgtgcagggccagggagtgaggagctcactgtcaccaatgctcgatatgtccctgtctcctgtgagaaagaagtggacgccctgcttcatctggcccgccagaatcgggctgtggcccgcacagcccagaatgaacggtcatcacgcagccacagtgtattccagctacagatttctggggagcactccagccgaggcctgcagtgtggggcccccctcagtcttgtggacctggccgggagtgagcgacttgaccccggcttagccctcggccccggggagcgggaacgccttcgggaaacacaggccattaacagcagcctgtccacgctggggctggttatcatggccctgagcaacaaggagtcccacgtgccttaccggaacagcaaactgacctacctgctgcagaactctctgggtggtagtgctaagatgctcatgtttgtgaacatttctccactggaagagaacgtctccgagtccctcaactctctacgctttgcctccaaggtgaaccagtgtgttattggtactgctcaggccaacaggaagtgaagacggatccagatctctgtgtgtgtgtgtgtgtgtgtgtgtgtgtgtgtgtgtgtgtgtgtgtccctatgtctatgtatcgggtgaggggtgggagggttgctggagggtgctttattgggtggagggcaccatgtcccagggctatcaaataaagaatagtttggttttttttttaaataaaggttttattagcatttgcccaagaaggcagatactttcatatctgtaaaaaaaa

SEQ ID NO: 8686 - DNA, 567 bp, Homo sapiens
ctaaacctgcctccttacatgtttaagttgggcctaaatgtttctctgtacatcgtgaactataacaagtgaaggtgtgaccagacccgtagccgacacttgtgtcaatcaccaagttttggcccgtcaaatgtagccaactgttcaaactgtgttcaaataagaaacatcaatccataacaaatccggatgcttctgtacctcacttccattttctgtacatcaccttccttctactttccataaatcatctaccacatggctgtgtggagtctcagagcctattctggctcaggaggctgcccgattcacaaatccttcattgctgaattaaactcctttaaatttaattttttttcttttatcacccccaaaatatttcaacggaaataatttaaataatttttttagagacataaaaactatgttatcaggatcacttaacaagacatcactcaaaaagggacacaagtttaggtttttcaaccttttaatctctattgagagtggtttagaataacgaagtgaaagggattgaaaaaaataaaaaccttatcagtgctatat

SEQ ID NO: 8687 - DNA, 270 bp, Homo sapiens
caggccccttcgtcacccaaactaacatggccctaaaagcttccatgaaccatattaaatgtctccttaggatctcatggaaaagggggcatatgtggtcttaacagataatccctctatgtcatggcacaacataagacttggaaagaacaatttgttttttccaagtgtttctcttctaccaagaaaagaaaggacattggcatgttctggggagaaattctgaattcagattcagtcttgacaagcctccagctgaatgagttatcc

SEQ ID NO: 8688 - DNA, 448 bp, Homo sapiens
gattctcttcatttctccatgtagtttgcatacataaccagttagcgtaagttctatttaatatccttgccaacttatagagtgtaaatcttttggcttcattcactcattcactaaaacatctattgagtgtctactatgtgccacactagcacctacagtcaacagtcaccagcaagactctcattagactatctcttaaaatgcacagttgattctcattatgtgtggtagttacattttataaagttattgtgaacacgaaattagcaaatacttaacctttgctcctaggaaaaatacagggttaggttcctgcaagcctctggtcataacttttttgtcaactgatcaatgtacaaccttgttttatgtgtgtttctgtttaaagataacttatgtaatatatattgctgattcattaaactgatagctaataactataaaa

SEQ ID NO: 8689 - DNA, 394 bp, Homo sapiens
cttgtggtttacttagtaggagtgacaaaaacctcattaattatttgggaggcctggattctaaatccatctgtcactagctaccctcagaaaggttcactttttgaacctcagtctcttgaaatttaaaattggacttgacagtctctgtaatgttgcaaaatctgatttaattctaaatttctgtgtttatatgtttctaaaaatgaatgggttctgttttttcttttgtttggcctgtatttatattactgcaaagagaagagtttgatttagactgtttagaagcaacctctttttttccccacagtgtttttttatgttgtccagaaaagcagccacacaagttttgacttaaatatataggttttattaaaacaaaagctgttaaaac

SEQ ID NO: 8690 - DNA, 357 bp, Homo sapiens
ctcctctccccaggcactccccaggcctttagagaggacattctcccactctcttttatggaaagccatggaatcttctgtgtggatgcagcctgggcagtcagagaggggcctggccctcacgtggccgcagctgacccctccccgccgcagctctccagtctcctctgcgacgtgacagccctggcttctctgctgtggggaggagagtatttttagttttgaacccaccacgtgaagcgagacaagttatcaatagcagcagcaaagggctttttctttctctctctcttttttttttttcccatgtctttgggacctgaacaatctgcacccattaaattctgccaaaagaaa

SEQ ID NO: 8691 - DNA, 458 bp, Homo sapiens
  misc_feature (438)..(439): n is a, c, g, or t
aaaatggagttttgcacttcagcctgggagacaagagcaagactccatctttaaaaaaaaatgaaagaaagaataacaaaatgctcagtggttggctagattcactcactgatatgtgacttgttcccagacttcagctttgggaatttaattcccaaattaaaggctcacacacctataatcccagcactttgggaggccaaggcaggaggatcacttgaggccgggaagttcaagaccagccttggcaacacagtaggaacctatctctacaaaaaatgtttaaaaattttccaggctgcagtgagccatgatcatgctaccgcacttcagcttaggcgacatagtgagaccctgtctcaaaggaaaaagaaaactacaaatctttgcatgccataggggttctctaatggatgttatgctattgaacttctaaanntaggggccgagctcgatga

SEQ ID NO: 8692 - DNA, 304 bp, Homo sapiens
ttggttattatttgataatccgacatggccttgtaaataatccatttaacatgctattgaaacttctaaaactaggcctagttttagaagtttcaagaccagccttggcaacacagtaggaacctatctctacaaaaaatgtttaaaaattttccaggctgcagtgagccatgatcatgctaccgcacttcagcttaggcgacatagtgagaccctgtctcaaaggaaaaagaaaactacaaatctttgcatgccataggggttctctaatggatgttatgcttgtgaaacaaccggaggtaag

SEQ ID NO: 8693 - DNA, 675 bp, Homo sapiens
tggttcgcctcctcttctccttctccgtaggtgttaaacaggatccagtggagtcagatccccgtgtgacacgtgcttccctgtgacttttctctctgtatctccacgtttccggtgcacatgcctttactcagactccgacactggcgttgcttttgtctcatcccagctaggcgacgtctgcgtcagcgcctctcatctgtggcacgtgtgcccagcgggctccctatgtgacggcttttcccacctctgagtgttcatgtcactcgctgcatgttctgccacactcggcccctctgcagagcctctcacttgtttcaaaagaactttccatagtgacaagtgagggcgcagttagcctttggaaccctcgactcggctcctctgtcaccagcgttctctcccacccttctttcttggttttgaactacttactgttttaaaacaaaccccattttactactgaatagcacagtgtgtttctattaagatcaaaaatggaccattgtctcacataacagcaatgcttttcacatgtaacaaaaataacaatttcctgttattatttagtgcctagtccatggtcaaaggtctgttgacaaaatgccttttactttttttctctctttctaattggatccaaactggttccactcattaaatcaatctgctgca

SEQ ID NO: 8694 - DNA, 757 bp, Homo sapiens
gtctgtttttcatgggataatttttattgatctatatccaaattgaatttgaatatactttattcctatgtaatctcctttgtcctctcaaagacatttaatttttttttccaatactgtatttttccgtcctaaaatttccatttgtttcttttatagtttttattttattgctgagatacttctatcatgtctttcacctggaagaaaacaaatgtgtttttcttgagttcatggaacatatttaaactaaatgctttaaagtctttgtccaataattctcatacgtggatcatcttgagttgctggtttagctctgtgtccccaccaaaatctcatcttgaactgtactcccaggattcccacatgttgtgggagggacccagtgggagataactgaatcatgggggcagttttccccatactgttttcatgatagtgaatacatctcatgagatctgatggttttatcggggatttccacttttatcagggtttctcattctctctttgcctgctgccatccatgtaagatgggacttgctactcctagacttccaccatgattgtgaggcttctccagccacgtggaactgtaagtccaattaaacctctttcttttataaattgcccagtcttggggtatgtcttgtcttttttgttgttgttttttgagatgcagtttcactcttgttgcccagcctggagtgcaatggcatgatctcggctcaccacaacctctacctcccggattcaa

SEQ ID NO: 8695 - DNA, 1523 bp, Homo sapiens
gtctgtttttcatgggataatttttattgatctatatccaaattgaatttgaatatactttattcctatgtaatctcctttgtcctctcaaagacatttaatttttttttccaatactgtatttttccgtcctaaaatttccatttgtttcttttatagtttttattttattgctgagatacttctatcatgtctttcacctggaagaaaacaaatgtgtttttcttgagttcatggaacatatttaaactaaatgctttaaagtctttgtccaataattctcatacgtggatcatcttgagttgctggtttagctctgtgtccccaccaaaatctcatcttgaactgtactcccaggattcccacatgttgtgggagggacccagtgggagataactgaatcatgggggcagttttccccatactgttttcatgatagtgaatacatctcatgagatctgatggttttatcggggatttccacttttatcagggtttctcattctctctttgcctgctgccatccatgtaagatgggacttgctactcctagacttccaccatgattgtgaggcttctccagccacgtggaactaccaatacgccaaccagcaatgacccttctcaatcaaaatggcttctaatagggtccttccagtttgaaggcaaagtgtgccccattgtttaaatggtgatattgtaggaaactataccacaaacagaatcaagtgcatgaagcctgcttccgctttccctgccctgggacatcagactccaggttcaccagcctttggacttgcaccagcagcttcccggggaatctcaggacttcagccacagactgaaggctgccatgtcggcttccctggttttccggctttcaaactcggactgagccattactggcttctctctttccccagcttgcagatatcctatcataggacttcaccttgtaatcgtgtcagttaattctccctaactgactcccttttatatatacatatatcctactggttctgtctctttggagaagcctagtacatgccattttaaaaatgtacatgtgtgtacatgtatagttctgtgcaattttatcttgtgtatagattcatgtaactaccaccacaatcacaatatataactgttccattatcacaaaagaactccctcacactgactgcctctttgtatttctacttactcccccattcattttccccaggccctgtcccctggaaattattcatctgttctctatctctgtaattttgtcattcaagaatgttatataaatggaaacatacagtatgtaacattttgagatttaattcttctcacaaagcataacacccttgaggcccctccgggttattgtatatatcagaagttcattcctttttattgttcagtagtactccactgcatggatataccagttttgttaactattcacccactgaaggatacctgtgttgtttccggtattctgctattacaaataaagcctctatgaacacaca

SEQ ID NO: 8696 - DNA, 1478 bp, Homo sapiens
ctgtaatgctgttagaatcacctttcctgtatgctctcagaaataagtgccgcttttgcaaagtgttaagataatttaatgtctggcttttctgtttcatcatctcatggcatgaggaatgctgactgctctaaacgttgaacttctagaagcttgaacccattgacttgccacgagtaattacttcaggaagactcctgagccagcgagaagccaggacaatgcacaaagcaaagcaggtactagaaaagaaaatgcaaactccaatgtatacttctgagaacagacaatatttgcataagatgcaagtgctggaaatgatccgtaaaagacaagaggcccaaatggagttaaagaaaagtcttcatggagaggcaagaattaataagcaaagtccaagggaccataaagccaagaaaacccttcaaagcaccccaaggaatgatgaccatgaccttctaaccatgttgcctgatgaaatcttgaacagaggtcccgggcaaacccacagttgaaatttccaatattgttcacacacacagatcgctgtgctgtgggccaaatccccacatcagcaggactgacccaccgctgagagagctgcagaaaagctggctatgtctctggaggtcttgaacttctaagacgcaaaattgcctgctgaaagagacactgctcctacttggagaaacaagacgctcgatcaataagttaattaaataagaaaaggctgaataattgaaaatctacttggggcatctatttaacctatacttccaagtctcagaatgaaatatcctttgtagtcacataaacaatttttaccatttaaaccgtaccttaaaaaatatacacaaaacaaccaagaaaaaaacctcacctaaagttagacatttaagagtcatcacttgagagcacgccaagaaaaaccagcattggcaaagtccctggaagatgtctcagacctggaggggaccaaggagaaactggcacatggagaaaggggttttcctctgctctcctgatgctttttaaagctgcttcgttttgttcaagctaaggtttgttgagtgcttactataagccaggtactgtggtttgcctttaatatgcattatctcttttaattctcacacaacctagaaggtaggagctactattcgccccagggtgatagagccagaattcaaggtcaggtcttcttgacttgcactctcacacagccccaccaggacaccaaggacttggaactctgtcaaggacagctttggaaaagtttgcaaatgtgggggttgtgagtccttgaccttatttacaaagaaggctgcactctgcgacttctgaaaggaaagttaaagcagctggcagactttggagctcatgttctcctggaagtgatggagtgtagagaagggagaatagaaggagtaactcaggcaggaaccaattcaagtgccagtcagggaggtgtagctgca

SEQ ID NO: 8697 - DNA, 3094 bp, Homo sapiens
cagagctagaaggatgccatgaaggaaatgactgctttgtaaagcgagggtaaacttctgaaatgctttgattaaaataagctatattaaagaccccaaaaccacttccctcgcagctttcctctgaatgtctttcacatgaaatgggcctgagtcactctaagactcaccttagggtgatcaaagtagcacctttgcaaaacaaagaggtagagactccctcggctggccgtgtggactttgcattcaatcagaatttggaagaaaagacttcatattcactggcaagactgcaggaccagaataaagccttggaagggcagctgccacctttacaagaaaactggtatggaagatattctacagcatccagagacatgtattttgacatcccactggaacacagagaaacaagtattattaaaaggcatccaccccaaagacttcaaaagcttgaacccattgacttgccacgagtaattacttcaggaagactcctgagccagcgagaagccaggacaatgcacaaagcaaagcaggtactagaaaagaaaatgcaaactccaatgtatacttctgagaacagacaatatttgcataagatgcaagtgctggaaatgatccgtaaaagacaagaggcccaaatggagttaaagaaaagtcttcatggagaggcaagaattaataagcaaagtccaagggaccataaagccaagaaaacccttcaaagcaccccaaggaatgatgaccatgaccttctaaccatgttgcctgatgaaatcttgaacagaggtcccggaaattcaaagaatacagaatttttgaaacatcaagcagtgaataactgctgtccctggaaaattggcaaaatggaaacatggcttcatgaacaagaggcccagggacagcttctctgggacagttccagctctgactcagatgagcaggggaaagatgagaagaagccacgagcactggtgaggaccaggacagagagaatcccacttttcgatgagttttttgatcaagaataagaatactattcattaacctagaaactgagtgctttgaaagcttgttttactctcaaaatcttccaaactgatatatgaattactttgaggacagcaaatcactttggtaaaaagaaatgatatctttagagtcttatgattaacaagtccgtcacatgtgctgttaactattgctgcataactaaatgcctcaaaacacaggggctaaccaagagccattttattgtctcactttcctgtgggttgctgagttcagctaggtggttcttctgctgttcccttttgaaatctttcatgtcattgaaattggactacatttggactactaagactggagtcatccagaggccccattaggacactgacacagggggaccttgccccctatccatgtagcctcagagcatctgcatatgatctcttcagcaggacactgcagagatttctctcatatgagcccagggctcccaaaagcaattgtctcaagaggaggaaacagaagttgccagtcttcttaaaagctagtcatagaactgactttgcatcacttccaccatgttctgttggttaaagtcatagaccagcttggagttaatgcagaagaggactacacaagggcatgagtgccaaagtgtggtcctttggggttcatctttgacatttgccacctcaccatgtttttaaaaagaaaattagattacataaaacaaatagatgggctggatgtggtggctcacacctgtaatcccagcactttgggaggccgaggtgggcagatcacttgaggtcaggagttcaagaccagcctggccaacatggtgagacaccgtctctactaaaatacaaaaattagccagacatggtggcattcgtctgtaatcccagctacttgatgcgaaggctgaggcaaaagaattgcttgaacccaggagatagaggttgcaatgagccaagatcactccactgcactccagcctgggcgacagaatgagactctgtctcaaaattaaaaaacaaaaaaccaaaaacaaatagatgaaaaagtagactggagacaaataaaagtgagtttctaaaggaaattcacagtaatgctgcattaaacactaagctcacttaggtcactttctagtgagctaaccgtaacagagagcctacaggatacacgtgagataatgtcacgtgtagaagatcgttgtgaattaaagttcaaaattaagacttcttagattatgatgtagattttagagctccttaaaacataaagcgaatcttataaatgttcaattctaaagttattccacttggaaaaattagcttttgggacaatttttaagaacttttgtgtaaatgcagctccatgtttagcataatctaaaaataatttcaagcaatccagaatcttccaagaatttattaaagctttaaaacaaagcaaaacaaaaagacccttttgtgccttatatgggaagactccaaaaacagaaaaaaatagaggaaaacaccacttcaatttgacattcaatgcattcacatcagaaactaagaagataacaagcctgagatgtcaggtgataaaaattcatgtttcttccaaggacagaaggctattagattgtcccaggccatatctattcccagttctttgtgagtagtcttcttactttttctgtggtaggtaagaagcatatttccaccaaaagaaagcatgcattgtttgactagccagctttctagaaaaaatgagatccttgagaggataaacaaatccaacctattcatggtgtcctcacttattgtggtcaatttggaaggcttaaaacacaaaaaatgggatggataactttgaacactaaaattagtggagccaaaggcacgtcttcaccattctgttatgtgacttaaaattcaatttcacgaaacccacttccacaagcttaatgaactgtgagctacatgagggcataaaccatgtcttctttgtatggtattcctgcttcctagcaggacagctggcaaagagtttatcattaaatgtttgctgaattaatgaaaaaaaa

SEQ ID NO: 8698 - DNA, 1304 bp, Homo sapiens
ccactctcctgcctcagcctcccgagtagctgggactacaggcgcccgccaccatgcccggctaattttttgtatttttagtagagacgggggttcactgtgttagccaagatggtctcgatctcctgacctcgtgatccgcccgcctcggcctcccaaagtgctgggattacaggcgtgagccactgtgcccagcctgttttattttttaatatagctctgggcgacagaatgagactctgtctcaaaattaaaaaacaaaaaaccaaaaacaaatagatgaaaaagtagactggagacaaataaaagtgagtttctaaaggaaattcacagtaatgctgcattaaacactaagctcacttaggtcactttctagtgagctaaccgtaacagagagcctacaggatacacgtgagataatgtcacgtgtagaagatcgttgtgaattaaagttcaaaattaagacttcttagattatgatgtagattttagagctccttaaaacataaagcgaatcttataaatgttcaattctaaagttattccacttggaaaaattagcttttgggacaatttttaagaacttttgtgtaaatgcagctccatgtttagcataatctaaaaataatttcaagcaatccagaatcttccaagaatttattaaagctttaaaacaaagcaaaacaaaaagacccttttgtgccttatatgggaagactccaaaaacagaaaaaaatagaggaaaacaccacttcaatttgacattcaatgcattcacatcagaaactaagaagataacaagcctgagatgtcaggtgataaaaattcatgtttcttccaaggacagaaggctattagattgtcccaggccatatctattcccagttctttgtgagtagtcttcttactttttctgtggtaggtaagaagcatatttccaccaaaagaaagcatgcattgtttgactagccagctttctagaaaaaatgagatccttgagaggataaacaaatccaacctattcatggtgtcctcacttattgtggtcaatttggaaggcttaaaacacaaaaaatgggatggataactttgaacactaaaattagtggagccaaaggcacgtcttcaccattctgttatgtgacttaaaattcaatttcacgaaacccacttccacaagcttaatgaactgtgagctacatgagggcataaaccatgtcttctttgtatggtattcctgcttcctagcaggacagctggcaaagagtttatcattaaatgtttgctgaattaatgaaaaaaaa

SEQ ID NO: 8699 - DNA, 2939 bp, Homo sapiens
cagagctagaaggatgccatgaaggaaatgactgctttgtaaagcgagggtaaacttctgaaatgctttgattaaaataagctatattaaagaccccaaaaccacttccctcgcagctttcctctgaatgtctttcacatgaaatgggcctgagtcactctaagactcaccttagggtgatcaaagtagcacctttgcaaaacaaagaggtagagactccctcggctggccgtgtggactttgcattcaatcagaatttggaagaaaagacttcatattcactggcaagactgcaggaccagaataaagccttggaagggcagctgccacctttacaagaaaactgcatccagagacatgtattttgacatcccactggaacacagagaaacaagtattattaaaaggcatccaccccaaagacttcaaaagcttgaacccattgacttgccacgagtaattacttcaggaagactcctgagccagcgagaagccaggacaatgcacaaagcaaagcaggtactagaaaagaaaatgcaaactccaatgtatacttctgagaacagacaatatttgcataagatgcaagtgctggaaatgatccgtaaaagacaagaggcccaaatggagttaaagaaaagtcttcatggagaggcaagaattaataagcaaagtccaagggaccataaagccaagaaaacccttcaaagcaccccaaggaatgatgaccatgaccttctaaccatgttgcctgatgaaatcttgaacagaggtcccggaaattcaaagaatacagaatttttgaaacatcaagcagtgaataactgctgtccctggaaaattggcaaaatggaaacatggcttcatgaacaagaggcccagggacagcttctctgggacagttccagctctgactcagatgagcaggggaaagatgagaagaagccacgagcactggtgaggaccaggacagagagaatcccacttttcgatgagttttttgatcaagaataagaatactattcattaacctagaaactgagtgctttgaaagcttgttttactctcaaaatcttccaaactgatatatgaattactttgaggacagcaaatcactttggtaaaaagaaatgatatctttagagtcttatgattaacaagtccgtcacatgtgctgttaactattgctgcataactaaatgcctcaaaacacaggggctaaccaagagccattttattgtctcactttcctgtgggttgctgagttcagctaggtggttcttctgctgttcccttttgaaatctttcatgtcattgaaattggactacatttggactactaagactggagtcatccagaggccccattaggacactgacacagggggaccttgccccctatccatgtagcctcagagcatctgcatatgatctcttcagcaggacactgcagagatttctctcatatgagcccagggctcccaaaagcaattgtctcaagaggaggaaacagaagttgccagtcttcttaaaagctagtcatagaactgactttgcatcacttccaccatgttctgttggttaaagtcatagaccagcttggagttaatgcagaagaggactacacaagggcatgagtgccaaagtgtggtcctttggggttcatctttgacatttgccacctcaccatgtttttaaaaagaaaattagattacataaaacaaatagatgggctggatgtggtggctcacacctgtaatcccactacttgatgcgaaggctgaggcaaaagaattgcttgaacccaggagatagaggttgcaatgagccaagatcactccactgcactccagcctgggcgacagaatgagactctgtctcaaaattaaaaaacaaaaaaccaaaaacaaatagatgaaaaagtagactggagacaaataaaagtgagtttctaaaggaaattcacagtaatgctgcattaaacactaagctcacttaggtcactttctagtgagctaaccgtaacagagagcctacaggatacacgtgagataatgtcacgtgtagaagatcgttgtgaattaaagttcaaaattaagacttcttagattatgatgtagattttagagctccttaaaacataaagcgaatcttataaatgttcaattctaaagttattccacttggaaaaattagcttttgggacaatttttaagaacttttgtgtaaatgcagctccatgtttagcataatctaaaaataatttcaagcaatccagaatcttccaagaatttattaaagctttaaaacaaagcaaaacaaaaagacccttttgtgccttatatgggaagactccaaaaacagaaaaaaatagaggaaaacaccacttcaatttgacattcaatgcattcacatcagaaactaagaagataacaagcctgagatgtcaggtgataaaaattcatgtttcttccaaggacagaaggctattagattgtcccaggccatatctattcccagttctttgtgagtagtcttcttactttttctgtggtaggtaagaagcatatttccaccaaaagaaagcatgcattgtttgactagccagctttctagaaaaaatgagatccttgagaggataaacaaatccaacctattcatggtgtcctcacttattgtggtcaatttggaaggcttaaaacacaaaaaatgggatggataactttgaacactaaaattagtggagccaaaggcacgtcttcaccattctgttatgtgacttaaaattcaatttcacgaaacccacttccacaagcttaatgaactgtgagctacatgagggcataaaccatgtcttctttgtatggtattcctgcttcctagcaggacagctggcaaagagtttatcattaaatgtttgctgaattaatgaaaaaaaa

SEQ ID NO: 8700 - DNA, 2659 bp, Homo sapiens
ctgtaatgctgttagaatcacctttcctgtatgctctcagaaataagtgccgcttttgcaaagtgttaagataatttaatgtctggcttttctgtttcatcatctcatggcatgaggaatgctgactgctctaaacgttgaacttctagaagcttgaacccattgacttgccacgagtaattacttcaggaagactcctgagccagcgagaagccaggacaatgcacaaagcaaagcaggtactagaaaagaaaatgcaaactccaatgtatacttctgagaacagacaatatttgcataagatgcaagtgctggaaatgatccgtaaaagacaagaggcccaaatggagttaaagaaaagtcttcatggagaggcaagaattaataagcaaagtccaagggaccataaagccaagaaaacccttcaaagcaccccaaggaatgatgaccatgaccttctaaccatgttgcctgatgaaatcttgaacagaggtcccggaaattcaaagaatacagaatttttgaaacatcaagcagtgaataactgctgtccctggaaaattggcaaaatggaaacatggcttcatgaacaagaggcccagggacagcttctctgggacagttccagctctgactcagatgagcaggggaaagatgagaagaagccacgagcactggtgaggaccaggacagagagaatcccacttttcgatgagttttttgatcaagaataagaatactattcattaacctagaaactgagtgctttgaaagcttgttttactctcaaaatcttccaaactgatatatgaattactttgaggacagcaaatcactttggtaaaaagaaatgatatctttagagtcttatgattaacaagtccgtcacatgtgctgttaactattgctgcataactaaatgcctcaaaacacaggggctaaccaagagccattttattgtctcactttcctgtgggttgctgagttcagctaggtggttcttctgctgttcccttttgaaatctttcatgtcattgaaattggactacatttggactactaagactggagtcatccagaggccccattaggacactgacacagggggaccttgccccctatccatgtagcctcagagcatctgcatatgatctcttcagcaggacactgcagagatttctctcatatgagcccagggctcccaaaagcaattgtctcaagaggaggaaacagaagttgccagtcttcttaaaagctagtcatagaactgactttgcatcacttccaccatgttctgttggttaaagtcatagaccagcttggagttaatgcagaagaggactacacaagggcatgagtgccaaagtgtggtcctttggggttcatctttgacatttgccacctcaccatgtttttaaaaagaaaattagattacataaaacaaatagatgggctggatgtggtggctcacacctgtaatcccactacttgatgcgaaggctgaggcaaaagaattgcttgaacccaggagatagaggttgcaatgagccaagatcactccactgcactccagcctgggcgacagaatgagactctgtctcaaaattaaaaaacaaaaaaccaaaaacaaatagatgaaaaagtagactggagacaaataaaagtgagtttctaaaggaaattcacagtaatgctgcattaaacactaagctcacttaggtcactttctagtgagctaaccgtaacagagagcctacaggatacacgtgagataatgtcacgtgtagaagatcgttgtgaattaaagttcaaaattaagacttcttagattatgatgtagattttagagctccttaaaacataaagcgaatcttataaatgttcaattctaaagttattccacttggaaaaattagcttttgggacaatttttaagaacttttgtgtaaatgcagctccatgtttagcataatctaaaaataatttcaagcaatccagaatcttccaagaatttattaaagctttaaaacaaagcaaaacaaaaagacccttttgtgccttatatgggaagactccaaaaacagaaaaaaatagaggaaaacaccacttcaatttgacattcaatgcattcacatcagaaactaagaagataacaagcctgagatgtcaggtgataaaaattcatgtttcttccaaggacagaaggctattagattgtcccaggccatatctattcccagttctttgtgagtagtcttcttactttttctgtggtaggtaagaagcatatttccaccaaaagaaagcatgcattgtttgactagccagctttctagaaaaaatgagatccttgagaggataaacaaatccaacctattcatggtgtcctcacttattgtggtcaatttggaaggcttaaaacacaaaaaatgggatggataactttgaacactaaaattagtggagccaaaggcacgtcttcaccattctgttatgtgacttaaaattcaatttcacgaaacccacttccacaagcttaatgaactgtgagctacatgagggcataaaccatgtcttctttgtatggtattcctgcttcctagcaggacagctggcaaagagtttatcattaaatgtttgctgaattaatgaaaaaaaa

SEQ ID NO: 8701 - DNA, 376 bp, Homo sapiens
cccgggggcccaggccatacaggcagggctgggccaggcctccatgatgaagtcagaccctctcggttctctctgtcttctctccatgtgggtctgcagtccctctctgtccctgttctgagactccagctttctggagcaccgctcacctgttcccgtctctttctcttgcttctctgcttacagtcatctttccttctgtagacagctgcctccatgccacaagggcctccagcatggagaactgttgccacaggtcccggtcccagacgactgaagtctgtccttcacagcagctggggcagtggagcccaggggaccccacgggcaccctggatcacacacagcctagggaccagtgcagccccagaggagc

SEQ ID NO: 8702 - DNA, 810 bp, Homo sapiens
aagtgtggaacgcagaataatttcaggaggaacaaggacgcactgtttatttcaacagacagatatttattttttttataagcattagaaaaataactggctttccagtacccggtttgtgattgaagttgccgccttaaatatatttaaggagaaaaaaagagtcagtttgaattttttaaaaaatgtaacatttggtaaatagcagtacagatggtccacggacataaaggtgcaacgcgagactgaaacgtgtgcaacgccgtcctaagagaagcccctcgcccgctggcggggagcggacagtgccccgcgccgggagcttggaaagccggccggatcggacgctggcgctgagctacgtggtaaacccgggaacagttcctctccccgttctctgggcccgaggtccgcgcctacaaaacgcgtggggtgtcacaccacaaggagacaccccgagaatgcggtcaggggccgcgagacggtggcgggggacagcgctcagtacaccgctcggcgctgcacgcctggagaacgcccggtgccacgggacgccttgggcccggttcgaatcccgactgcgccactgactcgctgaggacccgcgggcgagcgactccaccgtttcgacagggggtgcgggatgtgcggctcaaccagagaagccttgaggactcctagtgaccgaccgttcgtgcacagacaggcggctgcgatgcgacgccgccgacctgcgtccaccacagagaaccataggccgcctcggccggccgggcctgggcctgacgggagccggaggcggccgcgccc

SEQ ID NO: 8703 - DNA, 563 bp, Homo sapiens
cttgtgagaggattgactccagtttcaaaagaggttcagctgtgggtaaagtggccaacaatattgcatgccctagggaaatctttgatgaaaggaagaattaatagatgtgacaaacttttgttgtcttattttaagaaattgtcacaaacaccccaccttgagctaccaccaccctgagcagtcagcagccaaaaacgttgaggcaaggcactttattcggcaaaaagatactacaactctctgaaagcctcagatgattggttacccgttttttgggcagtaagaacatttttaagttaaagtgtgtacattgtttttgatttttattttttgagactgggtcttgctctgtcacgtaggctgcagtgcagtggtgtgatcatggctcattgcagcctcaacctccctggctgaagcaaccctcccattttagcctcccagctacttgggaggctgaggtgggaggatcacgtgagcccaagaatccaagtcaatgtgagttactgtcacactgctgcactccagcttgagtaacagagtgagaccccatctcttaacaa

SEQ ID NO: 8704 - DNA, 287 bp, Homo sapiens
aaaaaaaaaaaaaatagctggatgtggtggcacatacctgtggtcccagctacttgggaggctgaggtgggaggatcacgtgagcccaagaatccaagtcaatgtgagttactgtcacactgctgcactccagcttgagtaacagagtgagaccccatctcttaacaaaaaaaaaaagaataaatgaaaatttaagactaagaattaaatagaagtttagattcatcttactgatttataaattaatatttttgaagagtctctgatgaatctggcagagattttaa

SEQ ID NO: 8705 - DNA, 798 bp, Homo sapiens
cagtgggaagcaaaggtggggttcttgagccagacccagtccagctctggtgcctgccctctggtgcgagctgacctgagatgcacttccctcctctgtgagctgtctcggcacccacttgcagtcactgccgcctgatgttgttactcttccactccaaaaggatgcccgtggccgaggccccccaggtggctggcgggcagggggacggaggtgatggcgaggaagcggagccggaggggatgttcaaggcctgtgaggactccaagagaaaagcccggggctacctccgcctggtgcccctgtttgtgctgctggccctgctcgtgctggcttcggcgggggtgctactctggtatttcctagggtacaaggcggaggtgatggtcagccaggtgtactcaggcagtctgcgtgtactcaatcgccacttctcccaggatcttacccgccgggaatctagtgccttccgcagtgaaaccgccaaagcccagaagatgctcaaggagctcatcaccagcacccgcctgggaacttactacaactccagctccgtctattcctttggggagggacccctcacctgcttcttctggttcattctccaaatccccgagcaccgccggctgatgctgagccccgaggtggtgcaggcactgctggtggaggagctgctgtccacagtcaacagctcggctgccgtcccctacagggccgagtacgaagtggaccccgagggcctagtgatcctggaagccagtgtgaaagacatagctgcattgaattccacgctgggta

SEQ ID NO: 8706 - DNA, 305 bp, Homo sapiens
aaatgctcaatttctagttctatcttgggccactaattctctgtgtgacttgaccaagttccttaaattctcaaattccctaatttcttctagttgcaacttcttcattattctagtttgtacagtagatgattctccctcattgtaaatacaaaagaggccaggcatggtggttcacacctgtagtcccagctactcaggaagctgaggtgggagcatcacttgagcccaggaggtggaggctgtggtgagctatgatcatgccacttaactctagcctgggcaacagagaaagaccctgtctc

SEQ ID NO: 8707 - DNA, 635 bp, Homo sapiens
tctgccctgaggatacataactctaagaggatgtacgactgtaaaccacacagtgtacaccttcctgcctactttttactttcctacctctgcctctggttttggtctctggcagctgctgatttgtggcaacaccccagagctcagagtcagaagactgagtttcagttccattattgcctttcttttagccatggtatcaatccctctcagtcactaagtgattgcgacaacacctcgtacagtcgttggtggcattaaatcagatcgtctatgagagtattttgtataaactgtaaagtgactgtaggagcttgtagttctcatgagtatcactgctcctcttttccacagttcacagactatcatcagtggaacagtgctggtgttggtaccggagcaaccgacaccaaaaagaagaaaataaatcatggcactaaccctgagacaaccacttcggggggctgccactcgcctgaggatgtgagtcttggctggccggtctcctgaggacaaggggcacaagggggaggtcgagggtaactgttaagattgtggaaggaagaactgccgggtactggctaagaattctgggtttgagtcctacttctctctccatctgcgagggacacggt

SEQ ID NO: 8708 - DNA, 739 bp, Homo sapiens
ggtacaaaagcaatacacattcagtaaaaccatacttcggattttgaattttgatattttcctgtatgcagtaggatactctctctcattgctgggcagcggcagggagccatagctcccagtcagccacgcaatcaagagggtaaacaatgatactccacagtacgttgtgttgccagatgattttgccctgtggtggactaacaacataagtgttctgagcaagtttaaggtaggcaagcctaagttatgatgttcagtaggttagctgaattaagtgcattttttacttaatgatattttcaagttgcaaagggcttaaggacataaccctatcataagtctaggagcatctgtacttttaaaatattgtgcttcctatttcatttagaattatagtatgagtgtgtcttctgccaagtaatatactttgaaaagaaataactgccaaggctgggcacggtggctcatgcctataatcccagcactttgggaggccgtggcaggtggatcacctgagttcaggagtttgagaccagcttggccaacatggtgaaaccccgtctctactaaaaatacaaaaattaggcaggcatggtggtgtgtgcctgtagtcccagctacttgagcagccgaggcaggacaatagcttgaatctgggagggggaggttgcagtgagccaagattgggccactgcacaccagcctgggcaacagagcgagactctgtctcaaaaaa

SEQ ID NO: 8709 - DNA, 487 bp, Homo sapiens
gttcaggcaattctcctgcctcagcctcccaagtggctgggaggctgggattataggcgtccaccaccgtgcccagctaatttttttatttttagtggagacggggtttcaccttgttggccagactggtcttgaactcctgacctcaggtgattcacctgccttggcctcccaaaatgctgggattacaggtgtgagccaccacgcctggccagaaaagaggcttcattgactcagttctgcatggctggtgaggcctcaggaaacttatcatcatggaagaaggcaaagaggaatcaaggcacatcttacattgtggcaggagagaaagagagagtgaaggggaactgtcacacacttttaaaccatcagatatcatgagaatgcactattttgtgggaactcatgagaacagcatataggggaacctgcccccatgatccaatcaccacccaccaggctctctcttgacatgtggggattacaa

SEQ ID NO: 8710 - DNA, 577 bp, Homo sapiens
atcttctcttagagaaatcaaatactttaggcatatgatagtcagagaatggctatcaaattgcaaggcatattggttgatcagttagttagttctgtttgatgagaccactgggctgttgagaccagattcctgggttccaatcttaagtaatctgagagccaacacatgggtcatattagttccccaaacttagccacatcttgtggggctatggtgtcaccccaagagcaggaggagcatggatggatggcaatccatctccaccactggaaccccaaattctgaatgcatcacctgttagagtttcttgttcataaaatagcagggaatttaggaatttagttttttttaatagtttgggccttttatccacaccctcaggagcttaggatacttttctccttcagctcactctgaaactccctctggaagctctcccatgtgtgcacttcagacacttaggggtgtcttggtgctttcttgttccaaatgctttgctaacagaccttgggagaacccccaagccaacaccacttctgggatgaaaggaaatcaataaatgctcctcacagag

SEQ ID NO: 8711 - DNA, 365 bp, Homo sapiens
tgcttgaacctggaaggtggaggttgcagttaccagagattgtgccactgcactccagcctgggcaacagagtgagattctgttataaaaataaataaataaaataaaacaaagttgggaaaatacttttttttcttcaacttttattttaagttccagggtacatgtgcaggatgtgcaggtttgttacataggttaatgtgtgccatggtggtttgctgcatagatcaacctatcacccaggtattaagcccagcatccattagttattcttcctgatgctctccctccctccatgccccacatatttattttgcagagttaaaagtgatacaattaaaagtgataggtgtactggatgttaa

SEQ ID NO: 8712 - DNA, 467 bp, Homo sapiens
acaattacttaatgccttaaataataggttttattgcattgaatttatcattatggtctcataagtaatggtatgaagatacctttattgaaggatactacaagaaacagccttatgaaacctgtgactgtatggccatatttctacagaaacaatgcttgacatctctcaatatctccattatgaaactctgtgctagaaatgtgttttagagctgcatgttagaggaaagctacaaactttattttttccttaaagaccatgaaaattgtgtaactagttatgtttttctatttcgctttggctgccaagaagctcagaaccaaatctgcagcccatctatagcaaccatatgagtccttatgaccagagcatatgtggcattatcttttttccaaatctctacataattttgacttataattcagctgattctaataattttttaatttatatttgactaaatc

SEQ ID NO: 8713 - DNA, 964 bp, Homo sapiens
  misc_feature (721)..(721): n is a, c, g, or t
  misc_feature (726)..(726): n is a, c, g, or t
  misc_feature (731)..(731): n is a, c, g, or t
cggaagcgcggctgcagcagggcgaggctccaggtggggtcggttccgcatccagcctagcgtgtccacgatgcggctgggctccgggactttcgctacctgttgcgtagcgatcgaggtgctagggatcgcggtcttccttcggggattcttcccggctcccgttcgttcctctgccagagcggaacacggagcggagcccccagcgcccgaaccctcggctggagccagttctaactggaccacgctgccaccacctctcttcagtaaagttgttattgttctgatagatgccttgagagatgattttgtgtttgggtcaaagggtgtgaaatttatgccctacacaacttaccttgtggaaaaaggagcatctcacagttttgtggctgaagcaaagccacctacagttactatgcctcgaatcaaggggtattattgaagctcgtttgttatgtctttgtccttggcattctgttcacgggcaccaaagacttacttaaatctcaagtcattgctgcagacttcaaactcaagactgtaggtttatgggagatatatagtggattagttcttctggcagccttgctctttagaccacataatcttccggtcttagccatttagcctcttggattcagactctaatgactaaattcatcttggaagccccggagaacacgatgcagtgagattactgtgatgcattatggttggccangcatncttcnatttcacccggcaatcgccacgaaaattgcaccggggacctctcacgccggacttgtgcgctaagacacctaagtggagttccagccgtgcccgacacgcgtagggaagtacggaggccgggttgtggcccgcccctaggaattcctgagctcgaaaacccgggtacgcgcgatcagttgctctcgacgacgatcgtatccgatcgaacagctgtcgagccagggacactgag

SEQ ID NO: 8714 - DNA, 1973 bp, Homo sapiens
cggaagcgcggctgcagcagggcgaggctccaggtggggtcggttccgcatccagcctagcgtgtccacgatgcggctgggctccgggactttcgctacctgttgcgtagcgatcgaggtgctagggatcgcggtcttccttcggggattcttcccggctcccgttcgttcctctgccagagcggaacacggagcggagcccccagcgcccgaaccctcggctggagccagttctaactggaccacgctgccaccacctctcttcagtaaagttgttattgttctgatagatgccttgagagatgattttgtgtttgggtcaaagggtgtgaaatttatgccctacacaacttaccttgtggaaaaaggagcatctcacagttttgtggctgaagcaaagccacctacagttactatgcctcgaatcaaggcattgatgacggggagccttcctggctttgtcgacgtcatcaggaacctcaattctcctgcactgctggaagacagtgtgataagacaagcaaaagcagctggaaaaagaatagtcttttatggagatgaaacctgggttaaattattcccaaagcattttgtggaatatgatggaacaacctcatttttcgtgtcagattacacagaggtggataataatgtcacgaggcatttggataaagtattaaaaagaggagattgggacatattaatcctccactacctggggctggaccacattggccacatttcagggcccaacagccccctgattgggcagaagctgagcgagatggacagcgtgctgatgaagatccacacctcactgcagtcgaaggagagagagacgcctttacccaatttgctggttctttgtggtgaccatggcatgtctgaaacaggaagtcacggggcctcctccaccgaggaggtgaatacacctctgattttaatcagttctgcgtttgaaaggaaacccggtgatatccgacatccaaagcacgatccaacagacggatgtggcatgcgacacatggacgatagcacttggattaccgagttccaaaagacagtgtagggagcactcctattcccagttgtggaaggcaagaccaactgagcagagcagaaagcgacttacaacataagcactccagatgcagccttacgtaaacctgtcgcaagagaaatgtgccgacatatgaacaaagctcctgcgcactgcgcacgtaacaccatgatcagcacagctcgcaatggaaaacatggaatcaacaccagtaaaagagacggcacaagacaatcagaagatccaataccaccctggagactccaaagaaacacagggcaggaacctagaagcaacagaaccacgcaaggagcagaggcaccagatggaagtggcacacacgtgggacaccaagataagaccaaccaaatacacactgaatggaggacagaccacgacccaaagaccgaacggacgagatcatcaacccgtgctgcccagaaccaagcatcccaccaagaccaactagagcaagaaaagggctgagaacaagaaagaaccaattgaacaaacaccgtggggggttatccacgtgggacacacactcgcgagatacatggaacaaatacggacggacgacggtcacagcatgatgcaccaaccagaagacaggaacgagagaaacaacaggagcacaaacgaagcaggaacaaaaagaagaacaagacacagacacgcgaacaatggacgacaacgcaagacgcaacacactcagcgtgcgagcgaaccgacaaggcagccacggggccaacacaaggagcgagaaccccacagctcaggaccaacgcagcagcacagccacagaccgacggagcgcacccaaggtacaagacagcacaaagaggccaaagacacggcgccacaacacagaagaccgacacacagacgcgaaagaaaagtgaacacacgcaac

SEQ ID NO: 8715 - DNA, 320 bp, Homo sapiens
ggagccggaagcgcggctgcagcagggcgaggctccaggtggggtcggttccgcatccagcctagcgtgtccacgatgcggctgggctccgggactttcgctacctgttgcgtagcgatcgaggtgctagggatcgcggtcttccttcggggattcttcccggctcccgttcgttcctctgccagagcggaacacggagcggagcccccagcgcccgaaccctcggctggtacggacccctccccggcgtctccgctcccctgaccccacatcccctagaagaccttttttctgagcctcgctgctcggatttcttctcg

SEQ ID NO: 8716 - DNA, 4703 bp, Homo sapiens
atgcaacccgcctccccgcccgcccggtggagcttccactcggctgcgggctggagcggcggcgggcaggcgtgcggaggacactcctgcgaccaggtactggctgtgatcgaacttctcaaccctcagagacttagatcttccacctcactccctcagccaagcctccaggccccctcgtgcatccgtggtggcctctctgccttctctgttctgttctccccatggcccagacatgagtggccccctagaaggggctgatgggggaggggaccccaggcctggggaatcattttgtcctgggggcgtcccatcccctgggcccccacagcaccggccttgcccaggccccagcctggccgatgacaccgatgccaacagcaatggttcaagtggcaatgagtccaacgggcatgagtctagaggcgcatctcagcggagctcacacagctcctcctcaggcaacggcaaggactcagccctgctggagaccactgagagcagcaagagcacaaactctcagagcccatccccacccagcagttccattgcctacagcctcctgagtgccagctcagagcaggacaacccgtccaccagtggctgcagcagtgaacagtcagcccgggcaaggactcagaaggaactcatgacagcacttcgagagctcaagcttcgactgccgccagagcgccggggcaagggccgctctgggaccctggccacgctgcagtacgcactggcctgtgtcaagcaggtgcaggccaaccaggaatactaccagcagtggagcctggaggagggcgagccttgctccatggacatgtccacctataccctggaggagctggagcacatcacgtctgagtacacacttcagaaccaggataccttctcagtggctgtctccttcctgacgggccgaatcgtctacatttcggagcaggcagccgtcctgctgcgttgcaagcgggacgtgttccggggtacccgcttctctgagctcctggctccccaggatgtgggagtcttctatggttccactgctccatctcgcctgcccacctggggcacaggggcctcagcaggttcaggcctcagggactttacccaggagaagtccgtcttctgccgtatcagaggaggtcctgaccgggatccagggcctcggtaccagccattccgcctaaccccgtatgtgaccaagatccgggtctcagatggggcccctgcacagccgtgctgcctgctgattgcagagcgcatccattcgggttacgaagctccccggataccccctgacaagaggattttcactacgcggcacacacccagctgcctcttccaggatgtggatgaaagggctgcccccctgctgggctacctgccccaggacctcctgggggccccagtgctcctgttcctgcatcctgaggaccgacccctcatgctggctatccacaagaagattctgcagttggcgggccagccctttgaccactcccctatccgcttctgtgcccgcaacggggagtatgtcaccatggacaccagctgggctggctttgtgcacccctggagccgcaaggtagccttcgtgttgggccgccacaaagtacgcacggcccccctgaatgaggacgtgttcactcccccggcccccagcccagctccctccctggacactgatatccaggagctgtcagagcagatccaccggctgctgctgcagcccgtccacagccccagccccacgggactctgtggagtcggcgccgtgacatccccaggccctctccacagccctgggtcctccagtgatagcaacgggggtgatgcagaggggcctgggcctcctgcgccagtgactttccagcagatctgtaaggatgtgcatctggtgaagcaccagggccagcagctttttattgagtctcgggcccggcctcagtcccggccccgcctccctgctacaggcacgttcaaggccaaggcccttccctgccaatccccagacccagagctggaggcgggttctgctcccgtccaggccccactagccttggtccctgaggaggccgagaggaaagaagcctccagctgctcctaccagcagatcaactgcctggacagcatcctcaggtacctggagagctgcaacctccccagcaccactaagcgtaaatgtgcctcctcctcctcctataccacctcctcagcctctgacgacgacaggcagaggacaggtccagtctctgtggggaccaagaaagatccgccgtcagcagcgctgtctggggagggggccaccccacggaaggagccagtggtgggaggcaccctgagcccgctcgccctggccaataaggcggagagtgtggtgtccgtcaccagtcagtgtagcttcagctccaccatcgtccatgtgggagacaagaagcccccggagtcggacatcatcatgatggaggacctgcctggtctagccccaggcccagcccccagcccagcccccagccccacagtagcccctgacccagccccagacgcctaccgtccagtggggctgaccaaggccgtgctgtccctgcacacgcagaaggaagagcaagccttcctcagccgcttccgagacctgggcaggctgcgtggactcgacagctcttccacagctccctcagcccttggcgagcgaggctgccaccacggccccgcacccccaagccgccgacaccactgccgatccaaagccaagcgctcacgccaccaccagaaccctcgggctgaagcgccctgctatgtctcacacccctcacccgtgccaccctccaccccctggcccaccccaccagccactacccccttcccagcggttgtccagccctaccctctcccagtgttctctcctcgaggaggcccccagcctcttccccctgctcccacatctgtgcccccagctgctttccccgcccctttggtgaccccaatggtggccttggtgctccctaactatctgttcccaaccccatccagctatccttatggggcactccagacccctgctgaagggcctcccactcctgcctcgcactccccttctccatccttgcccgccctccccccgagtcctcctcaccgcccggactctccactgttcaactcgagatgcagctctccactccagctcaatctgctgcagctggaggagctcccccgtgctgagggggctgctgttgcaggaggccctgggagcagtgccgggcccccacctcccagtgcggaggctgctgagccagaggccagactggcggaggtcactgagtcctccaatcaggacgcactttccggctccagtgacctgctcgaacttctgctgcaagaggactcgcgctccggcacaggctccgcagcctcgggctccttgggctctggcttgggctctgggtctggttcaggctcccatgaagggggcagcacctcagccagcatcactcgcagcagccagagcagccacacaagcaaatactttggcagcatcgactcttccgaggctgaggctggggctgctcggggcggggctgagcctggggaccaggtgattaagtacgtgctccaggatcccatttggctgctcatggccaatgctgaccagcgcgtcatgatgacctaccaggtgccctccagggacatgacctctgtgctgaagcaggatcgggagcggctccgagccatgcagaagcagcagcctcggttttctgaggaccagcggcgggaactgggtgctgtgcactcctgggtccggaagggccaactgcctcgggctcttgatgtgatggcctgtgtggactgtgggagcagcacccaagatcctggtcaccctgatgacccactcttctcagagctggatggactggggctggagcccatggaagagggtggaggcgagcagggcagcagcggtggcggcagtggtgagggagagggctgcgaggaggcccaaggcggggccaaggcttcaagctctcaggacttggctatggaggaggaggaagaaggcaggagctcatccagtccagccttacctacagcaggaaactgcaccagctagactccattctgggaccatctccaggagtccatgagaggctttcttctcctatgtcccaattctcagaactcagatgtggctagaccaaccagtgggaaactgccccagcttctcccaccatagggggccggacccccatcaccagcctaggatccaggggctgcctctggcctcttagggagcagagagcagaactccgcagcccagcccagaggagtgtcacctcccacctttggagaggaatccttccctcccctggacaaagttgctgacaagctgctgaagtggcctctccatattccagctgagcctgaatctgactcttgagggttggggctgcacttatttattgcggggagacagctctctctcccacctcctccccagatgggaggagagcctgaggcccaagcaggacccgggggttccagcccctagctgctctggagtgggggaggttggtggaccatggagtccctggtgctgcccctcaggtgggacccaggcgttctcagctgtaccctctgccgatggcatttgtgtttttgatatttgtgtctgttactacttttttaatacaaaaagataaaaacgc

SEQ ID NO: 8717 - DNA, 4661 bp, Homo sapiens
agtgtaatgctagaagtcctagaagaaatttggagtgtgcgtgcgcgccgagcggtactggctgtgatcgaacttctcaaccctcagagacttagatcttccacctcactccctcagccaagcctccaggccccctcgtgcatccgtggtggcctctctgccttctctgttctgttctccccatggcccagacatgagtggccccctagaaggggctgatgggggaggggaccccaggcctggggaatcattttgtcctgggggcgtcccatcccctgggcccccacagcaccggccttgcccaggccccagcctggccgatgacaccgatgccaacagcaatggttcaagtggcaatgagtccaacgggcatgagtctagaggcgcatctcagcggagctcacacagctcctcctcaggcaacggcaaggactcagccctgctggagaccactgagagcagcaagagcacaaactctcagagcccatccccacccagcagttccattgcctacagcctcctgagtgccagctcagagcaggacaacccgtccaccagtggctgcagcagtgaacagtcagcccgggcaaggactcagaaggaactcatgacagcacttcgagagctcaagcttcgactgccgccagagcgccggggcaagggccgctctgggaccctggccacgctgcagtacgcactggcctgtgtcaagcaggtgcaggccaaccaggaatactaccagcagtggagcctggaggagggcgagccttgctccatggacatgtccacctataccctggaggagctggagcacatcacgtctgagtacacacttcagaaccaggataccttctcagtggctgtctccttcctgacgggccgaatcgtctacatttcggagcaggcagccgtcctgctgcgttgcaagcgggacgtgttccggggtacccgcttctctgagctcctggctccccaggatgtgggagtcttctatggttccactgctccatctcgcctgcccacctggggcacaggggcctcagcaggttcaggcctcagggactttacccaggagaagtccgtcttctgccgtatcagaggaggtcctgaccgggatccagggcctcggtaccagccattccgcctaaccccgtatgtgaccaagatccgggtctcagatggggcccctgcacagccgtgctgcctgctgattgcagagcgcatccattcgggttacgaagctccccggataccccctgacaagaggattttcactacgcggcacacacccagctgcctcttccaggatgtggatgaaagggctgcccccctgctgggctacctgccccaggacctcctgggggccccagtgctcctgttcctgcatcctgaggaccgacccctcatgctggctatccacaagaagattctgcagttggcgggccagccctttgaccactcccctatccgcttctgtgcccgcaacggggagtatgtcaccatggacaccagctgggctggctttgtgcacccctggagccgcaaggtagccttcgtgttgggccgccacaaagtacgcacggcccccctgaatgaggacgtgttcactcccccggcccccagcccagctccctccctggacactgatatccaggagctgtcagagcagatccaccggctgctgctgcagcccgtccacagccccagccccacgggactctgtggagtcggcgccgtgacatccccaggccctctccacagccctgggtcctccagtgatagcaacgggggtgatgcagaggggcctgggcctcctgcgccagtgactttccagcagatctgtaaggatgtgcatctggtgaagcaccagggccagcagctttttattgagtctcgggcccggcctcagtcccggccccgcctccctgctacaggcacgttcaaggccaaggcccttccctgccaatccccagacccagagctggaggcgggttctgctcccgtccaggccccactagccttggtccctgaggaggccgagaggaaagaagcctccagctgctcctaccagcagatcaactgcctggacagcatcctcaggtacctggagagctgcaacctccccagcaccactaagcgtaaatgtgcctcctcctcctcctataccacctcctcagcctctgacgacgacaggcagaggacaggtccagtctctgtggggaccaagaaagatccgccgtcagcagcgctgtctggggagggggccaccccacggaaggagccagtggtgggaggcaccctgagcccgctcgccctggccaataaggcggagagtgtggtgtccgtcaccagtcagtgtagcttcagctccaccatcgtccatgtgggagacaagaagcccccggagtcggacatcatcatgatggaggacctgcctggtctagccccaggcccagcccccagcccagcccccagccccacagtagcccctgacccagccccagacgcctaccgtccagtggggctgaccaaggccgtgctgtccctgcacacgcagaaggaagagcaagccttcctcagccgcttccgagacctgggcaggctgcgtggactcgacagctcttccacagctccctcagcccttggcgagcgaggctgccaccacggccccgcacccccaagccgccgacaccactgccgatccaaagccaagcgctcacgccaccaccagaaccctcgggctgaagcgccctgctatgtctcacacccctcacccgtgccaccctccaccccctggcccaccccaccagccactacccccttcccagcggttgtccagccctaccctctcccagtgttctctcctcgaggaggcccccagcctcttccccctgctcccacatctgtgcccccagctgctttccccgcccctttggtgaccccaatggtggccttggtgctccctaactatctgttcccaaccccatccagctatccttatggggcactccagacccctgctgaagggcctcccactcctgcctcgcactccccttctccatccttgcccgccctccccccgagtcctcctcaccgcccggactctccactgttcaactcgagatgcagctctccactccagctcaatctgctgcagctggaggagctcccccgtgctgagggggctgctgttgcaggaggccctgggagcagtgccgggcccccacctcccagtgcggaggctgctgagccagaggccagactggcggaggtcactgagtcctccaatcaggacgcactttccggctccagtgacctgctcgaacttctgctgcaagaggactcgcgctccggcacaggctccgcagcctcgggctccttgggctctggcttgggctctgggtctggttcaggctcccatgaagggggcagcacctcagccagcatcactcgcagcagccagagcagccacacaagcaaatactttggcagcatcgactcttccgaggctgaggctggggctgctcggggcggggctgagcctggggaccaggtgattaagtacgtgctccaggatcccatttggctgctcatggccaatgctgaccagcgcgtcatgatgacctaccaggtgccctccagggacatgacctctgtgctgaagcaggatcgggagcggctccgagccatgcagaagcagcagcctcggttttctgaggaccagcggcgggaactgggtgctgtgcactcctgggtccggaagggccaactgcctcgggctcttgatgtgatggcctgtgtggactgtgggagcagcacccaagatcctggtcaccctgatgacccactcttctcagagctggatggactggggctggagcccatggaagagggtggaggcgagcagggcagcagcggtggcggcagtggtgagggagagggctgcgaggaggcccaaggcggggccaaggcttcaagctctcaggacttggctatggaggaggaggaagaaggcaggagctcatccagtccagccttacctacagcaggaaactgcaccagctagactccattctgggaccatctccaggagtccatgagaggctttcttctcctatgtcccaattctcagaactcagatgtggctagaccaaccagtgggaaactgccccagcttctcccaccatagggggccggacccccatcaccagcctaggatccaggggctgcctctggcctcttagggagcagagagcagaactccgcagcccagcccagaggagtgtcacctcccacctttggagaggaatccttccctcccctggacaaagttgctgacaagctgctgaagtggcctctccatattccagctgagcctgaatctgactcttgagggttggggctgcacttatttattgcggggagacagctctctctcccacctcctccccagatgggaggagagcctgaggcccaagcaggacccgggggttccagcccctagctgctctggagtgggggaggttggtggaccatggagtccctggtgctgcccctcaggtgggacccaggcgttctcagctgtaccctctgccgatggcatttgtgtttttgatatttgtgtctgttactacttttttaatacaaaaagataaaaacgc

SEQ ID NO: 8718 - DNA, 5578 bp, Homo sapiens
atgcaacccgcctccccgcccgcccggtggagcttccactcggctgcgggctggagcggcggcgggcaggcgtgcggaggacactcctgcgaccaggtactggctgtgatcgaacttctcaaccctcagagacttagatcttccacctcactccctcagccaagcctccaggccccctcgtgcatccgtggtggcctctctgccttctctgttctgttctccccatggcccagacatgagtggccccctagaaggggctgatgggggaggggaccccaggcctggggaatcattttgtcctgggggcgtcccatcccctgggcccccacagcaccggccttgcccaggccccagcctggccgatgacaccgatgccaacagcaatggttcaagtggcaatgagtccaacgggcatgagtctagaggcgcatctcagcggagctcacacagctcctcctcaggcaacggcaaggactcagccctgctggagaccactgagagcagcaagagcacaaactctcagagcccatccccacccagcagttccattgcctacagcctcctgagtgccagctcagagcaggacaacccgtccaccagtggctgcagcagtgaacagtcagcccgggcaaggactcagaaggaactcatgacagcacttcgagagctcaagcttcgactgccgccagagcgccggggcaagggccgctctgggaccctggccacgctgcagtacgcactggcctgtgtcaagcaggtgcaggccaaccaggaatactaccagcagtggagcctggaggagggcgagccttgctccatggacatgtccacctataccctggaggagctggagcacatcacgtctgagtacacacttcagaaccaggataccttctcagtggctgtctccttcctgacgggccgaatcgtctacatttcggagcaggcagccgtcctgctgcgttgcaagcgggacgtgttccggggtacccgcttctctgagctcctggctccccaggatgtgggagtcttctatggttccactgctccatctcgcctgcccacctggggcacaggggcctcagcaggttcaggcctcagggactttacccaggagaagtccgtcttctgccgtatcagaggaggtcctgaccgggatccagggcctcggtaccagccattccgcctaaccccgtatgtgaccaagatccgggtctcagatggggcccctgcacagccgtgctgcctgctgattgcagagcgcatccattcgggttacgaagctccccggataccccctgacaagaggattttcactacgcggcacacacccagctgcctcttccaggatgtggatgaaagggctgcccccctgctgggctacctgccccaggacctcctgggggccccagtgctcctgttcctgcatcctgaggaccgacccctcatgctggctatccacaagaagattctgcagttggcgggccagccctttgaccactcccctatccgcttctgtgcccgcaacggggagtatgtcaccatggacaccagctgggctggctttgtgcacccctggagccgcaaggtagccttcgtgttgggccgccacaaagtacgcacggcccccctgaatgaggacgtgttcactcccccggcccccagcccagctccctccctggacactgatatccaggagctgtcagagcagatccaccggctgctgctgcagcccgtccacagccccagccccacgggactctgtggagtcggcgccgtgacatccccaggccctctccacagccctgggtcctccagtgatagcaacgggggtgatgcagaggggcctgggcctcctgcgccagtgactttccagcagatctgtaaggatgtgcatctggtgaagcaccagggccagcagctttttattgagtctcgggcccggcctcagtcccggccccgcctccctgctacaggcacgttcaaggccaaggcccttccctgccaatccccagacccagagctggaggcgggttctgctcccgtccaggccccactagccttggtccctgaggaggccgagaggaaagaagcctccagctgctcctaccagcagatcaactgcctggacagcatcctcaggtacctggagagctgcaacctccccagcaccactaagcgtaaatgtgcctcctcctcctcctataccacctcctcagcctctgacgacgacaggcagaggacaggtccagtctctgtggggaccaagaaagatccgccgtcagcagcgctgtctggggagggggccaccccacggaaggagccagtggtgggaggcaccctgagcccgctcgccctggccaataaggcggagagtgtggtgtccgtcaccagtcagtgtagcttcagctccaccatcgtccatgtgggagacaagaagcccccggagtcggacatcatcatgatggaggacctgcctggtctagccccaggcccagcccccagcccagcccccagccccacagtagcccctgacccagccccagacgcctaccgtccagtggggctgaccaaggccgtgctgtccctgcacacgcagaaggaagagcaagccttcctcagccgcttccgagacctgggcaggctgcgtggactcgacagctcttccacagctccctcagcccttggcgagcgagggtagccacctggggcctcctggagcctgccctctgcccagtctaggactggattgttggggggtgggtcttaagggaggtgtttctgctccagggacccaggctggtgttgcttccaccactaggccctgcctagggacaggcccctcgctagcttctccccactaggatggggttccgggctgcagccagaggagggcagcctggggggatggcactgggatgggcaggcagaggtgctgtctccaggtaagcgacttcaggcctagcctgggggcaggggcaggaagtatgcccacttaggagtcagttgtcactgatgaagagacatgcatagattctgggccaactctgggtggggtctgggcttcaagggcaggtggaaggcagcccctccaggtgcctgagggagatcccctgcaggcagacgcaggactcaggactgggctttccagccccactcttcactccattgcaagctaggcagaatacggcctcgatgggcaggaggaatgcctaggctggcagtgcccacaggagtttggcggaccagagccatctgtccatgtgtccatggactcaccctgcttcctccatctgccagcatgcctccatcttccgcacacccccagctcgacccctcgtgtaacctctccctggccttgttcctttctcaataaatccccttgtccctggctcctgtgattcttccctgaaggtgccccacctcctgagtcccccgttctgtgtgggttgagaagctctctctgggaccttggcctgtcctctccctggtcagcgtgtcagggcagtgtgggtagcaggggtactaaccccaggttgaggtccttgctaaccctagtctctccccacaggctgccaccacggccccgcacccccaagccgccgacaccactgccgatccaaagccaagcgctcacgccaccaccagaaccctcgggctgaagcgccctgctatgtctcacacccctcacccgtgccaccctccaccccctggcccaccccaccagccactacccccttcccagcggttgtccagccctaccctctcccagtgttctctcctcgaggaggcccccagcctcttccccctgctcccacatctgtgcccccagctgctttccccgcccctttggtgaccccaatggtggccttggtgctccctaactatctgttcccaaccccatccagctatccttatggggcactccagacccctgctgaagggcctcccactcctgcctcgcactccccttctccatccttgcccgccctccccccgagtcctcctcaccgcccggactctccactgttcaactcgagatgcagctctccactccagctcaatctgctgcagctggaggagctcccccgtgctgagggggctgctgttgcaggaggccctgggagcagtgccgggcccccacctcccagtgcggaggctgctgagccagaggccagactggcggaggtcactgagtcctccaatcaggacgcactttccggctccagtgacctgctcgaacttctgctgcaagaggactcgcgctccggcacaggctccgcagcctcgggctccttgggctctggcttgggctctgggtctggttcaggctcccatgaagggggcagcacctcagccagcatcactcgcagcagccagagcagccacacaagcaaatactttggcagcatcgactcttccgaggctgaggctggggctgctcggggcggggctgagcctggggaccaggtgattaagtacgtgctccaggatcccatttggctgctcatggccaatgctgaccagcgcgtcatgatgacctaccaggtgccctccagggacatgacctctgtgctgaagcaggatcgggagcggctccgagccatgcagaagcagcagcctcggttttctgaggaccagcggcgggaactgggtgctgtgcactcctgggtccggaagggccaactgcctcgggctcttgatgtgatggcctgtgtggactgtgggagcagcacccaagatcctggtcaccctgatgacccactcttctcagagctggatggactggggctggagcccatggaagagggtggaggcgagcagggcagcagcggtggcggcagtggtgagggagagggctgcgaggaggcccaaggcggggccaaggcttcaagctctcaggacttggctatggaggaggaggaagaaggcaggagctcatccagtccagccttacctacagcaggaaactgcaccagctagactccattctgggaccatctccaggagtccatgagaggctttcttctcctatgtcccaattctcagaactcagatgtggctagaccaaccagtgggaaactgccccagcttctcccaccatagggggccggacccccatcaccagcctaggatccaggggctgcctctggcctcttagggagcagagagcagaactccgcagcccagcccagaggagtgtcacctcccacctttggagaggaatccttccctcccctggacaaagttgctgacaagctgctgaagtggcctctccatattccagctgagcctgaatctgactcttgagggttggggctgcacttatttattgcggggagacagctctctctcccacctcctccccagatgggaggagagcctgaggcccaagcaggacccgggggttccagcccctagctgctctggagtgggggaggttggtggaccatggagtccctggtgctgcccctcaggtgggacccaggcgttctcagctgtaccctctgccgatggcatttgtgtttttgatatttgtgtctgttactacttttttaatacaaaaagataaaaacgc

SEQ ID NO: 8719 - DNA, 5825 bp, Homo sapiens
atgcaacccgcctccccgcccgcccggtggagcttccactcggctgcgggctggagcggcggcgggcaggcgtgcggaggacactcctgcgaccaggtactggctgtgatcgaacttctcaaccctcagagacttagatcttccacctcactccctcagccaagcctccaggccccctcgtgcatccgtggtggcctctctgccttctctgttctgttctccccatggcccagacatgagtggccccctagaaggggctgatgggggaggggaccccaggcctggggaatcattttgtcctgggggcgtcccatcccctgggcccccacagcaccggccttgcccaggccccagcctggccgatgacaccgatgccaacagcaatggttcaagtggcaatgagtccaacgggcatgagtctagaggcgcatctcagcggagctcacacagctcctcctcaggcaacggcaaggactcagccctgctggagaccactgagagcagcaagagcacaaactctcagagcccatccccacccagcagttccattgcctacagcctcctgagtgccagctcagagcaggacaacccgtccaccagtggctgcagcagtgaacagtcagcccgggcaaggactcagaaggaactcatgacagcacttcgagagctcaagcttcgactgccgccagagcgccggggcaagggccgctctgggaccctggccacgctgcagtacgcactggcctgtgtcaagcaggtgcaggccaaccaggaatactaccagcagtggagcctggaggagggcgagccttgctccatggacatgtccacctataccctggaggagctggagcacatcacgtctgagtacacacttcagaaccaggataccttctcagtggctgtctccttcctgacgggccgaatcgtctacatttcggagcaggcagccgtcctgctgcgttgcaagcgggacgtgttccggggtacccgcttctctgagctcctggctccccaggatgtgggagtcttctatggttccactgctccatctcgcctgcccacctggggcacaggggcctcagcaggttcaggcctcagggactttacccaggagaagtccgtcttctgccgtatcagaggaggtcctgaccgggatccagggcctcggtaccagccattccgcctaaccccgtatgtgaccaagatccgggtctcagatggggcccctgcacagccgtgctgcctgctgattgcagagcgcatccattcgggttacgaagctccccggataccccctgacaagaggattttcactacgcggcacacacccagctgcctcttccaggatgtggatgaaagggctgcccccctgctgggctacctgccccaggacctcctgggggccccagtgctcctgttcctgcatcctgaggaccgacccctcatgctggctatccacaagaagattctgcagttggcgggccagccctttgaccactcccctatccgcttctgtgcccgcaacggggagtatgtcaccatggacaccagctgggctggctttgtgcacccctggagccgcaaggtagccttcgtgttgggccgccacaaagtacgcacggcccccctgaatgaggacgtgttcactcccccggcccccagcccagctccctccctggacactgatatccaggagctgtcagagcagatccaccggctgctgctgcagcccgtccacagccccagccccacgggactctgtggagtcggcgccgtgacatccccaggccctctccacagccctgggtcctccagtgatagcaacgggggtgatgcagaggggcctgggcctcctgcgccagtgagtgacctgctcctacctcaccctctaatcgccctttcccctctccttcttggaaccagcactgccagtcccagagtcttgcccgatcctcctttgccctctccttcctgccttttccttcttgtcctgctcccatcaaggcgtctgtgcctccccactggtaccttcttgttttattgtgcccttggcccctgacactggcgacaccccctggttctgctcactgtggtgctgtgtcccacaggtgactttccagcagatctgtaaggatgtgcatctggtgaagcaccagggccagcagctttttattgagtctcgggcccggcctcagtcccggccccgcctccctgctacaggcacgttcaaggccaaggcccttccctgccaatccccagacccagagctggaggcgggttctgctcccgtccaggccccactagccttggtccctgaggaggccgagaggaaagaagcctccagctgctcctaccagcagatcaactgcctggacagcatcctcaggtacctggagagctgcaacctccccagcaccactaagcgtaaatgtgcctcctcctcctcctataccacctcctcagcctctgacgacgacaggcagaggacaggtccagtctctgtggggaccaagaaagatccgccgtcagcagcgctgtctggggagggggccaccccacggaaggagccagtggtgggaggcaccctgagcccgctcgccctggccaataaggcggagagtgtggtgtccgtcaccagtcagtgtagcttcagctccaccatcgtccatgtgggagacaagaagcccccggagtcggacatcatcatgatggaggacctgcctggtctagccccaggcccagcccccagcccagcccccagccccacagtagcccctgacccagccccagacgcctaccgtccagtggggctgaccaaggccgtgctgtccctgcacacgcagaaggaagagcaagccttcctcagccgcttccgagacctgggcaggctgcgtggactcgacagctcttccacagctccctcagcccttggcgagcgagggtagccacctggggcctcctggagcctgccctctgcccagtctaggactggattgttggggggtgggtcttaagggaggtgtttctgctccagggacccaggctggtgttgcttccaccactaggccctgcctagggacaggcccctcgctagcttctccccactaggatggggttccgggctgcagccagaggagggcagcctggggggatggcactgggatgggcaggcagaggtgctgtctccaggtaagcgacttcaggcctagcctgggggcaggggcaggaagtatgcccacttaggagtcagttgtcactgatgaagagacatgcatagattctgggccaactctgggtggggtctgggcttcaagggcaggtggaaggcagcccctccaggtgcctgagggagatcccctgcaggcagacgcaggactcaggactgggctttccagccccactcttcactccattgcaagctaggcagaatacggcctcgatgggcaggaggaatgcctaggctggcagtgcccacaggagtttggcggaccagagccatctgtccatgtgtccatggactcaccctgcttcctccatctgccagcatgcctccatcttccgcacacccccagctcgacccctcgtgtaacctctccctggccttgttcctttctcaataaatccccttgtccctggctcctgtgattcttccctgaaggtgccccacctcctgagtcccccgttctgtgtgggttgagaagctctctctgggaccttggcctgtcctctccctggtcagcgtgtcagggcagtgtgggtagcaggggtactaaccccaggttgaggtccttgctaaccctagtctctccccacaggctgccaccacggccccgcacccccaagccgccgacaccactgccgatccaaagccaagcgctcacgccaccaccagaaccctcgggctgaagcgccctgctatgtctcacacccctcacccgtgccaccctccaccccctggcccaccccaccagccactacccccttcccagcggttgtccagccctaccctctcccagtgttctctcctcgaggaggcccccagcctcttccccctgctcccacatctgtgcccccagctgctttccccgcccctttggtgaccccaatggtggccttggtgctccctaactatctgttcccaaccccatccagctatccttatggggcactccagacccctgctgaagggcctcccactcctgcctcgcactccccttctccatccttgcccgccctccccccgagtcctcctcaccgcccggactctccactgttcaactcgagatgcagctctccactccagctcaatctgctgcagctggaggagctcccccgtgctgagggggctgctgttgcaggaggccctgggagcagtgccgggcccccacctcccagtgcggaggctgctgagccagaggccagactggcggaggtcactgagtcctccaatcaggacgcactttccggctccagtgacctgctcgaacttctgctgcaagaggactcgcgctccggcacaggctccgcagcctcgggctccttgggctctggcttgggctctgggtctggttcaggctcccatgaagggggcagcacctcagccagcatcactcgcagcagccagagcagccacacaagcaaatactttggcagcatcgactcttccgaggctgaggctggggctgctcggggcggggctgagcctggggaccaggtgattaagtacgtgctccaggatcccatttggctgctcatggccaatgctgaccagcgcgtcatgatgacctaccaggtgccctccagggacatgacctctgtgctgaagcaggatcgggagcggctccgagccatgcagaagcagcagcctcggttttctgaggaccagcggcgggaactgggtgctgtgcactcctgggtccggaagggccaactgcctcgggctcttgatgtgatggcctgtgtggactgtgggagcagcacccaagatcctggtcaccctgatgacccactcttctcagagctggatggactggggctggagcccatggaagagggtggaggcgagcagggcagcagcggtggcggcagtggtgagggagagggctgcgaggaggcccaaggcggggccaaggcttcaagctctcaggacttggctatggaggaggaggaagaaggcaggagctcatccagtccagccttacctacagcaggaaactgcaccagctagactccattctgggaccatctccaggagtccatgagaggctttcttctcctatgtcccaattctcagaactcagatgtggctagaccaaccagtgggaaactgccccagcttctcccaccatagggggccggacccccatcaccagcctaggatccaggggctgcctctggcctcttagggagcagagagcagaactccgcagcccagcccagaggagtgtcacctcccacctttggagaggaatccttccctcccctggacaaagttgctgacaagctgctgaagtggcctctccatattccagctgagcctgaatctgactcttgagggttggggctgcacttatttattgcggggagacagctctctctcccacctcctccccagatgggaggagagcctgaggcccaagcaggacccgggggttccagcccctagctgctctggagtgggggaggttggtggaccatggagtccctggtgctgcccctcaggtgggacccaggcgttctcagctgtaccctctgccgatggcatttgtgtttttgatatttgtgtctgttactacttttttaatacaaaaagataaaaacgc

SEQ ID NO: 8720 - DNA, 5729 bp, Homo sapiens
atgcaacccgcctccccgcccgcccggtggagcttccactcggctgcgggctggagcggcggcgggcaggcgtgcggaggacactcctgcgaccaggtactggctgtgatcgaacttctcaaccctcagagacttagatcttccacctcactccctcagccaagcctccaggccccctcgtgcatccgtggtggcctctctgccttctctgttctgttctccccatggcccagacatgagtggccccctagaaggggctgatgggggaggggaccccaggcctggggaatcattttgtcctgggggcgtcccatcccctgggcccccacagcaccggccttgcccaggccccagcctggccgatgacaccgatgccaacagcaatggttcaagtggcaatgagtccaacgggcatgagtctagaggcgcatctcagcggagctcacacagctcctcctcaggcaacggcaaggactcagccctgctggagaccactgagagcagcaagagcacaaactctcagagcccatccccacccagcagttccattgcctacagcctcctgagtgccagctcagagcaggacaacccgtccaccagtggctgcagcagtgaacagtcagcccgggcaaggactcagaaggaactcatgacagcacttcgagagctcaagcttcgactgccgccagagcgccggggcaagggccgctctgggaccctggccacgctgcagtacgcactggcctgtgtcaagcaggtgcaggccaaccaggaatactaccagcagtggagcctggaggagggcgagccttgctccatggacatgtccacctataccctggaggagctggagcacatcacgtctgagtacacacttcagaaccaggataccttctcagtggctgtctccttcctgacgggccgaatcgtctacatttcggagcaggcagccgtcctgctgcgttgcaagcgggacgtgttccggggtacccgcttctctgagctcctggctccccaggatgtgggagtcttctatggttccactgctccatctcgcctgcccacctggggcacaggggcctcagcaggtgaggtgcccaagcgctgtggggaggcatgagcagtcccaggaaattcctgctgtgaggggccggggaacccagactttcccttagtggattcttcgcagcctagggaaggggcaggaagctgtgctcactcctctcctgtctgtcccaggttcaggcctcagggactttacccaggagaagtccgtcttctgccgtatcagaggaggtcctgaccgggatccagggcctcggtaccagccattccgcctaaccccgtatgtgaccaagatccgggtctcagatggggcccctgcacagccgtgctgcctgctgattgcagagcgcatccattcgggttacgaagctccccggataccccctgacaagaggattttcactacgcggcacacacccagctgcctcttccaggatgtggatgaaagggctgcccccctgctgggctacctgccccaggacctcctgggggccccagtgctcctgttcctgcatcctgaggaccgacccctcatgctggctatccacaagaagattctgcagttggcgggccagccctttgaccactcccctatccgcttctgtgcccgcaacggggagtatgtcaccatggacaccagctgggctggctttgtgcacccctggagccgcaaggtagccttcgtgttgggccgccacaaagtacgcacggcccccctgaatgaggacgtgttcactcccccggcccccagcccagctccctccctggacactgatatccaggagctgtcagagcagatccaccggctgctgctgcagcccgtccacagccccagccccacgggactctgtggagtcggcgccgtgacatccccaggccctctccacagccctgggtcctccagtgatagcaacgggggtgatgcagaggggcctgggcctcctgcgccagtgactttccagcagatctgtaaggatgtgcatctggtgaagcaccagggccagcagctttttattgagtctcgggcccggcctcagtcccggccccgcctccctgctacaggcacgttcaaggccaaggcccttccctgccaatccccagacccagagctggaggcgggttctgctcccgtccaggccccactagccttggtccctgaggaggccgagaggaaagaagcctccagctgctcctaccagcagatcaactgcctggacagcatcctcaggtacctggagagctgcaacctccccagcaccactaagcgtaaatgtgcctcctcctcctcctataccacctcctcagcctctgacgacgacaggcagaggacaggtccagtctctgtggggaccaagaaagatccgccgtcagcagcgctgtctggggagggggccaccccacggaaggagccagtggtgggaggcaccctgagcccgctcgccctggccaataaggcggagagtgtggtgtccgtcaccagtcagtgtagcttcagctccaccatcgtccatgtgggagacaagaagcccccggagtcggacatcatcatgatggaggacctgcctggtctagccccaggcccagcccccagcccagcccccagccccacagtagcccctgacccagccccagacgcctaccgtccagtggggctgaccaaggccgtgctgtccctgcacacgcagaaggaagagcaagccttcctcagccgcttccgagacctgggcaggctgcgtggactcgacagctcttccacagctccctcagcccttggcgagcgagggtagccacctggggcctcctggagcctgccctctgcccagtctaggactggattgttggggggtgggtcttaagggaggtgtttctgctccagggacccaggctggtgttgcttccaccactaggccctgcctagggacaggcccctcgctagcttctccccactaggatggggttccgggctgcagccagaggagggcagcctggggggatggcactgggatgggcaggcagaggtgctgtctccaggtaagcgacttcaggcctagcctgggggcaggggcaggaagtatgcccacttaggagtcagttgtcactgatgaagagacatgcatagattctgggccaactctgggtggggtctgggcttcaagggcaggtggaaggcagcccctccaggtgcctgagggagatcccctgcaggcagacgcaggactcaggactgggctttccagccccactcttcactccattgcaagctaggcagaatacggcctcgatgggcaggaggaatgcctaggctggcagtgcccacaggagtttggcggaccagagccatctgtccatgtgtccatggactcaccctgcttcctccatctgccagcatgcctccatcttccgcacacccccagctcgacccctcgtgtaacctctccctggccttgttcctttctcaataaatccccttgtccctggctcctgtgattcttccctgaaggtgccccacctcctgagtcccccgttctgtgtgggttgagaagctctctctgggaccttggcctgtcctctccctggtcagcgtgtcagggcagtgtgggtagcaggggtactaaccccaggttgaggtccttgctaaccctagtctctccccacaggctgccaccacggccccgcacccccaagccgccgacaccactgccgatccaaagccaagcgctcacgccaccaccagaaccctcgggctgaagcgccctgctatgtctcacacccctcacccgtgccaccctccaccccctggcccaccccaccagccactacccccttcccagcggttgtccagccctaccctctcccagtgttctctcctcgaggaggcccccagcctcttccccctgctcccacatctgtgcccccagctgctttccccgcccctttggtgaccccaatggtggccttggtgctccctaactatctgttcccaaccccatccagctatccttatggggcactccagacccctgctgaagggcctcccactcctgcctcgcactccccttctccatccttgcccgccctccccccgagtcctcctcaccgcccggactctccactgttcaactcgagatgcagctctccactccagctcaatctgctgcagctggaggagctcccccgtgctgagggggctgctgttgcaggaggccctgggagcagtgccgggcccccacctcccagtgcggaggctgctgagccagaggccagactggcggaggtcactgagtcctccaatcaggacgcactttccggctccagtgacctgctcgaacttctgctgcaagaggactcgcgctccggcacaggctccgcagcctcgggctccttgggctctggcttgggctctgggtctggttcaggctcccatgaagggggcagcacctcagccagcatcactcgcagcagccagagcagccacacaagcaaatactttggcagcatcgactcttccgaggctgaggctggggctgctcggggcggggctgagcctggggaccaggtgattaagtacgtgctccaggatcccatttggctgctcatggccaatgctgaccagcgcgtcatgatgacctaccaggtgccctccagggacatgacctctgtgctgaagcaggatcgggagcggctccgagccatgcagaagcagcagcctcggttttctgaggaccagcggcgggaactgggtgctgtgcactcctgggtccggaagggccaactgcctcgggctcttgatgtgatggcctgtgtggactgtgggagcagcacccaagatcctggtcaccctgatgacccactcttctcagagctggatggactggggctggagcccatggaagagggtggaggcgagcagggcagcagcggtggcggcagtggtgagggagagggctgcgaggaggcccaaggcggggccaaggcttcaagctctcaggacttggctatggaggaggaggaagaaggcaggagctcatccagtccagccttacctacagcaggaaactgcaccagctagactccattctgggaccatctccaggagtccatgagaggctttcttctcctatgtcccaattctcagaactcagatgtggctagaccaaccagtgggaaactgccccagcttctcccaccatagggggccggacccccatcaccagcctaggatccaggggctgcctctggcctcttagggagcagagagcagaactccgcagcccagcccagaggagtgtcacctcccacctttggagaggaatccttccctcccctggacaaagttgctgacaagctgctgaagtggcctctccatattccagctgagcctgaatctgactcttgagggttggggctgcacttatttattgcggggagacagctctctctcccacctcctccccagatgggaggagagcctgaggcccaagcaggacccgggggttccagcccctagctgctctggagtgggggaggttggtggaccatggagtccctggtgctgcccctcaggtgggacccaggcgttctcagctgtaccctctgccgatggcatttgtgtttttgatatttgtgtctgttactacttttttaatacaaaaagataaaaacgc

SEQ ID NO: 8721 - DNA, 5398 bp, Homo sapiens
atgcaacccgcctccccgcccgcccggtggagcttccactcggctgcgggctggagcggcggcgggcaggcgtgcggaggacactcctgcgaccaggtactggctgtgatcgaacttctcaaccctcagagacttagatcttccacctcactccctcagccaagcctccaggccccctcgtgcatccgtggtggcctctctgccttctctgttctgttctccccatggcccagacatgagtggccccctagaaggggctgatgggggaggggaccccaggcctggggaatcattttgtcctgggggcgtcccatcccctgggcccccacagcaccggccttgcccaggccccagcctggccgatgacaccgatgccaacagcaatggttcaagtggcaatgagtccaacgggcatgagtctagaggcgcatctcagcggagctcacacagctcctcctcaggcaacggcaaggactcagccctgctggagaccactgagagcagcaagagcacaaactctcagagcccatccccacccagcagttccattgcctacagcctcctgagtgccagctcagagcaggacaacccgtccaccagtggctgcagcagtgaacagtcagcccgggcaaggactcagaaggaactcatgacagcacttcgagagctcaagcttcgactgccgccagagcgccggggcaagggccgctctgggaccctggccacgctgcagtacgcactggcctgtgtcaagcaggtgcaggccaaccaggaatactaccagcagtggagcctggaggagggcgagccttgctccatggacatgtccacctataccctggaggagctggagcacatcacgtctgagtacacacttcagaaccaggataccttctcagtggctgtctccttcctgacgggccgaatcgtctacatttcggagcaggcagccgtcctgctgcgttgcaagcgggacgtgttccggggtacccgcttctctgagctcctggctccccaggatgtgggagtcttctatggttccactgctccatctcgcctgcccacctggggcacaggggcctcagcaggttcaggcctcagggactttacccaggagaagtccgtcttctgccgtatcagaggaggtcctgaccgggatccagggcctcggtaccagccattccgcctaaccccgtatgtgaccaagatccgggtctcagatggggcccctgcacagccgtgctgcctgctgattgcagagcgcatccattcgggttacgaagctccccggataccccctgacaagaggattttcactacgcggcacacacccagctgcctcttccaggatgtggatgaaagggctgcccccctgctgggctacctgccccaggacctcctgggggccccagtgctcctgttcctgcatcctgaggaccgacccctcatgctggctatccacaagaagattctgcagttggcgggccagccctttgaccactcccctatccgcttctgtgcccgcaacggggagtatgtcaccatggacaccagctgggctggctttgtgcacccctggagccgcaaggtagccttcgtgttgggccgccacaaagtacgcacggcccccctgaatgaggacgtgttcactcccccggcccccagcccagctccctccctggacactgatatccaggagctgtcagagcagatccaccggctgctgctgcagcccgtccacagccccagccccacgggactctgtggagtcggcgccgtgacatccccaggccctctccacagccctgggtcctccagtgatagcaacgggggtgatgcagaggggcctgggcctcctgcgccagtgactttccagcagatctgtaaggatgtgcatctggtgaagcaccagggccagcagctttttattgagtctcgggcccggcctcagtcccggccccgcctccctgctacaggcacgttcaaggccaaggcccttccctgccaatccccagacccagagctggaggcgggttctgctcccgtccaggccccactagccttggtccctgaggaggccgagaggaaagaagcctccagctgctcctaccagcagatcaactgcctggacagcatcctcaggtacctggagagctgcaacctccccagcaccactaagcgtaaatgtgcctcctcctcctcctataccacctcctcagcctctgacgacgacaggcagaggacaggtccagtctctgtggggaccaagaaagacatcatcatgatggaggacctgcctggtctagccccaggcccagcccccagcccagcccccagccccacagtagcccctgacccagccccagacgcctaccgtccagtggggctgaccaaggccgtgctgtccctgcacacgcagaaggaagagcaagccttcctcagccgcttccgagacctgggcaggctgcgtggactcgacagctcttccacagctccctcagcccttggcgagcgagggtagccacctggggcctcctggagcctgccctctgcccagtctaggactggattgttggggggtgggtcttaagggaggtgtttctgctccagggacccaggctggtgttgcttccaccactaggccctgcctagggacaggcccctcgctagcttctccccactaggatggggttccgggctgcagccagaggagggcagcctggggggatggcactgggatgggcaggcagaggtgctgtctccaggtaagcgacttcaggcctagcctgggggcaggggcaggaagtatgcccacttaggagtcagttgtcactgatgaagagacatgcatagattctgggccaactctgggtggggtctgggcttcaagggcaggtggaaggcagcccctccaggtgcctgagggagatcccctgcaggcagacgcaggactcaggactgggctttccagccccactcttcactccattgcaagctaggcagaatacggcctcgatgggcaggaggaatgcctaggctggcagtgcccacaggagtttggcggaccagagccatctgtccatgtgtccatggactcaccctgcttcctccatctgccagcatgcctccatcttccgcacacccccagctcgacccctcgtgtaacctctccctggccttgttcctttctcaataaatccccttgtccctggctcctgtgattcttccctgaaggtgccccacctcctgagtcccccgttctgtgtgggttgagaagctctctctgggaccttggcctgtcctctccctggtcagcgtgtcagggcagtgtgggtagcaggggtactaaccccaggttgaggtccttgctaaccctagtctctccccacaggctgccaccacggccccgcacccccaagccgccgacaccactgccgatccaaagccaagcgctcacgccaccaccagaaccctcgggctgaagcgccctgctatgtctcacacccctcacccgtgccaccctccaccccctggcccaccccaccagccactacccccttcccagcggttgtccagccctaccctctcccagtgttctctcctcgaggaggcccccagcctcttccccctgctcccacatctgtgcccccagctgctttccccgcccctttggtgaccccaatggtggccttggtgctccctaactatctgttcccaaccccatccagctatccttatggggcactccagacccctgctgaagggcctcccactcctgcctcgcactccccttctccatccttgcccgccctccccccgagtcctcctcaccgcccggactctccactgttcaactcgagatgcagctctccactccagctcaatctgctgcagctggaggagctcccccgtgctgagggggctgctgttgcaggaggccctgggagcagtgccgggcccccacctcccagtgcggaggctgctgagccagaggccagactggcggaggtcactgagtcctccaatcaggacgcactttccggctccagtgacctgctcgaacttctgctgcaagaggactcgcgctccggcacaggctccgcagcctcgggctccttgggctctggcttgggctctgggtctggttcaggctcccatgaagggggcagcacctcagccagcatcactcgcagcagccagagcagccacacaagcaaatactttggcagcatcgactcttccgaggctgaggctggggctgctcggggcggggctgagcctggggaccaggtgattaagtacgtgctccaggatcccatttggctgctcatggccaatgctgaccagcgcgtcatgatgacctaccaggtgccctccagggacatgacctctgtgctgaagcaggatcgggagcggctccgagccatgcagaagcagcagcctcggttttctgaggaccagcggcgggaactgggtgctgtgcactcctgggtccggaagggccaactgcctcgggctcttgatgtgatggcctgtgtggactgtgggagcagcacccaagatcctggtcaccctgatgacccactcttctcagagctggatggactggggctggagcccatggaagagggtggaggcgagcagggcagcagcggtggcggcagtggtgagggagagggctgcgaggaggcccaaggcggggccaaggcttcaagctctcaggacttggctatggaggaggaggaagaaggcaggagctcatccagtccagccttacctacagcaggaaactgcaccagctagactccattctgggaccatctccaggagtccatgagaggctttcttctcctatgtcccaattctcagaactcagatgtggctagaccaaccagtgggaaactgccccagcttctcccaccatagggggccggacccccatcaccagcctaggatccaggggctgcctctggcctcttagggagcagagagcagaactccgcagcccagcccagaggagtgtcacctcccacctttggagaggaatccttccctcccctggacaaagttgctgacaagctgctgaagtggcctctccatattccagctgagcctgaatctgactcttgagggttggggctgcacttatttattgcggggagacagctctctctcccacctcctccccagatgggaggagagcctgaggcccaagcaggacccgggggttccagcccctagctgctctggagtgggggaggttggtggaccatggagtccctggtgctgcccctcaggtgggacccaggcgttctcagctgtaccctctgccgatggcatttgtgtttttgatatttgtgtctgttactacttttttaatacaaaaagataaaaacgc

SEQ ID NO: 8722 - DNA, 5157 bp, Homo sapiens
agtgtaatgctagaagtcctagaagaaatttggagtgtgcgtgcgcgccgagcggtactggctgtgatcgaacttctcaaccctcagagacttagatcttccacctcactccctcagccaagcctccaggccccctcgtgcatccgtggtggcctctctgccttctctgttctgttctccccatggcccagacatgagtggccccctagaaggggctgatgggggaggggaccccaggcctggggaatcattttgtcctgggggcgtcccatcccctgggcccccacagcaccggccttgcccaggccccagcctggccgatgacaccgatgccaacagcaatggttcaagtggcaatgagtccaacgggcatgagtctagaggcgcatctcagcggagctcacacagctcctcctcaggcaacggcaaggactcagccctgctggagaccactgagagcagcaagagcacaaactctcagagcccatccccacccagcagttccattgcctacagcctcctgagtgccagctcagagcaggacaacccgtccaccagtggctgcagcagtgaacagtcagcccgggcaaggactcagaaggaactcatgacagcacttcgagagctccatctcgcctgcccacctggggcacaggggcctcagcaggttcaggcctcagggactttacccaggagaagtccgtcttctgccgtatcagaggaggtcctgaccgggatccagggcctcggtaccagccattccgcctaaccccgtatgtgaccaagatccgggtctcagatggggcccctgcacagccgtgctgcctgctgattgcagagcgcatccattcgggttacgaagctccccggataccccctgacaagaggattttcactacgcggcacacacccagctgcctcttccaggatgtggatgaaagggctgcccccctgctgggctacctgccccaggacctcctgggggccccagtgctcctgttcctgcatcctgaggaccgacccctcatgctggctatccacaagaagattctgcagttggcgggccagccctttgaccactcccctatccgcttctgtgcccgcaacggggagtatgtcaccatggacaccagctgggctggctttgtgcacccctggagccgcaaggtagccttcgtgttgggccgccacaaagtacgcacggcccccctgaatgaggacgtgttcactcccccggcccccagcccagctccctccctggacactgatatccaggagctgtcagagcagatccaccggctgctgctgcagcccgtccacagccccagccccacgggactctgtggagtcggcgccgtgacatccccaggccctctccacagccctgggtcctccagtgatagcaacgggggtgatgcagaggggcctgggcctcctgcgccagtgactttccagcagatctgtaaggatgtgcatctggtgaagcaccagggccagcagctttttattgagtctcgggcccggcctcagtcccggccccgcctccctgctacaggcacgttcaaggccaaggcccttccctgccaatccccagacccagagctggaggcgggttctgctcccgtccaggccccactagccttggtccctgaggaggccgagaggaaagaagcctccagctgctcctaccagcagatcaactgcctggacagcatcctcaggtacctggagagctgcaacctccccagcaccactaagcgtaaatgtgcctcctcctcctcctataccacctcctcagcctctgacgacgacaggcagaggacaggtccagtctctgtggggaccaagaaagatccgccgtcagcagcgctgtctggggagggggccaccccacggaaggagccagtggtgggaggcaccctgagcccgctcgccctggccaataaggcggagagtgtggtgtccgtcaccagtcagtgtagcttcagctccaccatcgtccatgtgggagacaagaagcccccggagtcggacatcatcatgatggaggacctgcctggtctagccccaggcccagcccccagcccagcccccagccccacagtagcccctgacccagccccagacgcctaccgtccagtggggctgaccaaggccgtgctgtccctgcacacgcagaaggaagagcaagccttcctcagccgcttccgagacctgggcaggctgcgtggactcgacagctcttccacagctccctcagcccttggcgagcgagggtagccacctggggcctcctggagcctgccctctgcccagtctaggactggattgttggggggtgggtcttaagggaggtgtttctgctccagggacccaggctggtgttgcttccaccactaggccctgcctagggacaggcccctcgctagcttctccccactaggatggggttccgggctgcagccagaggagggcagcctggggggatggcactgggatgggcaggcagaggtgctgtctccaggtaagcgacttcaggcctagcctgggggcaggggcaggaagtatgcccacttaggagtcagttgtcactgatgaagagacatgcatagattctgggccaactctgggtggggtctgggcttcaagggcaggtggaaggcagcccctccaggtgcctgagggagatcccctgcaggcagacgcaggactcaggactgggctttccagccccactcttcactccattgcaagctaggcagaatacggcctcgatgggcaggaggaatgcctaggctggcagtgcccacaggagtttggcggaccagagccatctgtccatgtgtccatggactcaccctgcttcctccatctgccagcatgcctccatcttccgcacacccccagctcgacccctcgtgtaacctctccctggccttgttcctttctcaataaatccccttgtccctggctcctgtgattcttccctgaaggtgccccacctcctgagtcccccgttctgtgtgggttgagaagctctctctgggaccttggcctgtcctctccctggtcagcgtgtcagggcagtgtgggtagcaggggtactaaccccaggttgaggtccttgctaaccctagtctctccccacaggctgccaccacggccccgcacccccaagccgccgacaccactgccgatccaaagccaagcgctcacgccaccaccagaaccctcgggctgaagcgccctgctatgtctcacacccctcacccgtgccaccctccaccccctggcccaccccaccagccactacccccttcccagcggttgtccagccctaccctctcccagtgttctctcctcgaggaggcccccagcctcttccccctgctcccacatctgtgcccccagctgctttccccgcccctttggtgaccccaatggtggccttggtgctccctaactatctgttcccaaccccatccagctatccttatggggcactccagacccctgctgaagggcctcccactcctgcctcgcactccccttctccatccttgcccgccctccccccgagtcctcctcaccgcccggactctccactgttcaactcgagatgcagctctccactccagctcaatctgctgcagctggaggagctcccccgtgctgagggggctgctgttgcaggaggccctgggagcagtgccgggcccccacctcccagtgcggaggctgctgagccagaggccagactggcggaggtcactgagtcctccaatcaggacgcactttccggctccagtgacctgctcgaacttctgctgcaagaggactcgcgctccggcacaggctccgcagcctcgggctccttgggctctggcttgggctctgggtctggttcaggctcccatgaagggggcagcacctcagccagcatcactcgcagcagccagagcagccacacaagcaaatactttggcagcatcgactcttccgaggctgaggctggggctgctcggggcggggctgagcctggggaccaggtgattaagtacgtgctccaggatcccatttggctgctcatggccaatgctgaccagcgcgtcatgatgacctaccaggtgccctccagggacatgacctctgtgctgaagcaggatcgggagcggctccgagccatgcagaagcagcagcctcggttttctgaggaccagcggcgggaactgggtgctgtgcactcctgggtccggaagggccaactgcctcgggctcttgatgtgatggcctgtgtggactgtgggagcagcacccaagatcctggtcaccctgatgacccactcttctcagagctggatggactggggctggagcccatggaagagggtggaggcgagcagggcagcagcggtggcggcagtggtgagggagagggctgcgaggaggcccaaggcggggccaaggcttcaagctctcaggacttggctatggaggaggaggaagaaggcaggagctcatccagtccagccttacctacagcaggaaactgcaccagctagactccattctgggaccatctccaggagtccatgagaggctttcttctcctatgtcccaattctcagaactcagatgtggctagaccaaccagtgggaaactgccccagcttctcccaccatagggggccggacccccatcaccagcctaggatccaggggctgcctctggcctcttagggagcagagagcagaactccgcagcccagcccagaggagtgtcacctcccacctttggagaggaatccttccctcccctggacaaagttgctgacaagctgctgaagtggcctctccatattccagctgagcctgaatctgactcttgagggttggggctgcacttatttattgcggggagacagctctctctcccacctcctccccagatgggaggagagcctgaggcccaagcaggacccgggggttccagcccctagctgctctggagtgggggaggttggtggaccatggagtccctggtgctgcccctcaggtgggacccaggcgttctcagctgtaccctctgccgatggcatttgtgtttttgatatttgtgtctgttactacttttttaatacaaaaagataaaaacgc

SEQ ID NO: 8723 - DNA, 5095 bp, Homo sapiens
atgcaacccgcctccccgcccgcccggtggagcttccactcggctgcgggctggagcggcggcgggcaggcgtgcggaggacactcctgcgaccaggtactggctgtgatcgaacttctcaaccctcagagacttagatcttccacctcactccctcagccaagcctccaggccccctcgtgcatccgtggtggcctctctgccttctctgttctgttctccccatggcccagacatgagtggccccctagaaggggctgatgggggaggggaccccaggcctggggaatcattttgtcctgggggcgtcccatcccctgggcccccacagcaccggccttgcccaggccccagcctggccgatgacaccgatgccaacagcaatggttcaagtggcaatgagtccaacgggcatgagtctagaggcgcatctcagcggagctcacacagctcctcctcaggcaacggcaaggactcagccctgctggagaccactgagagcagcaagagcacaaactctcagagcccatccccacccagcagttccattgcctacagcctcctgagtgccagctcagagcaggacaacccgtccaccagtggctgcagcagtgaacagtcagcccgggcaaggactcagaaggaactcatgacagcacttcgagagctcaagcttcgactgccgccagagcgccggggcaagggccgctctgggaccctggccacgctgcagtacgcactggcctgtgtcaagcaggtgcaggccaaccaggaatactaccagcagtggagcctggaggagggcgagccttgctccatggacatgtccacctataccctggaggagctggagcacatcacgtctgagtacacacttcagaaccaggataccttctcagtggctgtctccttcctgacgggccgaatcgtctacatttcggagcaggcagccgtcctgctgcgttgcaagcgggacgtgttccggggtacccgcttctctgagctcctggctccccaggatgtgggagtcttctatggttccactgctccatctcgcctgcccacctggggcacaggggcctcagcaggttcaggcctcagggactttacccaggagaagtccgtcttctgccgtatcagaggaggtcctgaccgggatccagggcctcggtaccagccattccgcctaaccccgtatgtgaccaagatccgggtctcagatggggcccctgcacagccgtgctgcctgctgattgcagagcgcatccattcgggttacgaagctccccggataccccctgacaagaggattttcactacgcggcacacacccagctgcctcttccaggatgtggatgaaagggctgcccccctgctgggctacctgccccaggacctcctgggggccccagtgctcctgttcctgcatcctgaggaccgacccctcatgctggctatccacaagaagattctgcagttggcgggccagccctttgaccactcccctatccgcttctgtgcccgcaacggggagtatgtcaccatggacaccagctgggctggctttgtgcacccctggagccgcaaggtagccttcgtgttgggccgccacaaagtacgcacggcccccctgaatgaggacgtgttcactcccccggcccccagcccagctccctccctggacactgatatccaggagctgtcagagcagatccaccggctgctgctgcagcccgtccacagccccagccccacgggactctgtggagtcggcgccgtgacatccccaggccctctccacagccctgggtcctccagtgatagcaacgggggtgatgcagaggggcctgggcctcctgcgccagtgactttccagcagatctgtaaggatgtgcatctggtgaagcaccagggccagcagctttttattgagtctcgggcccggcctcagtcccggccccgcctccctgctacaggcacgttcaaggccaaggcccttccctgccaatccccagacccagagctggaggcgggttctgctcccgtccaggccccactagccttggtccctgaggaggccgagaggaaagaagcctccagctgctcctaccagcagatcaactgcctggacagcatcctcaggtacctggagagctgcaacctccccagcaccactaagcgtaaatgtgcctcctcctcctcctataccacctcctcagcctctgacgacgacaggcagaggacaggtccagtctctgtggggaccaagaaagatccgccgtcagcagcgctgtctggggagggggccaccccacggaaggagccagtggtgggaggcaccctgagcccgctcgccctggccaataaggcggagagtgtggtgtccgtcaccagtcagtgtagcttcagctccaccatcgtccatgtgggagacaagaagcccccggagtcggacatcatcatgatggaggacctgcctggtctagccccaggcccagcccccagcccagcccccagccccacagtagcccctgacccagccccagacgcctaccgtccagtggggctgaccaaggccgtgctgtccctgcacacgcagaaggaagagcaagccttcctcagccgcttccgagacctgggcaggctgcgtggactcgacagctcttccacagctccctcagcccttggcgagcgaggcagaatacggcctcgatgggcaggaggaatgcctaggctggcagtgcccacaggagtttggcggaccagagccatctgtccatgtgtccatggactcaccctgcttcctccatctgccagcatgcctccatcttccgcacacccccagctcgacccctcgtgtaacctctccctggccttgttcctttctcaataaatccccttgtccctggctcctgtgattcttccctgaaggtgccccacctcctgagtcccccgttctgtgtgggttgagaagctctctctgggaccttggcctgtcctctccctggtcagcgtgtcagggcagtgtgggtagcaggggtactaaccccaggttgaggtccttgctaaccctagtctctccccacaggctgccaccacggccccgcacccccaagccgccgacaccactgccgatccaaagccaagcgctcacgccaccaccagaaccctcgggctgaagcgccctgctatgtctcacacccctcacccgtgccaccctccaccccctggcccaccccaccagccactacccccttcccagcggttgtccagccctaccctctcccagtgttctctcctcgaggaggcccccagcctcttccccctgctcccacatctgtgcccccagctgctttccccgcccctttggtgaccccaatggtggccttggtgctccctaactatctgttcccaaccccatccagctatccttatggggcactccagacccctgctgaagggcctcccactcctgcctcgcactccccttctccatccttgcccgccctccccccgagtcctcctcaccgcccggactctccactgttcaactcgagatgcagctctccactccagctcaatctgctgcagctggaggagctcccccgtgctgagggggctgctgttgcaggaggccctgggagcagtgccgggcccccacctcccagtgcggaggctgctgagccagaggccagactggcggaggtcactgagtcctccaatcaggacgcactttccggctccagtgacctgctcgaacttctgctgcaagaggactcgcgctccggcacaggctccgcagcctcgggctccttgggctctggcttgggctctgggtctggttcaggctcccatgaagggggcagcacctcagccagcatcactcgcagcagccagagcagccacacaagcaaatactttggcagcatcgactcttccgaggctgaggctggggctgctcggggcggggctgagcctggggaccaggtgattaagtacgtgctccaggatcccatttggctgctcatggccaatgctgaccagcgcgtcatgatgacctaccaggtgccctccagggacatgacctctgtgctgaagcaggatcgggagcggctccgagccatgcagaagcagcagcctcggttttctgaggaccagcggcgggaactgggtgctgtgcactcctgggtccggaagggccaactgcctcgggctcttgatgtgatggcctgtgtggactgtgggagcagcacccaagatcctggtcaccctgatgacccactcttctcagagctggatggactggggctggagcccatggaagagggtggaggcgagcagggcagcagcggtggcggcagtggtgagggagagggctgcgaggaggcccaaggcggggccaaggcttcaagctctcaggacttggctatggaggaggaggaagaaggcaggagctcatccagtccagccttacctacagcaggaaactgcaccagctagactccattctgggaccatctccaggagtccatgagaggctttcttctcctatgtcccaattctcagaactcagatgtggctagaccaaccagtgggaaactgccccagcttctcccaccatagggggccggacccccatcaccagcctaggatccaggggctgcctctggcctcttagggagcagagagcagaactccgcagcccagcccagaggagtgtcacctcccacctttggagaggaatccttccctcccctggacaaagttgctgacaagctgctgaagtggcctctccatattccagctgagcctgaatctgactcttgagggttggggctgcacttatttattgcggggagacagctctctctcccacctcctccccagatgggaggagagcctgaggcccaagcaggacccgggggttccagcccctagctgctctggagtgggggaggttggtggaccatggagtccctggtgctgcccctcaggtgggacccaggcgttctcagctgtaccctctgccgatggcatttgtgtttttgatatttgtgtctgttactacttttttaatacaaaaagataaaaacgc

SEQ ID NO: 8724 - DNA, 4641 bp, Homo sapiens
ctcgaactcctgacctcaggtgatccgcctgccttggcctcccaaagtgctgggattaaaggcgtgagccaccgtgcccggcctacctctgcctcctcctgccccctccccagcgtctttgctgttgtctgctgtgaccttattgttggaggagtgggtggctctctgttgaaagtccctaatgctcctctctcctttgctagaggaggtcctgaccgggatccagggcctcggtaccagccattccgcctaaccccgtatgtgaccaagatccgggtctcagatggggcccctgcacagccgtgctgcctgctgattgcagagcgcatccattcgggttacgaagctccccggataccccctgacaagaggattttcactacgcggcacacacccagctgcctcttccaggatgtggatgaaagggctgcccccctgctgggctacctgccccaggacctcctgggggccccagtgctcctgttcctgcatcctgaggaccgacccctcatgctggctatccacaagaagattctgcagttggcgggccagccctttgaccactcccctatccgcttctgtgcccgcaacggggagtatgtcaccatggacaccagctgggctggctttgtgcacccctggagccgcaaggtagccttcgtgttgggccgccacaaagtacgcacggcccccctgaatgaggacgtgttcactcccccggcccccagcccagctccctccctggacactgatatccaggagctgtcagagcagatccaccggctgctgctgcagcccgtccacagccccagccccacgggactctgtggagtcggcgccgtgacatccccaggccctctccacagccctgggtcctccagtgatagcaacgggggtgatgcagaggggcctgggcctcctgcgccagtgactttccagcagatctgtaaggatgtgcatctggtgaagcaccagggccagcagctttttattgagtctcgggcccggcctcagtcccggccccgcctccctgctacaggcacgttcaaggccaaggcccttccctgccaatccccagacccagagctggaggcgggttctgctcccgtccaggccccactagccttggtccctgaggaggccgagaggaaagaagcctccagctgctcctaccagcagatcaactgcctggacagcatcctcaggtacctggagagctgcaacctccccagcaccactaagcgtaaatgtgcctcctcctcctcctataccacctcctcagcctctgacgacgacaggcagaggacaggtccagtctctgtggggaccaagaaagatccgccgtcagcagcgctgtctggggagggggccaccccacggaaggagccagtggtgggaggcaccctgagcccgctcgccctggccaataaggcggagagtgtggtgtccgtcaccagtcagtgtagcttcagctccaccatcgtccatgtgggagacaagaagcccccggagtcggacatcatcatgatggaggacctgcctggtctagccccaggcccagcccccagcccagcccccagccccacagtagcccctgacccagccccagacgcctaccgtccagtggggctgaccaaggccgtgctgtccctgcacacgcagaaggaagagcaagccttcctcagccgcttccgagacctgggcaggctgcgtggactcgacagctcttccacagctccctcagcccttggcgagcgagggtagccacctggggcctcctggagcctgccctctgcccagtctaggactggattgttggggggtgggtcttaagggaggtgtttctgctccagggacccaggctggtgttgcttccaccactaggccctgcctagggacaggcccctcgctagcttctccccactaggatggggttccgggctgcagccagaggagggcagcctggggggatggcactgggatgggcaggcagaggtgctgtctccaggtaagcgacttcaggcctagcctgggggcaggggcaggaagtatgcccacttaggagtcagttgtcactgatgaagagacatgcatagattctgggccaactctgggtggggtctgggcttcaagggcaggtggaaggcagcccctccaggtgcctgagggagatcccctgcaggcagacgcaggactcaggactgggctttccagccccactcttcactccattgcaagctaggcagaatacggcctcgatgggcaggaggaatgcctaggctggcagtgcccacaggagtttggcggaccagagccatctgtccatgtgtccatggactcaccctgcttcctccatctgccagcatgcctccatcttccgcacacccccagctcgacccctcgtgtaacctctccctggccttgttcctttctcaataaatccccttgtccctggctcctgtgattcttccctgaaggtgccccacctcctgagtcccccgttctgtgtgggttgagaagctctctctgggaccttggcctgtcctctccctggtcagcgtgtcagggcagtgtgggtagcaggggtactaaccccaggttgaggtccttgctaaccctagtctctccccacaggctgccaccacggccccgcacccccaagccgccgacaccactgccgatccaaagccaagcgctcacgccaccaccagaaccctcgggctgaagcgccctgctatgtctcacacccctcacccgtgccaccctccaccccctggcccaccccaccagccactacccccttcccagcggttgtccagccctaccctctcccagtgttctctcctcgaggaggcccccagcctcttccccctgctcccacatctgtgcccccagctgctttccccgcccctttggtgaccccaatggtggccttggtgctccctaactatctgttcccaaccccatccagctatccttatggggcactccagacccctgctgaagggcctcccactcctgcctcgcactccccttctccatccttgcccgccctccccccgagtcctcctcaccgcccggactctccactgttcaactcgagatgcagctctccactccagctcaatctgctgcagctggaggagctcccccgtgctgagggggctgctgttgcaggaggccctgggagcagtgccgggcccccacctcccagtgcggaggctgctgagccagaggccagactggcggaggtcactgagtcctccaatcaggacgcactttccggctccagtgacctgctcgaacttctgctgcaagaggactcgcgctccggcacaggctccgcagcctcgggctccttgggctctggcttgggctctgggtctggttcaggctcccatgaagggggcagcacctcagccagcatcactcgcagcagccagagcagccacacaagcaaatactttggcagcatcgactcttccgaggctgaggctggggctgctcggggcggggctgagcctggggaccaggtgattaagtacgtgctccaggatcccatttggctgctcatggccaatgctgaccagcgcgtcatgatgacctaccaggtgccctccagggacatgacctctgtgctgaagcaggatcgggagcggctccgagccatgcagaagcagcagcctcggttttctgaggaccagcggcgggaactgggtgctgtgcactcctgggtccggaagggccaactgcctcgggctcttgatgtgatggcctgtgtggactgtgggagcagcacccaagatcctggtcaccctgatgacccactcttctcagagctggatggactggggctggagcccatggaagagggtggaggcgagcagggcagcagcggtggcggcagtggtgagggagagggctgcgaggaggcccaaggcggggccaaggcttcaagctctcaggacttggctatggaggaggaggaagaaggcaggagctcatccagtccagccttacctacagcaggaaactgcaccagctagactccattctgggaccatctccaggagtccatgagaggctttcttctcctatgtcccaattctcagaactcagatgtggctagaccaaccagtgggaaactgccccagcttctcccaccatagggggccggacccccatcaccagcctaggatccaggggctgcctctggcctcttagggagcagagagcagaactccgcagcccagcccagaggagtgtcacctcccacctttggagaggaatccttccctcccctggacaaagttgctgacaagctgctgaagtggcctctccatattccagctgagcctgaatctgactcttgagggttggggctgcacttatttattgcggggagacagctctctctcccacctcctccccagatgggaggagagcctgaggcccaagcaggacccgggggttccagcccctagctgctctggagtgggggaggttggtggaccatggagtccctggtgctgcccctcaggtgggacccaggcgttctcagctgtaccctctgccgatggcatttgtgtttttgatatttgtgtctgttactacttttttaatacaaaaagataaaaacgc

SEQ ID NO: 8725 - DNA, 4222 bp, Homo sapiens
atgcaacccgcctccccgcccgcccggtggagcttccactcggctgcgggctggagcggcggcgggcaggcgtgcggaggacactcctgcgaccaggtactggctgtgatcgaacttctcaaccctcagagacttagatcttccacctcactccctcagccaagcctccaggccccctcgtgcatccgtggtggcctctctgccttctctgttctgttctccccatggcccagacatgagtggccccctagaaggggctgatgggggaggggaccccaggcctggggaatcattttgtcctgggggcgtcccatcccctgggcccccacagcaccggccttgcccaggccccagcctggccgatgacaccgatgccaacagcaatggttcaagtggcaatgagtccaacgggcatgagtctagaggcgcatctcagcggagctcacacagctcctcctcaggcaacggcaaggactcagccctgctggagaccactgagagcagcaagagcacaaactctcagagcccatccccacccagcagttccattgcctacagcctcctgagtgccagctcagagcaggacaacccgtccaccagtggctgcagcagtgaacagtcagcccgggcaaggactcagaaggaactcatgacagcacttcgagagctggaggcgggttctgctcccgtccaggccccactagccttggtccctgaggaggccgagaggaaagaagcctccagctgctcctaccagcagatcaactgcctggacagcatcctcaggtacctggagagctgcaacctccccagcaccactaagcgtaaatgtgcctcctcctcctcctataccacctcctcagcctctgacgacgacaggcagaggacaggtccagtctctgtggggaccaagaaagatccgccgtcagcagcgctgtctggggagggggccaccccacggaaggagccagtggtgggaggcaccctgagcccgctcgccctggccaataaggcggagagtgtggtgtccgtcaccagtcagtgtagcttcagctccaccatcgtccatgtgggagacaagaagcccccggagtcggacatcatcatgatggaggacctgcctggtctagccccaggcccagcccccagcccagcccccagccccacagtagcccctgacccagccccagacgcctaccgtccagtggggctgaccaaggccgtgctgtccctgcacacgcagaaggaagagcaagccttcctcagccgcttccgagacctgggcaggctgcgtggactcgacagctcttccacagctccctcagcccttggcgagcgagggtagccacctggggcctcctggagcctgccctctgcccagtctaggactggattgttggggggtgggtcttaagggaggtgtttctgctccagggacccaggctggtgttgcttccaccactaggccctgcctagggacaggcccctcgctagcttctccccactaggatggggttccgggctgcagccagaggagggcagcctggggggatggcactgggatgggcaggcagaggtgctgtctccaggtaagcgacttcaggcctagcctgggggcaggggcaggaagtatgcccacttaggagtcagttgtcactgatgaagagacatgcatagattctgggccaactctgggtggggtctgggcttcaagggcaggtggaaggcagcccctccaggtgcctgagggagatcccctgcaggcagacgcaggactcaggactgggctttccagccccactcttcactccattgcaagctaggcagaatacggcctcgatgggcaggaggaatgcctaggctggcagtgcccacaggagtttggcggaccagagccatctgtccatgtgtccatggactcaccctgcttcctccatctgccagcatgcctccatcttccgcacacccccagctcgacccctcgtgtaacctctccctggccttgttcctttctcaataaatccccttgtccctggctcctgtgattcttccctgaaggtgccccacctcctgagtcccccgttctgtgtgggttgagaagctctctctgggaccttggcctgtcctctccctggtcagcgtgtcagggcagtgtgggtagcaggggtactaaccccaggttgaggtccttgctaaccctagtctctccccacaggctgccaccacggccccgcacccccaagccgccgacaccactgccgatccaaagccaagcgctcacgccaccaccagaaccctcgggctgaagcgccctgctatgtctcacacccctcacccgtgccaccctccaccccctggcccaccccaccagccactacccccttcccagcggttgtccagccctaccctctcccagtgttctctcctcgaggaggcccccagcctcttccccctgctcccacatctgtgcccccagctgctttccccgcccctttggtgaccccaatggtggccttggtgctccctaactatctgttcccaaccccatccagctatccttatggggcactccagacccctgctgaagggcctcccactcctgcctcgcactccccttctccatccttgcccgccctccccccgagtcctcctcaccgcccggactctccactgttcaactcgagatgcagctctccactccagctcaatctgctgcagctggaggagctcccccgtgctgagggggctgctgttgcaggaggccctgggagcagtgccgggcccccacctcccagtgcggaggctgctgagccagaggccagactggcggaggtcactgagtcctccaatcaggacgcactttccggctccagtgacctgctcgaacttctgctgcaagaggactcgcgctccggcacaggctccgcagcctcgggctccttgggctctggcttgggctctgggtctggttcaggctcccatgaagggggcagcacctcagccagcatcactcgcagcagccagagcagccacacaagcaaatactttggcagcatcgactcttccgaggctgaggctggggctgctcggggcggggctgagcctggggaccaggtgattaagtacgtgctccaggatcccatttggctgctcatggccaatgctgaccagcgcgtcatgatgacctaccaggtgccctccagggacatgacctctgtgctgaagcaggatcgggagcggctccgagccatgcagaagcagcagcctcggttttctgaggaccagcggcgggaactgggtgctgtgcactcctgggtccggaagggccaactgcctcgggctcttgatgtgatggcctgtgtggactgtgggagcagcacccaagatcctggtcaccctgatgacccactcttctcagagctggatggactggggctggagcccatggaagagggtggaggcgagcagggcagcagcggtggcggcagtggtgagggagagggctgcgaggaggcccaaggcggggccaaggcttcaagctctcaggacttggctatggaggaggaggaagaaggcaggagctcatccagtccagccttacctacagcaggaaactgcaccagctagactccattctgggaccatctccaggagtccatgagaggctttcttctcctatgtcccaattctcagaactcagatgtggctagaccaaccagtgggaaactgccccagcttctcccaccatagggggccggacccccatcaccagcctaggatccaggggctgcctctggcctcttagggagcagagagcagaactccgcagcccagcccagaggagtgtcacctcccacctttggagaggaatccttccctcccctggacaaagttgctgacaagctgctgaagtggcctctccatattccagctgagcctgaatctgactcttgagggttggggctgcacttatttattgcggggagacagctctctctcccacctcctccccagatgggaggagagcctgaggcccaagcaggacccgggggttccagcccctagctgctctggagtgggggaggttggtggaccatggagtccctggtgctgcccctcaggtgggacccaggcgttctcagctgtaccctctgccgatggcatttgtgtttttgatatttgtgtctgttactacttttttaatacaaaaagataaaaacgc

SEQ ID NO: 8726 - DNA, 3262 bp, Homo sapiens
acgtacatggagaccaggcttggctgtggggcagagctgccaggggttggctaggctatcagacagggagggtgtggtatggatgtgttgacccctgaagtggttctgatgacctttccctatctcactctcctcagacatcatcatgatggaggacctgcctggtctagccccaggcccagcccccagcccagcccccagccccacagtagcccctgacccagccccagacgcctaccgtccagtggggctgaccaaggccgtgctgtccctgcacacgcagaaggaagagcaagccttcctcagccgcttccgagacctgggcaggctgcgtggactcgacagctcttccacagctccctcagcccttggcgagcgagggtagccacctggggcctcctggagcctgccctctgcccagtctaggactggattgttggggggtgggtcttaagggaggtgtttctgctccagggacccaggctggtgttgcttccaccactaggccctgcctagggacaggcccctcgctagcttctccccactaggatggggttccgggctgcagccagaggagggcagcctggggggatggcactgggatgggcaggcagaggtgctgtctccaggtaagcgacttcaggcctagcctgggggcaggggcaggaagtatgcccacttaggagtcagttgtcactgatgaagagacatgcatagattctgggccaactctgggtggggtctgggcttcaagggcaggtggaaggcagcccctccaggtgcctgagggagatcccctgcaggcagacgcaggactcaggactgggctttccagccccactcttcactccattgcaagctaggcagaatacggcctcgatgggcaggaggaatgcctaggctggcagtgcccacaggagtttggcggaccagagccatctgtccatgtgtccatggactcaccctgcttcctccatctgccagcatgcctccatcttccgcacacccccagctcgacccctcgtgtaacctctccctggccttgttcctttctcaataaatccccttgtccctggctcctgtgattcttccctgaaggtgccccacctcctgagtcccccgttctgtgtgggttgagaagctctctctgggaccttggcctgtcctctccctggtcagcgtgtcagggcagtgtgggtagcaggggtactaaccccaggttgaggtccttgctaaccctagtctctccccacaggctgccaccacggccccgcacccccaagccgccgacaccactgccgatccaaagccaagcgctcacgccaccaccagaaccctcgggctgaagcgccctgctatgtctcacacccctcacccgtgccaccctccaccccctggcccaccccaccagccactacccccttcccagcggttgtccagccctaccctctcccagtgttctctcctcgaggaggcccccagcctcttccccctgctcccacatctgtgcccccagctgctttccccgcccctttggtgaccccaatggtggccttggtgctccctaactatctgttcccaaccccatccagctatccttatggggcactccagacccctgctgaagggcctcccactcctgcctcgcactccccttctccatccttgcccgccctccccccgagtcctcctcaccgcccggactctccactgttcaactcgagatgcagctctccactccagctcaatctgctgcagctggaggagctcccccgtgctgagggggctgctgttgcaggaggccctgggagcagtgccgggcccccacctcccagtgcggaggctgctgagccagaggccagactggcggaggtcactgagtcctccaatcaggacgcactttccggctccagtgacctgctcgaacttctgctgcaagaggactcgcgctccggcacaggctccgcagcctcgggctccttgggctctggcttgggctctgggtctggttcaggctcccatgaagggggcagcacctcagccagcatcactcgcagcagccagagcagccacacaagcaaatactttggcagcatcgactcttccgaggctgaggctggggctgctcggggcggggctgagcctggggaccaggtgattaagtacgtgctccaggatcccatttggctgctcatggccaatgctgaccagcgcgtcatgatgacctaccaggtgccctccagggacatgacctctgtgctgaagcaggatcgggagcggctccgagccatgcagaagcagcagcctcggttttctgaggaccagcggcgggaactgggtgctgtgcactcctgggtccggaagggccaactgcctcgggctcttgatgtgatggcctgtgtggactgtgggagcagcacccaagatcctggtcaccctgatgacccactcttctcagagctggatggactggggctggagcccatggaagagggtggaggcgagcagggcagcagcggtggcggcagtggtgagggagagggctgcgaggaggcccaaggcggggccaaggcttcaagctctcaggacttggctatggaggaggaggaagaaggcaggagctcatccagtccagccttacctacagcaggaaactgcaccagctagactccattctgggaccatctccaggagtccatgagaggctttcttctcctatgtcccaattctcagaactcagatgtggctagaccaaccagtgggaaactgccccagcttctcccaccatagggggccggacccccatcaccagcctaggatccaggggctgcctctggcctcttagggagcagagagcagaactccgcagcccagcccagaggagtgtcacctcccacctttggagaggaatccttccctcccctggacaaagttgctgacaagctgctgaagtggcctctccatattccagctgagcctgaatctgactcttgagggttggggctgcacttatttattgcggggagacagctctctctcccacctcctccccagatgggaggagagcctgaggcccaagcaggacccgggggttccagcccctagctgctctggagtgggggaggttggtggaccatggagtccctggtgctgcccctcaggtgggacccaggcgttctcagctgtaccctctgccgatggcatttgtgtttttgatatttgtgtctgttactacttttttaatacaaaaagataaaaacgc

SEQ ID NO: 8727 - DNA, 6011 bp, Homo sapiens
atgcaacccgcctccccgcccgcccggtggagcttccactcggctgcgggctggagcggcggcgggcaggcgtgcggaggacactcctgcgaccaggtactggctgtgatcgaacttctcaaccctcagagacttagatcttccacctcactccctcagccaagcctccaggccccctcgtgcatccgtggtggcctctctgccttctctgttctgttctccccatggcccagacatgagtggccccctagaaggggctgatgggggaggggaccccaggcctggggaatcattttgtcctgggggcgtcccatcccctgggcccccacagcaccggccttgcccaggccccagcctggccgatgacaccgatgccaacagcaatggttcaagtggcaatgagtccaacgggcatgagtctagaggcgcatctcagcggagctcacacagctcctcctcaggcaacggcaaggactcagccctgctggagaccactgagagcagcaagagcacaaactctcagagcccatccccacccagcagttccattgcctacagcctcctgagtgccagctcagagcaggacaacccgtccaccagtggctgcagcagtgaacagtcagcccgggcaaggactcagaaggaactcatgacagcacttcgagagctcaagcttcgactgccgccagagcgccggggcaagggccgctctgggaccctggccacgctgcagtacgcactggcctgtgtcaagcaggtgcaggccaaccaggaatactaccagcagtggagcctggaggagggcgagccttgctccatggacatgtccacctataccctggaggagctggagcacatcacgtctgagtacacacttcagaaccaggataccttctcagtggctgtctccttcctgacgggccgaatcgtctacatttcggagcaggcagccgtcctgctgcgttgcaagcgggacgtgttccggggtacccgcttctctgagctcctggctccccaggatgtgggagtcttctatggttccactgctccatctcgcctgcccacctggggcacaggggcctcagcaggttcaggcctcagggactttacccaggagaagtccgtcttctgccgtatcagaggaggtcctgaccgggatccagggcctcggtaccagccattccgcctaaccccgtatgtgaccaagatccgggtctcagatggggcccctgcacagccgtgctgcctgctgattgcagagcgcatccattcgggttacgaagctccccggataccccctgacaagaggattttcactacgcggcacacacccagctgcctcttccaggatgtggatgaaagggctgcccccctgctgggctacctgccccaggacctcctgggggccccagtgctcctgttcctgcatcctgaggaccgacccctcatgctggctatccacaagaagattctgcagttggcgggccagccctttgaccactcccctatccgcttctgtgcccgcaacggggagtatgtcaccatggacaccagctgggctggctttgtgcacccctggagccgcaaggtagccttcgtgttgggccgccacaaagtacgcacggcccccctgaatgaggacgtgttcactcccccggcccccagcccagctccctccctggacactgatatccaggagctgtcagagcagatccaccggctgctgctgcagcccgtccacagccccagccccacgggactctgtggagtcggcgccgtgacatccccaggccctctccacagccctgggtcctccagtgatagcaacgggggtgatgcagaggggcctgggcctcctgcgccagtgactttccagcagatctgtaaggatgtgcatctggtgaagcaccagggccagcagctttttattgagtctcgggcccggcctcagtcccggccccgcctccctgctacaggcacgttcaaggccaaggcccttccctgccaatccccagacccagagctggaggcgggttctgctcccgtccaggccccactagccttggtccctgaggaggccgagaggaaagaagcctccagctgctcctaccagcagatcaactgcctggacagcatcctcaggtacctggagagctgcaacctccccagcaccactaagcgtaaatgtgcctcctcctcctcctataccacctcctcagcctctgacgacgacaggcagaggacaggtccagtctctgtggggaccaagaaagatccgccgtcagcagcgctgtctggggagggggccaccccacggaaggagccagtggtgggaggcaccctgagcccgctcgccctggccaataaggcggagagtgtggtgtccgtcaccagtcagtgtagcttcagctccaccatcgtccatgtgggagacaagaagcccccggagtcggacatcatcatgatggaggacctgcctggtctagccccaggcccagcccccagcccagcccccagccccacagtagcccctgacccagccccagacgcctaccgtccagtggggctgaccaaggccgtgctgtccctgcacacgcagaaggaagagcaagccttcctcagccgcttccgagacctgggcaggctgcgtggactcgacagctcttccacagctccctcagcccttggcgagcgagggtagccacctggggcctcctggagcctgccctctgcccagtctaggactggattgttggggggtgggtcttaagggaggtgtttctgctccagggacccaggctggtgttgcttccaccactaggccctgcctagggacaggcccctcgctagcttctccccactaggatggggttccgggctgcagccagaggagggcagcctggggggatggcactgggatgggcaggcagaggtgctgtctccaggtaagcgacttcaggcctagcctgggggcaggggcaggaagtatgcccacttaggagtcagttgtcactgatgaagagacatgcatagattctgggccaactctgggtggggtctgggcttcaagggcaggtggaaggcagcccctccaggtgcctgagggagatcccctgcaggcagacgcaggactcaggactgggctttccagccccactcttcactccattgcaagctaggcagaatacggcctcgatgggcaggaggaatgcctaggctggcagtgcccacaggagtttggcggaccagagccatctgtccatgtgtccatggactcaccctgcttcctccatctgccagcatgcctccatcttccgcacacccccagctcgacccctcgtgtaacctctccctggccttgttcctttctcaataaatccccttgtccctggctcctgtgattcttccctgaaggtgccccacctcctgagtcccccgttctgtgtgggttgagaagctctctctgggaccttggcctgtcctctccctggtcagcgtgtcagggcagtgtgggtagcaggggtactaaccccaggttgaggtccttgctaaccctagtctctccccacaggctgccaccacggccccgcacccccaagccgccgacaccactgccgatccaaagccaagcgctcacgccaccaccagaaccctcgggctgaagcgccctgctatgtctcacacccctcacccgtgccaccctccaccccctggcccaccccaccagccactacccccttcccagcggttgtccagccctaccctctcccagtgttctctcctcgaggaggcccccagcctcttccccctgctcccacatctgtgcccccagctgctttccccgcccctttggtgaccccaatggtggccttggtgctccctaactatctgttcccaaccccatccagctatccttatggggcactccagacccctgctgaagggcctcccactcctgcctcgcactccccttctccatccttgcccgccctccccccgagtcctcctcaccgcccggactctccactgttcaactcgagatgcagctctccactccagctcaatctgctgcagctggaggagctcccccgtgctgagggggctgctgttgcaggaggccctgggagcagtgccgggcccccacctcccagtgcggaggctgctgagccagaggccagactggcggaggtcactgagtcctccaatcaggacgcactttccggctccagtgacctgctcgaacttctgctgcaagaggactcgcgctccggcacaggctccgcagcctcgggctccttgggctctggcttgggctctgggtctggttcaggctcccatgaagggggcagcacctcagccagcatcactcgcagcagccagagcagccacacaagcaaatactttggcagcatcgactcttccgaggctgaggctggggctgctcggggcggggctgagcctggggaccaggtgattaagtacgtgctccaggatcccatttggctgctcatggccaatgctgaccagcgcgtcatgatgacctaccaggtgccctccagggacatgacctctgtgctgaagcaggatcgggagcggctccgagccatgcagaagcagcagcctcggttttctgaggaccagcggcgggaactgggtgctgtgcactcctgggtccggaagggccaactgcctcgggctcttgatgtgatggtgagagaagcctgggacggggagaaaaaagaattgagctcaagttcaagggggagaaaaaaagaattgagctcaagttcaagggatcgaggccaagagctgatctccttgatgtccttggatcattaattctgaagaatgttgattccactaaatttgctgtggattatagaatattaagccgcgtgagtctttgcagaacttttcacagcctatcctatgctaatatgcattgtgactgtcctgtaacggcatctgggtagagggcacaaggcactgtccaaccttgttggaccgcaggtgcatctgtgtggactggtgcttcttgggagtacatttcgggaagcacagtgggctgggggtgggaagctgcgctggcaggttagcagtgagaaccctgtctgactctctcatgtccatttctctcaccaaggcctgtgtggactgtgggagcagcacccaagatcctggtcaccctgatgacccactcttctcagagctggatggactggggctggagcccatggaagagggtggaggcgagcagggcagcagcggtggcggcagtggtgagggagagggctgcgaggaggcccaaggcggggccaaggcttcaagctctcaggacttggctatggaggaggaggaagaaggcaggagctcatccagtccagccttacctacagcaggaaactgcaccagctagactccattctgggaccatctccaggagtccatgagaggctttcttctcctatgtcccaattctcagaactcagatgtggctagaccaaccagtgggaaactgccccagcttctcccaccatagggggccggacccccatcaccagcctaggatccaggggctgcctctggcctcttagggagcagagagcagaactccgcagcccagcccagaggagtgtcacctcccacctttggagaggaatccttccctcccctggacaaagttgctgacaagctgctgaagtggcctctccatattccagctgagcctgaatctgactcttgagggttggggctgcacttatttattgcggggagacagctctctctcccacctcctccccagatgggaggagagcctgaggcccaagcaggacccgggggttccagcccctagctgctctggagtgggggaggttggtggaccatggagtccctggtgctgcccctcaggtgggacccaggcgttctcagctgtaccctctgccgatggcatttgtgtttttgatatttgtgtctgttactacttttttaatacaaaaagataaaaacgc

SEQ ID NO: 8728 - DNA, 2368 bp, Homo sapiens
taccgcacgaggcagtgctgggggtgtgcggaagaatggagccatctgtccatgtgtccatggactcaccctgcttcctccatctgccagcatgcctccatcttccgcacacccccagctcgacccctcgtgtaacctctccctggccttgttcctttctcaataaatccccttgtccctggctcctgtgattcttccctgaaggtgccccacctcctgagtcccccgttctgtgtgggttgagaagctctctctgggaccttggcctgtcctctccctggtcagcgtgtcagggcagtgtgggtagcaggggtactaaccccaggttgaggtccttgctaaccctagtctctccccacaggctgccaccacggccccgcacccccaagccgccgacaccactgccgatccaaagccaagcgctcacgccaccaccagaaccctcgggctgaagcgccctgctatgtctcacacccctcacccgtgccaccctccaccccctggcccaccccaccagccactacccccttcccagcggttgtccagccctaccctctcccagtgttctctcctcgaggaggcccccagcctcttccccctgctcccacatctgtgcccccagctgctttccccgcccctttggtgaccccaatggtggccttggtgctccctaactatctgttcccaaccccatccagctatccttatggggcactccagacccctgctgaagggcctcccactcctgcctcgcactccccttctccatccttgcccgccctccccccgagtcctcctcaccgcccggactctccactgttcaactcgagatgcagctctccactccagctcaatctgctgcagctggaggagctcccccgtgctgagggggctgctgttgcaggaggccctgggagcagtgccgggcccccacctcccagtgcggaggctgctgagccagaggccagactggcggaggtcactgagtcctccaatcaggacgcactttccggctccagtgacctgctcgaacttctgctgcaagaggactcgcgctccggcacaggctccgcagcctcgggctccttgggctctggcttgggctctgggtctggttcaggctcccatgaagggggcagcacctcagccagcatcactcgcagcagccagagcagccacacaagcaaatactttggcagcatcgactcttccgaggctgaggctggggctgctcggggcggggctgagcctggggaccaggtgattaagtacgtgctccaggatcccatttggctgctcatggccaatgctgaccagcgcgtcatgatgacctaccaggtgccctccagggacatgacctctgtgctgaagcaggatcgggagcggctccgagccatgcagaagcagcagcctcggttttctgaggaccagcggcgggaactgggtgctgtgcactcctgggtccggaagggccaactgcctcgggctcttgatgtgatggcctgtgtggactgtgggagcagcacccaagatcctggtcaccctgatgacccactcttctcagagctggatggactggggctggagcccatggaagagggtggaggcgagcagggcagcagcggtggcggcagtggtgagggagagggctgcgaggaggcccaaggcggggccaaggcttcaagctctcaggacttggctatggaggaggaggaagaaggcaggagctcatccagtccagccttacctacagcaggaaactgcaccagctagactccattctgggaccatctccaggagtccatgagaggctttcttctcctatgtcccaattctcagaactcagatgtggctagaccaaccagtgggaaactgccccagcttctcccaccatagggggccggacccccatcaccagcctaggatccaggggctgcctctggcctcttagggagcagagagcagaactccgcagcccagcccagaggagtgtcacctcccacctttggagaggaatccttccctcccctggacaaagttgctgacaagctgctgaagtggcctctccatattccagctgagcctgaatctgactcttgagggttggggctgcacttatttattgcggggagacagctctctctcccacctcctccccagatgggaggagagcctgaggcccaagcaggacccgggggttccagcccctagctgctctggagtgggggaggttggtggaccatggagtccctggtgctgcccctcaggtgggacccaggcgttctcagctgtaccctctgccgatggcatttgtgtttttgatatttgtgtctgttactacttttttaatacaaaaagataaaaacgc

SEQ ID NO: 8729 - DNA, 1262 bp, Homo sapiens
aggaatggaaggccgggataatcggacgagggcacctccagccagcatcactcgcagcagccagagcagccacacaagcaaatactttggcagcatcgactcttccgaggctgaggctggggctgctcggggcggggctgagcctggggaccaggtgattaagtacgtgctccaggatcccatttggctgctcatggccaatgctgaccagcgcgtcatgatgacctaccaggtgccctccagggacatgacctctgtgctgaagcaggatcgggagcggctccgagccatgcagaagcagcagcctcggttttctgaggaccagcggcgggaactgggtgctgtgcactcctgggtccggaagggccaactgcctcgggctcttgatgtgatggcctgtgtggactgtgggagcagcacccaagatcctggtcaccctgatgacccactcttctcagagctggatggactggggctggagcccatggaagagggtggaggcgagcagggcagcagcggtggcggcagtggtgagggagagggctgcgaggaggcccaaggcggggccaaggcttcaagctctcaggacttggctatggaggaggaggaagaaggcaggagctcatccagtccagccttacctacagcaggaaactgcaccagctagactccattctgggaccatctccaggagtccatgagaggctttcttctcctatgtcccaattctcagaactcagatgtggctagaccaaccagtgggaaactgccccagcttctcccaccatagggggccggacccccatcaccagcctaggatccaggggctgcctctggcctcttagggagcagagagcagaactccgcagcccagcccagaggagtgtcacctcccacctttggagaggaatccttccctcccctggacaaagttgctgacaagctgctgaagtggcctctccatattccagctgagcctgaatctgactcttgagggttggggctgcacttatttattgcggggagacagctctctctcccacctcctccccagatgggaggagagcctgaggcccaagcaggacccgggggttccagcccctagctgctctggagtgggggaggttggtggaccatggagtccctggtgctgcccctcaggtgggacccaggcgttctcagctgtaccctctgccgatggcatttgtgtttttgatatttgtgtctgttactacttttttaatacaaaaagataaaaacgc

SEQ ID NO: 8730 - DNA, 1646 bp, Homo sapiens
cttggagccctgttactagttcctcccaggaggagagcaggtttcctggtcttggaagccttgacctcgcatagcactagtttaggggaggagcatgaggtgggaagctgtggtagaggaaggatgccagcttcatgggtcctggtccgggtcctggatcccagcctctgccttctgaaccccttcttgggcagggacatgacctctgtgctgaagcaggatcgggagcggctccgagccatgcagaagcagcagcctcggttttctgaggaccagcggcgggaactgggtgctgtgcactcctgggtccggaagggccaactgcctcgggctcttgatgtgatggtgagagaagcctgggacggggagaaaaaagaattgagctcaagttcaagggggagaaaaaaagaattgagctcaagttcaagggatcgaggccaagagctgatctccttgatgtccttggatcattaattctgaagaatgttgattccactaaatttgctgtggattatagaatattaagccgcgtgagtctttgcagaacttttcacagcctatcctatgctaatatgcattgtgactgtcctgtaacggcatctgggtagagggcacaaggcactgtccaaccttgttggaccgcaggtgcatctgtgtggactggtgcttcttgggagtacatttcgggaagcacagtgggctgggggtgggaagctgcgctggcaggttagcagtgagaaccctgtctgactctctcatgtccatttctctcaccaaggcctgtgtggactgtgggagcagcacccaagatcctggtcaccctgatgacccactcttctcagagctggatggactggggctggagcccatggaagagggtggaggcgagcagggcagcagcggtggcggcagtggtgagggagagggctgcgaggaggcccaaggcggggccaaggcttcaagctctcaggacttggctatggaggaggaggaagaaggcaggagctcatccagtccagccttacctacagcaggaaactgcaccagctagactccattctgggaccatctccaggagtccatgagaggctttcttctcctatgtcccaattctcagaactcagatgtggctagaccaaccagtgggaaactgccccagcttctcccaccatagggggccggacccccatcaccagcctaggatccaggggctgcctctggcctcttagggagcagagagcagaactccgcagcccagcccagaggagtgtcacctcccacctttggagaggaatccttccctcccctggacaaagttgctgacaagctgctgaagtggcctctccatattccagctgagcctgaatctgactcttgagggttggggctgcacttatttattgcggggagacagctctctctcccacctcctccccagatgggaggagagcctgaggcccaagcaggacccgggggttccagcccctagctgctctggagtgggggaggttggtggaccatggagtccctggtgctgcccctcaggtgggacccaggcgttctcagctgtaccctctgccgatggcatttgtgtttttgatatttgtgtctgttactacttttttaatacaaaaagataaaaacgc

SEQ ID NO: 8731 - DNA, 719 bp, Homo sapiens
tgtctttccctgctgctccatagccaaggcttcaagctctcaggacttggctatggaggaggaggaagaaggcaggagctcatccagtccagccttacctacagcaggaaactgcaccagctagactccattctgggaccatctccaggagtccatgagaggctttcttctcctatgtcccaattctcagaactcagatgtggctagaccaaccagtgggaaactgccccagcttctcccaccatagggggccggacccccatcaccagcctaggatccaggggctgcctctggcctcttagggagcagagagcagaactccgcagcccagcccagaggagtgtcacctcccacctttggagaggaatccttccctcccctggacaaagttgctgacaagctgctgaagtggcctctccatattccagctgagcctgaatctgactcttgagggttggggctgcacttatttattgcggggagacagctctctctcccacctcctccccagatgggaggagagcctgaggcccaagcaggacccgggggttccagcccctagctgctctggagtgggggaggttggtggaccatggagtccctggtgctgcccctcaggtgggacccaggcgttctcagctgtaccctctgccgatggcatttgtgtttttgatatttgtgtctgttactacttttttaatacaaaaagataaaaacgc

SEQ ID NO: 8732 - DNA, 525 bp, Homo sapiens
  misc_feature (34)..(34): n is a, c, g, or t
gtagctgactatctagaagttgcgcggccgtgcngagccgtcaccacacatagggggccggacccccatcaccagcctaggatccaggggctgcctctggcctcttagggagcagagagcagaactccgcagcccagcccagaggagtgtcacctcccacctttggagaggaatccttccctcccctggacaaagttgctgacaagctgctgaagtggcctctccatattccagctgagcctgaatctgactcttgagggttggggctgcacttatttattgcggggagacagctctctctcccacctcctccccagatgggaggagagcctgaggcccaagcaggacccgggggttccagcccctagctgctctggagtgggggaggttggtggaccatggagtccctggtgctgcccctcaggtgggacccaggcgttctcagctgtaccctctgccgatggcatttgtgtttttgatatttgtgtctgttactacttttttaatacaaaaagataaaaacgc

SEQ ID NO: 8733 - DNA, 5283 bp, Homo sapiens
atgcaacccgcctccccgcccgcccggtggagcttccactcggctgcgggctggagcggcggcgggcaggcgtgcggaggacactcctgcgaccaggtactggctgtgatcgaacttctcaaccctcagagacttagatcttccacctcactccctcagccaagcctccaggccccctcgtgcatccgtggtggcctctctgccttctctgttctgttctccccatggcccagacatgagtggccccctagaaggggctgatgggggaggggaccccaggcctggggaatcattttgtcctgggggcgtcccatcccctgggcccccacagcaccggccttgcccaggccccagcctggccgatgacaccgatgccaacagcaatggttcaagtggcaatgagtccaacgggcatgagtctagaggcgcatctcagcggagctcacacagctcctcctcaggcaacggcaaggactcagccctgctggagaccactgagagcagcaagagcacaaactctcagagcccatccccacccagcagttccattgcctacagcctcctgagtgccagctcagagcaggacaacccgtccaccagtggctgcagcagtgaacagtcagcccgggcaaggactcagaaggaactcatgacagcacttcgagagctcaagcttcgactgccgccagagcgccggggcaagggccgctctgggaccctggccacgctgcagtacgcactggcctgtgtcaagcaggtgcaggccaaccaggaatactaccagcagtggagcctggaggagggcgagccttgctccatggacatgtccacctataccctggaggagctggagcacatcacgtctgagtacacacttcagaaccaggataccttctcagtggctgtctccttcctgacgggccgaatcgtctacatttcggagcaggcagccgtcctgctgcgttgcaagcgggacgtgttccggggtacccgcttctctgagctcctggctccccaggatgtgggagtcttctatggttccactgctccatctcgcctgcccacctggggcacaggggcctcagcaggttcaggcctcagggactttacccaggagaagtccgtcttctgccgtatcagaggaggtcctgaccgggatccagggcctcggtaccagccattccgcctaaccccgtatgtgaccaagatccgggtctcagatggggcccctgcacagccgtgctgcctgctgattgcagagcgcatccattcgggttacgaagctccccggataccccctgacaagaggattttcactacgcggcacacacccagctgcctcttccaggatgtggatgaaagggctgcccccctgctgggctacctgccccaggacctcctgggggccccagtgctcctgttcctgcatcctgaggaccgacccctcatgctggctatccacaagaagattctgcagttggcgggccagccctttgaccactcccctatccgcttctgtgcccgcaacggggagtatgtcaccatggacaccagctgggctggctttgtgcacccctggagccgcaaggtagccttcgtgttgggccgccacaaagtacgcacggcccccctgaatgaggacgtgttcactcccccggcccccagcccagctccctccctggacactgatatccaggagctgtcagagcagatccaccggctgctgctgcagcccgtccacagccccagccccacgggactctgtggagtcggcgccgtgacatccccaggccctctccacagccctgggtcctccagtgatagcaacgggggtgatgcagaggggcctgggcctcctgcgccagtgactttccagcagatctgtaaggatgtgcatctggtgaagcaccagggccagcagctttttattgagtctcgggcccggcctcagtcccggccccgcctccctgctacaggcacgttcaaggccaaggcccttccctgccaatccccagacccagagctggaggcgggttctgctcccgtccaggccccactagccttggtccctgaggaggccgagaggaaagaagcctccagctgctcctaccagcagatcaactgcctggacagcatcctcaggtacctggagagctgcaacctccccagcaccactaagcgtaaatgtgcctcctcctcctcctataccacctcctcagcctctgacgacgacaggcagaggacaggtccagtctctgtggggaccaagaaagatccgccgtcagcagcgctgtctggggagggggccaccccacggaaggagccagtggtgggaggcaccctgagcccgctcgccctggccaataaggcggagagtgtggtgtccgtcaccagtcagtgtagcttcagctccaccatcgtccatgtgggagacaagaagcccccggagtcggacatcatcatgatggaggacctgcctggtctagccccaggcccagcccccagcccagcccccagccccacagtagcccctgacccagccccagacgcctaccgtccagtggggctgaccaaggccgtgctgtccctgcacacgcagaaggaagagcaagccttcctcagccgcttccgagacctgggcaggctgcgtggactcgacagctcttccacagctccctcagcccttggcgagcgagggtagccacctggggcctcctggagcctgccctctgcccagtctaggactggattgttggggggtgggtcttaagggaggtgtttctgctccagggacccaggctggtgttgcttccaccactaggccctgcctagggacaggcccctcgctagcttctccccactaggatggggttccgggctgcagccagaggagggcagcctggggggatggcactgggatgggcaggcagaggtgctgtctccaggtaagcgacttcaggcctagcctgggggcaggggcaggaagtatgcccacttaggagtcagttgtcactgatgaagagacatgcatagattctgggccaactctgggtggggtctgggcttcaagggcaggtggaaggcagcccctccaggtgcctgagggagatcccctgcaggcagacgcaggactcaggactgggctttccagccccactcttcactccattgcaagctaggcagaatacggcctcgatgggcaggaggaatgcctaggctggcagtgcccacaggagtttggcggaccagagccatctgtccatgtgtccatggactcaccctgcttcctccatctgccagcatgcctccatcttccgcacacccccagctcgacccctcgtgtaacctctccctggccttgttcctttctcaataaatccccttgtccctggctcctgtgattcttccctgaaggtgccccacctcctgagtcccccgttctgtgtgggttgagaagctctctctgggaccttggcctgtcctctccctggtcagcgtgtcagggcagtgtgggtagcaggggtactaaccccaggttgaggtccttgctaaccctagtctctccccacaggctgccaccacggccccgcacccccaagccgccgacaccactgccgatccaaagccaagcgctcacgccaccaccagaaccctcgggctgaagcgccctgctatgtctcacacccctcacccgtgccaccctccaccccctggcccaccccaccagccactacccccttcccagcggttgtccagccctaccctctcccagtgttctctcctcgaggaggcccccagcctcttccccctgctcccacatctgtgcccccagctgctttccccgcccctttggtgaccccaatggtggccttggtgctccctaactatctgttcccaaccccatccagctatccttatggggcactccagacccctgctgaagggcctcccactcctgcctcgcactccccttctccatccttgcccgccctccccccgagtcctcctcaccgcccggactctccactgttcaactcgagatgcagctctccactccagctcaatctgctgcagctggaggagctcccccgtgctgagggggctgctgttgcaggaggccctgggagcagtgccgggcccccacctcccagtgcggaggctgctgagccagaggccagactggcggaggtcactgagtcctccaatcaggacgcactttccggctccagtgacctgctcgaacttctgctgcaagaggactcgcgctccggcacaggctccgcagcctcgggctccttgggctctggcttgggctctgggtctggttcaggctcccatgaagggggcagcacctcagccagcatcactcgcagcagccagagcagccacacaagcaaatactttggcagcatcgactcttccgaggctgaggctggggctgctcggggcggggctgagcctggggaccaggtgattaagtacgtgctccaggatcccatttggctgctcatggccaatgctgaccagcgcgtcatgatgacctaccaggtgccctccagggacatgacctctgtgctgaagcaggatcgggagcggctccgagccatgcagaagcagcagcctcggttttctgaggaccagcggcgggaactgggtgctgtgcactcctgggtccggaagggccaactgcctcgggctcttgatgtgatggtgagagaagcctgggacggggagaaaaaagaattgagctcaagttcaagggggagaaaaaaagaattgagctcaagttcaagggatcgaggccaagagctgatctccttgatgtccttggatcattaattctgaagaatgttgattccactaaatttgctgtggattatagaatattaagccgcgtgagtctttgcagaacttttcacagcctatcctatgctaatatgcattgtgactgtcctgtaacggcatctgggtagagggcacaaggcactgtccaaccttgttggaccgcaggtgcatctgtgtggactggtgcttcttgggagtacatttcgggaagcacagtgggctgggggtgggaagctgcgctggcaggttagcagtgagaaccctgtctgactctctcatgtccatttctctcaccaaggcctgtgtggactgtgggagcagcacccaagatcctggtcaccctgatgacccactcttctcagagctggatggccggatatatgcagttttttacgcagccattctacacgttccataacagggatagccggatatatt

SEQ ID NO: 8734 - DNA, 435 bp, Homo sapiens
  misc_feature (40)..(40): n is a, c, g, or t
gcggccgcctactactactactaaattcgcggccgcgtcnaccccagcccagaggagtgtcacctcccacctttggagaggaatccttccctcccctggacaaagttgctgacaagctgctgaagtggcctctccatattccagctgagcctgaatctgactcttgagggttggggctgcacttatttattgcggggagacagctctctctcccacctcctccccagatgggaggagagcctgaggcccaagcaggacccgggggttccagcccctagctgctctggagtgggggaggttggtggaccatggagtccctggtgctgcccctcaggtgggacccaggcgttctcagctgtaccctctgccgatggcatttgtgtttttgatatttgtgtctgttactacttttttaatacaaaaagataaaaacgc

SEQ ID NO: 8735 - DNA, 388 bp, Homo sapiens
gctcggtacccctttccggcgggctttggagaggaatccttccctcccctggacaaagttgctgacaagctgctgaagtggcctctccatattccagctgagcctgaatctgactcttgagggttggggctgcacttatttattgcggggagacagctctctctcccacctcctccccagatgggaggagagcctgaggcccaagcaggacccgggggttccagcccctagctgctctggagtgggggaggttggtggaccatggagtccctggtgctgcccctcaggtgggacccaggcgttctcagctgtaccctctgccgatggcatttgtgtttttgatatttgtgtctgttactacttttttaatacaaaaagataaaaacgc

SEQ ID NO: 8736 - DNA, 3027 bp, Homo sapiens
  misc_feature (3025)..(3025): n is a, c, g, or t
atgcaacccgcctccccgcccgcccggtggagcttccactcggctgcgggctggagcggcggcgggcaggcgtgcggaggacactcctgcgaccaggtactggctgtgatcgaacttctcaaccctcagagacttagatcttccacctcactccctcagccaagcctccaggccccctcgtgcatccgtggtggcctctctgccttctctgttctgttctccccatggcccagacatgagtggccccctagaaggggctgatgggggaggggaccccaggcctggggaatcattttgtcctgggggcgtcccatcccctgggcccccacagcaccggccttgcccaggccccagcctggccgatgacaccgatgccaacagcaatggttcaagtggcaatgagtccaacgggcatgagtctagaggcgcatctcagcggagctcacacagctcctcctcaggcaacggcaaggactcagccctgctggagaccactgagagcagcaagagcacaaactctcagagcccatccccacccagcagttccattgcctacagcctcctgagtgccagctcagagcaggacaacccgtccaccagtggctgcagcagtgaacagtcagcccgggcaaggactcagaaggaactcatgacagcacttcgagagctcaagcttcgactgccgccagagcgccggggcaagggccgctctgggaccctggccacgctgcagtacgcactggcctgtgtcaagcaggtgcaggccaaccaggaatactaccagcagtggagcctggaggagggcgagccttgctccatggacatgtccacctataccctggaggagctggagcacatcacgtctgagtacacacttcagaaccaggataccttctcagtggctgtctccttcctgacgggccgaatcgtctacatttcggagcaggcagccgtcctgctgcgttgcaagcgggacgtgttccggggtacccgcttctctgagctcctggctccccaggatgtgggagtcttctatggttccactgctccatctcgcctgcccacctggggcacaggggcctcagcaggttcaggcctcagggactttacccaggagaagtccgtcttctgccgtatcagaggaggtcctgaccgggatccagggcctcggtaccagccattccgcctaaccccgtatgtgaccaagatccgggtctcagatggggcccctgcacagccgtgctgcctgctgattgcagagcgcatccattcgggttacgaagctccccggataccccctgacaagaggattttcactacgcggcacacacccagctgcctcttccaggatgtggatgaaagggctgcccccctgctgggctacctgccccaggacctcctgggggccccagtgctcctgttcctgcatcctgaggaccgacccctcatgctggctatccacaagaagattctgcagttggcgggccagccctttgaccactcccctatccgcttctgtgcccgcaacggggagtatgtcaccatggacaccagctgggctggctttgtgcacccctggagccgcaaggtagccttcgtgttgggccgccacaaagtacgcacggcccccctgaatgaggacgtgttcactcccccggcccccagcccagctccctccctggacactgatatccaggagctgtcagagcagatccaccggctgctgctgcagcccgtccacagccccagccccacgggactctgtggagtcggcgccgtgacatccccaggccctctccacagccctgggtcctccagtgatagcaacgggggtgatgcagaggggcctgggcctcctgcgccagtgagtgacctgctcctacctcaccctctaatcgccctttcccctctccttcttggaaccagcactgccagtcccagagtcttgcccgatcctcctttgccctctccttcctgccttttccttcttgtcctgctcccatcaaggcgtctgtgcctccccactggtaccttcttgttttattgtgcccttggcccctgacactggcgacaccccctggttctgctcactgtggtgctgtgtcccacaggtgactttccagcagatctgtaaggatgtgcatctggtgaagcaccagggccagcagctttttattgagtctcgggcccggcctcagtcccggccccgcctccctgctacaggcacgttcaaggccaaggcccttccctgccaatccccagacccagagctggaggcgggttctgctcccgtccaggccccactagccttggtccctgaggaggccgagaggaaagaagcctccagctgctcctaccagcagatcaactgcctggacagcatcctcaggtacctggagagctgcaacctccccagcaccactaagcgtaaatgtgcctcctcctcctcctataccacctcctcagcctctgacgacgacaggcagaggacaggtccagtctctgtggggaccaagaaagatccgccgtcagcagcgctgtctggggagggggccaccccacggaaggagccagtggtgggaggcaccctgagcccgctcgccctggccaataaggcggagagtgtggtgtccgtcaccagtcagtgtagcttcagctccaccatcgtccatgtgggagacaagaagcccccggagtcggacatcatcatgatggaggacctgcctggtctagccccaggcccagcccccagcccagcccccagccccacagtagcccctgacccagccccagacgcctaccgtccagtggggctgaccaaggccgtgctgtccctgcacacgcagaaggaagagcaagccttcctcagccgcttccgagacctgggcaggctgcgtggactcgacagctcttccacagctccctcagcccttggcgagcgagtgctgcacgacggcccgcaccccaagcggcgaacactgcgatccaaagcaagcgtcacgcacaacagaacctcgggtgaagngc

SEQ ID NO: 8737 - DNA, 1017 bp, Homo sapiens
atgcaacccgcctccccgcccgcccggtggagcttccactcggctgcgggctggagcggcggcgggcaggcgtgcggaggacactcctgcgaccaggtactggctgtgatcgaacttctcaaccctcagagacttagatcttccacctcactccctcagccaagcctccaggccccctcgtgcatccgtggtggcctctctgccttctctgttctgttctccccatggcccagacatgagtggccccctagaaggggctgatgggggaggggaccccaggcctggggaatcattttgtcctgggggcgtcccatcccctgggcccccacagcaccggccttgcccaggccccagcctggccgatgacaccgatgccaacagcaatggttcaagtggcaatgagtccaacgggcatgagtctagaggcgcatctcagcggagctcacacagctcctcctcaggcaacggcaaggactcagccctgctggagaccactgagagcagcaagagcacaaactctcagagcccatccccacccagcagttccattgcctacagcctcctgagtgccagctcagagcaggacaacccgtccaccagtggctgcagcagtgaacagtcagcccgggcaaggactcagaaggaactcatgacagcacttcgagagctcaagcttcgactgccgccagagcgccggggcaagggccgctctgggaccctggccacgctgcagtacgcactggcctgtgtcaagcaggtgcaggccaaccaggaatactaccagcagtggagcctggaggagggcgagccttgctccatggacatgtccacctataccctggaggagctggagcacatcacgtctgagtacacacttcagaaccaggataccttctcagtggctgtctccttcctgacgggccgaatcgcttgaacccagggggtggtggttgcagtgagctgagatcgcaccactgcactccagcttgggagaaagagtgagactccatgtcaaaa

SEQ ID NO: 8738 - DNA, 458 bp, Homo sapiens
tcatacttgtactgaccacagtcggggcgattgcgtagagtcgactgtgtaggcatgcgtgctatgggagcgctcgtcgcctgacaaccgtcgtagaccccctggttctgctcactgtggtgctgtgtcccacaggtgactttccagcagatctgtaaggatgtgcatctggtgaagcaccagggccagcagctttttattgagtctcgggcccggcctcagtcccggccccgcctccctggtgagttgatgatgatgtgtgggtgaagagacagacctggggggtcccctgacctggactcaataattgatagattttcctagagtaacagtatgagagctccagccattccattaaaagtattagttctgctttgagctgaaaccagttgagcctaatggaagactggatgtctttcttcttcaaccgcatcacccgttcggggatgctctattgt

SEQ ID NO: 8739 - DNA, 394 bp, Homo sapiens
ccctggcctggtgggggctgggaggaaggacatttcctcatggccagacatgaatttgggaggcatgaaccacaccctttgaattttggaacaagaaaagctattgtaaagatgaggatttgagctcctcttagaggtagagttgaataaggtgcccaagctagaggagggcagagaagaatgccttgcttgctctcagtcatgttactgatacagggcataggattggcccagaccatctttgggcccatagtgcccggggcagagctgtgtggcagatcatcagccagcctgggcccaggcagagtggagggctgaggagttgggcattctggacgaaacccagtgaccacactctctgtgcctcagctccccggataccccctgacaagag

SEQ ID NO: 8740 - DNA, 463 bp, Homo sapiens
tcaagttcaagggggagaaaaaagaattgagctcaagttcaagggggagaaaaaaagaattgagctcaagttcaagggatcgaggccaagagctgatctccttgatgtccttggatcattaattctgaagaatgttgattccactaaatttgctgtggattatagaatattaagccgcgtgagtctttgcagaacttttcacagcctatcctatgctaatatgcattgtgactgtcctgtaacggcatctgggtagagggcacaaggcactgtccaaccttgttggaccgcaggtgcatctgtgtggactggtgcttcttgggagtacatttcgggaagcacagtgggctgggggtgggaagctgcgctggcagtagcagtcagaaccctgttcgacatctcatcatcttcatatataatcgacagcccaggcctcatagtcgtgagcagtgcggagcagcac

SEQ ID NO: 8741 - DNA, 368 bp, Homo sapiens
gaggtgctgaccacacagggtctgaaggcaaggaaaattgaacatccctgaagggtctttggatattgaccttgaaaatcatgaggggctgggcatggtggctcaggcctgtaatcccagcattttgggaggctgaggtaggaggatcacctgagatcaggagctcgagatcagcctgggcaacatggtgaaaccctgtatctactaaaaatgcaaaaattagccgggcgtggtggcgcgcgcctgtagtcccagctactcgggaggctgggacaggagaatcgcttgaacccagggggtggtggttgcagtgagctgagatcgcaccactgcactccagcttgggagaaagagtgagactccatgtc

SEQ ID NO: 8742 - DNA, 351 bp, Homo sapiens
ctgctgggctacctgccccaggacctcctgggggccccagtgctcctgttcctgcatcctgaggaccgacccctcatgctggctatccacaagaagagtgagttcctctcgccctgctcgcccttcccactgtcctgggcttttgagtggctgcccttgtggttgtgtctcttggtgccttggtctcctggatctctagtggcatggcctccctcttactcagctctccctccctttgaccgctcctcctttcccacttccatcagttctgcagttggcgggccagccctttgaccactcccctatccgcttctgtgcccgcaacggggagtatgtcaccatggacaccag

SEQ ID NO: 8743 - DNA, 2434 bp, Homo sapiens
atgcaacccgcctccccgcccgcccggtggagcttccactcggctgcgggctggagcggcggcgggcaggcgtgcggaggacactcctgcgaccaggtactggctgtgatcgaacttctcaaccctcagagacttagatcttccacctcactccctcagccaagcctccaggccccctcgtgcatccgtggtggcctctctgccttctctgttctgttctccccatggcccagacatgagtggccccctagaaggggctgatgggggaggggaccccaggcctggggaatcattttgtcctgggggcgtcccatcccctgggcccccacagcaccggccttgcccaggccccagcctggccgatgacaccgatgccaacagcaatggttcaagtggcaatgagtccaacgggcatgagtctagaggcgcatctcagcggagctcacacagctcctcctcaggcaacggcaaggactcagccctgctggagaccactgagagcagcaagagcacaaactctcagagcccatccccacccagcagttccattgcctacagcctcctgagtgccagctcagagcaggacaacccgtccaccagtggctgcagcagtgaacagtcagcccgggcaaggactcagaaggaactcatgacagcacttcgagagctcaagcttcgactgccgccagagcgccggggcaagggccgctctgggaccctggccacgctgcagtacgcactggcctgtgtcaagcaggtgcaggccaaccaggaatactaccagcagtggagcctggaggagggcgagccttgctccatggacatgtccacctataccctggaggagctggagcacatcacgtctgagtacacacttcagaaccaggataccttctcagtggctgtctccttcctgacgggccgaatcgtctacatttcggagcaggcagccgtcctgctgcgttgcaagcgggacgtgttccggggtacccgcttctctgagctcctggctccccaggatgtgggagtcttctatggttccactgctccatctcgcctgcccacctggggcacaggggcctcagcaggttcaggcctcagggactttacccaggagaagtccgtcttctgccgtatcagaggaggtcctgaccgggatccagggcctcggtaccagccattccgcctaaccccgtatgtgaccaagatccgggtctcagatggggcccctgcacagccgtgctgcctgctgattgcagagcgcatccattcgggttacgaagctccccggataccccctgacaagaggattttcactacgcggcacacacccagctgcctcttccaggatgtggatgaaagggctgcccccctgctgggctacctgccccaggacctcctgggggccccagtgctcctgttcctgcatcctgaggaccgacccctcatgctggctatccacaagaagattctgcagttggcgggccagccctttgaccactcccctatccgcttctgtgcccgcaacggggagtatgtcaccatggacaccagctgggctggctttgtgcacccctggagccgcaaggtagccttcgtgttgggccgccacaaagtacgcacggcccccctgaatgaggacgtgttcactcccccggcccccagcccagctccctccctggacactgatatccaggagctgtcagagcagatccaccggctgctgctgcagcccgtccacagccccagccccacgggactctgtggagtcggcgccgtgacatccccaggccctctccacagccctgggtcctccagtgatagcaacgggggtgatgcagaggggcctgggcctcctgcgccagtgagtgacctgctcctacctcaccctctaatcgccctttcccctctccttcttggaaccagcactgccagtcccagagtcttgcccgatcctcctttgccctctccttcctgccttttccttcttgtcctgctcccatcaaggcgtctgtgcctccccactggtaccttcttgttttattgtgcccttggcccctgacactggcgacaccccctggttctgctcactgtggtgctgtgtcccacaggtgactttccagcagatctgtaaggatgtgcatctggtgaagcaccagggccagcagctttttattgagtctcgggcccggcctcagtcccggccccgcctccctggtgagttgatgatgatgtgtgggtgaagagacagacctggggggtcccctgacctggactcaataattgatagattttcctagagtaacagtatgagagctccagccattccattaaaagtattagttctgctttgagctgaaaccagttgagcctaatggaagactggatgtctttcttcttcaaccgcatcacccgttcggggatgctctattgt

SEQ ID NO: 8744 - DNA, 1433 bp, Homo sapiens
actcagggttggttaaattgggaaggaacttggaaatggttctcttgggttcttccccttacaggcccacttgttagtctcctacttttgctcctttttggtccatgtctcctaaatctaataacccaatttgtctcctctcgccttcaggccataaagctccagacgaatctcagtgcaggacgccatcctcgcaatattcaagagtcacccttctaaggaggacccctagacgtgctcgctagtggaacacgacagaggcgaaatcctgccccgtctcccgtggacctggctggatatggttttggccaatccacagagccatcctgccctgacagctagcaagaggccaagacccacagaacaaccactacagcccctctgtcagcaggaagcagttaaagaagactgaccttcgtccattttcccagataattgggtcttggactcttgagggggggaaatgttggagcaggtagctagtcagacatgagcagggcaggggagggccccctcaccaggaatgtcaggcaaccatcaggtgatggtgaggcagttgttaagctgtgtctctaacataataatgagtggcagctggcgccagggaacgatggcctcccaatagataggaaacacctgaagctggtgatcagccacttcctgataagatctcaggagttgggtgcgcaggctcaagcatgcaccctaagaggcaaaatagtggcatttaactcatatatgaccttcctttaggaaggcttgactggtaagggaaaaactcctccagtgaacacgtgcacaacttcagtaaaaacactgcacatgcgtcccctcccaagtgctggcaggccactgtgcatgcagacagcccgccccaaagaaaaatcagaggaggagaaatggaaaccccggaacaatgccaatgtataaaaccccaagtcaagggcctaccaaggcaattggatctctcaagtcacccgcttggctctcttcaagtgcactttgcttccttttgttcttgctctaaaacttttactcctgctataaaacttgccttggactatcatgctaccttacgcctccccggccaaattccctcctctcctccggggggcaaggatggagtctgctgcagacccattggatttgctgctggtaacagttccaccatttaggttccagcaccaagcaaactaacacccgactcagtgtaaacagccaaacaagcttaaccaattagaaaccaccatctaacctctaactaggtcctttcaactttaaccaagtattttctttgtcttgcttctgtgggaaccttataaaattttcccccttgtacctctgtagtagagacccagttgcttgcagtttggccctgcctgttcatgaatcacccttgctcaaataaactctctaaaatgctaaaaaaaaaa

SEQ ID NO: 8745 - DNA, 430 bp, Homo sapiens
ttgaagagagccaagcgggtgacttgagagatccaattgccttggtaggcccttgacttggggttttatacattggcattgttccggggtttccatttctcctccggggggcaaggatggagtctgctgcagacccattggatttgctgctggtaacagttccaccatttaggttccagcaccaagcaaactaacacccgactcagtgtaaacagccaaacaagcttaaccaattagaaaccaccatctaacctctaactaggtcctttcaactttaaccaagtattttctttgtcttgcttctgtgggaaccttataaaattttcccccttgtacctctgtagtagagacccagttgcttgcagtttggccctgcctgttcatgaatcacccttgctcaaataaactctctaaaatgctaaaaaaaaaa

SEQ ID NO: 8746 - DNA, 618 bp, Homo sapiens
ccatgaggtgtgaccacgaggcatggactgtgagatgggactgtgagctccctggtcagcaccaatgaacacctgctgcaggagctgagccaggtgcgggcgcagcacagagccgaggtggagcagatgcactggagctaccaggagctcaagaagaccatggccctgtttccacacagcagcgccagccatggaggctgccaggcctgctgactcctgccgagaagctgggccaccccttaagcttcctggtaaagttacattgtctgcacctttgtacttctttattgagtgtactggctggcaagagttctctcttctgttggtaattatttaggatttttggaatgtattcaggacctgtagcttggttttctaaagcacctcgtaaaatgatatgattactccaagccctctgcatgttttcagacagaacacattgacatattttgagacaaactgactattaatcttgtatccagtatcctgagatgaagtaaatgcagtgttctactgcctgatgtgaaagagagctatgtatgataattaaagaaaataattttctgtgtaacaagcaatctttatttaataaacaaatacattgttctgaaaagttaa

SEQ ID NO: 8747 - DNA, 568 bp, Homo sapiens
ccatgaggtgtgaccacgaggcatggactgtgagatgggactgtgagctccctggtcagcaccaatgaacacctgctgcaggagctgagccaggtgcgggcgcagcacagagccgaggtggagcagatgcactggagctaccaggagctcaagaagaccatggccctgtttccacacagcagcgccagccatggaggctgccaggcctgctgactcctgccgagaagctgggccaccccttaagcttcctggtaaagttacattgtctgcacctttgtacttctttattgagtgtactggctggcaagagttctctcttctgttggtaattatttaggatttttggaatgtattcaggacctgtagcttggttttctaaagcacctcgtaaaatgatatgattactccaagccctctgcatgttttcagacagaacacattgacatattttgagacaaactgactattaatcttgtatccagtatcctgagatgaagtaaatgcagtgttctactgcctgatgtgaaagagagctatgtatgataattaaagaaaataattttctgtg

SEQ ID NO: 8748 - DNA, 2386 bp, Homo sapiens
cgccaggctctcggttctgccgacgcaggtcccgcccctctcgtagcctcgccccgcccgccggaggcgccgtccgagggctccgtttgaaacatggcgcgggctggccctcggctggtgctgagcgaggaggcggttcgggcgaagagcggcttagggcctcaccgcgacctggctgagcttcagtcattgtctattcctggaacttaccaagagaagatcacccacctgggacattctctgatgagtttaacaggtctgaaatctttggatctctcgcgcaactccttggttagtctggagggcattcagtacctgactgcattggagagtctcaatctctactacaactgcatctcctcgttggcagaagtgtttcggctccacgccttaaccgagctcgtggatgtggacttccggctgaaccccgtggtgaaggttgagcctgactaccgcctttttgttgtgcacctgctccccaagctccagcagctggacgatcgccccgtgagagcaagcgagcggaaggcttcccgactgcattttgcatcagaggactcactcgactccaaagagagcgtcccagcttctttgaaagagggcagaccacaccaccccagagccaagtgcaccgaggccttggccaagcagagcctggtcatggatgcggatgacgaggcagtcctgaacctcattgcagagtgcgagtgggacctcggcaggcctcccgggagcacgagcttcagccagaaggggcgtgaggccgactctcgtggttcccaagaatccagacatctgttgagcccgcagttggtacagtaccagtgtggggactctgggaagcagggccgtgagacgaggaggagcagctgcagagggtgctgtctggagaagatgccttggagccagctctgtggagagcttccgccactgtacggagcggagccagaggcctcccgtgcccccaggccacacacgtacttcaccccacacccagactccatggataccgaggactcggcctcttctcagaagttggatttgtcaggagaaatggtgcctggtcccctgccagcccccggaaagtgcaggaagcgaagaatgcctgttggaagattccagacgttttcggaccaggagggtttgggctgcccggagagaactcatgggtcctccgtgcccaaggagagcctgagcagacaggacagctcagaaagcaggaacgggaggaccttgtctcagcctgaggcctcggagactgaggagcagaggtctcggggtgtgaccgacaccagagagccgtctcccgggtcacactcggctctacccgggaagaagacggccctgcaggtccctgcacagcaacgaggcattccttgctcaggcaagacacatcttgtcatctgttgaagaattcacagcagctcaggacagctctgcgatggtgggtgaagatgtcggctccctggctctggagagtaagtccctgcaaagccgccttgctgagcagcagcagcagcacgcccgggagatgagcgaggtgacggcggagctgcaccacacacacaaggagctggatgatttgagacaacatttagataaatctttggaagagaacagtaggttaaaatcgcttttgttgagtatgaaaaaggaagtgaagagtgcagacactgcagccacgttaaatttgcagatcgctggacttcaaacaagtgtgaagaggctgtgtggcgagattgtggaactgaagcagcacctggagcactacgacaagatccaggagctcacgcagatgctgcaggagagccacagctccctggtcagcaccaatgaacacctgctgcaggagctgagccaggtgcgggcgcagcacagagccgaggtggagcagatgcactggagctaccaggagctcaagaagaccatggccctgtttccacacagcagcgccagccatggaggctgccaggcctgctgactcctgccgagaagctgggccaccccttaagcttcctggtaaagttacattgtctgcacctttgtacttctttattgagtgtactggctggcaagagttctctcttctgttggtaattatttaggatttttggaatgtattcaggacctgtagcttggttttctaaagcacctcgtaaaatgatatgattactccaagccctctgcatgttttcagacagaacacattgacatattttgagacaaactgactattaatcttgtatccagtatcctgagatgaagtaaatgcagtgttctactgcctgatgtgaaagagagctatgtatgataattaaagaaaataattttctgtgtaacaagcaatctttatttaataaacaaatacattgttctgaaaagttaa

SEQ ID NO: 8749 - DNA, 2369 bp, Homo sapiens
cgccaggctctcggttctgccgacgcaggtcccgcccctctcgtagcctcgccccgcccgccggaggcgccgtccgagggctccgtttgaaacatggcgcgggctggccctcggctggtgctgagcgaggaggcggttcgggcgaagagcggcttagggcctcaccgcgacctggctgagcttcagtcattgtctattcctggaacttaccaagagaagatcacccacctgggacattctctgatgagtttaacaggtctgaaatctttggatctctcgcgcaactccttggttagtctggagggcattcagtacctgactgcattggagagtctcaatctctactacaactgcatctcctcgttggcagaagtgtttcggctccacgccttaaccgagctcgtggatgtggacttccggctgaaccccgtggtgaaggttgagcctgactaccgcctttttgttgtgcacctgctccccaagctccagcagctggacgatcgccccgtgagagcaagcgagcggaaggcttcccgactgcattttgcatcagaggactcactcgactccaaagagagcgtcccagcttctttgaaagagggcagaccacaccaccccagagccaagtgcaccgaggccttggccaagcagagcctggtcatggatgcggatgacgaggcagtcctgaacctcattgcagagtgcgagtgggacctcggcaggcctcccgggagcacgagcttcagccagaaggggcgtgaggccgactctcgtggttcccaagaatccagacatctgttgagcccgcagttggtacagtaccagtgtggggactctgggaagcagggccgtgagacgaggaggagcagctgcagagggtgctgtctggagaagatgccttggagccagctctgtggagagcttccgccactgtacggagcggagccagaggcctcccgtgcccccaggccacacacgtacttcaccccacacccagactccatggataccgaggactcggcctcttctcagaagttggatttgtcaggagaaatggtgcctggtcccctgccagcccccggaaagtgcaggaagcgaagaatgcctgttggaagattccagacgttttcggaccaggagggtttgggctgcccggagagaactcatgggtcctccgtgcccaaggagagcctgagcagacaggacagctcagaaagcaggaacgggaggaccttgtctcagcctgaggcctcggagactgaggagcagaggtctcggggtgtgaccgacaccagagagccgtctcccgggtcacactcggctctacccgggaagaagacggccctgcaggcggcgctcctggagacgctcttggacctggtggacaggagctggggcggctgcaggtccctgcacagcaacgaggcattccttgctcaggcaagacacatcttgtcatctgttgaagaattcacagcagctcaggacagctctgcgatggtgggtgaagatgtcggctccctggctctggagagtaagtccctgcaaagccgccttgctgagcagcagcagcagcacgcccgggagatgagcgaggtgacggcggagctgcaccacacacacaaggagctggatgatttgagacaacatttagataaatctttggaagagaacagtaggttaaaatcgcttttgttgagtatgaaaaaggaagtgaagagtgcagacactgcagccacgttaaatttgcagatcgctggacttcaaacaagtgtgaagaggctgtgtggcgagattgtggaactgaagcagcacctggagcactacgacaagatccaggagctcacgcagatgctgcaggagagccacagctccctggtcagcaccaatgaacacctgctgcaggagctgagccaggtgcgggcgcagcacagagccgaggtggagcagatgcactggagctaccaggagctcaagaagaccatggccctgtttccacacagcagcgccagccatggaggctgccaggcctgctgactcctgccgagaagctgggccaccccttaagcttcctggtttactagaaattcccaactgttccaaagtggtggtacccgcaggcccgactgctagttgtgtatgaccacgtctgccggtccatgttttcagcacccattgcctgaagtgttagcaccttcactccgcttcttctatcaataattcgcctcaagaatggatgacttttatcactttttctgcagtgatggagatgaccatgatttttatcatttaatatattgatgtgtttaacgaccataatttgcttttgttaaaaataaaccttgaatttctgagataagtccaactta

SEQ ID NO: 8750 - DNA, 435 bp, Homo sapiens
gcactattatgatgtcaaaattattatatttgactgggaattagaactatttcagtccccgtatattttctagaattagaacattgttttgctagccatgaagtttatcatcttctcataaaaccatgcgtagctggaatagccaaggcgccattcagtcactcattagcctgttcagctcattcattcattccataggtgttgagccgcacctccaaggctgctcccaggggtcaggacagtggttgggaaggaggaggcaggtgggcggtagccagtgggacacagaaggtgatggggccacagagataggtctgtgtgcagggccagggcaccttcgtgcccatgcagggaggtgggcaggcccagcaggtgagggccacaccgctggagaggacggaagtgccaagcagccgcttccctgttgttctgcag

SEQ ID NO: 8751 - DNA, 782 bp, Homo sapiens
gagaaagggtgtgcgtgtgtgtgtgtgagcctcatctgtgtgcggctgctcccgtgcgcagcagtgagctctgagggacaggcggcctcagcaccacgctgggcatcgccgggaagctgtgggaccaccagagcccagcattccggtgctaggttagtgggagcagggctggccccgaggggatggacaccctgccccgtgtagatgccccagggtggatgcagccgcccgccgcttgccacctgcacagtcttgtgtggccttttcttctagacgatcgccccgtgagagcaagcgagcggaaggcttcccgactgcattttgcatcagaggactcactcgactccaaagagagcgtcccagcttctttgaaagagggcaggtatgaacggaagtgctacggacacccagagtgtttctgactggcctgctgtcaggaggattaaccgaacgtcattcactgtgtgccggtcactctccaggggcggacaccaggagggaggaagggcagagcctgcctggcggggactccgtggacagtgggacggggcctctctcctgttctccacattcctaggagttatttttaatatcgaaactgttgattaaggtaatatgtgtaaaatcaactcagcaaagggcttgtcctgtccctttcccggggctggcagctctcacgtctgtggctgcctctgcttccagctctcgcttcagctactttcttagctgcccatccagccaaatcccacttctggccgtgagcacattcagcaggacccgtc

SEQ ID NO: 8752 - DNA, 2442 bp, Homo sapiens
cgccaggctctcggttctgccgacgcaggtcccgcccctctcgtagcctcgccccgcccgccggaggcgccgtccgagggctccgtttgaaacatggcgcgggctggccctcggctggtgctgagcgaggaggcggttcgggcgaagagcggcttagggcctcaccgcgacctggctgagcttcagtcattgtctattcctggaacttaccaagagaagatcacccacctgggacattctctgatgagtttaacaggtctgaaatctttggatctctcgcgcaactccttggttagtctggagggcattcagtacctgactgcattggagagtctcaatctctactacaactgcatctcctcgttggcagaagtgtttcggctccacgccttaaccgagctcgtggatgtggacttccggctgaaccccgtggtgaaggttgagcctgactaccgcctttttgttgtgcacctgctccccaagctccagcagctggacgatcgccccgtgagagcaagcgagcggaaggcttcccgactgcattttgcatcagaggactcactcgactccaaagagagcgtcccagcttctttgaaagagggcagaccacaccaccccagagccaagtgcaccgaggccttggccaagcagagcctggtcatggatgcggatgacgaggcagtcctgaacctcattgcagagtgcgagtgggacctcggcaggcctcccgggagcacgagcttcagccagaaggggcgtgaggccgactctcgtggttcccaagaatccagacatctgttgagcccgcagttggtacagtaccagtgtggggactctgggaagcagggccgtgagacgaggaggagcagctgcagagggtgctgtctggagaagatgccttggagccagctctgtggagagcttccgccactgtacggagcggagccagaggcctcccgtgcccccaggccacacacgtacttcaccccacacccagactccatggataccgaggactcggcctcttctcagaagttggatttgtcaggagaaatggtgcctggtcccctgccagcccccggaaagtgcaggaagcgaagaatgcctgttggaagattccagacgttttcggaccaggagggtttgggctgcccggagagaactcatgggtcctccgtgcccaaggagagcctgagcagacaggacagctcagaaagcaggaacgggaggaccttgtctcagcctgaggcctcggagactgaggagcagaggtctcggggtgtgaccgacaccagagagccgtctcccgggtcacactcggctctacccgggaagaagacggccctgcaggcggcgctcctggagacgctcttggacctggtggacaggagctggggcggctgcaggtccctgcacagcaacgaggcattccttgctcaggcaagacacatcttgtcatctgttgaagaattcacagcagctcaggacagctctgcgatggtgggtgaagatgtcggctccctggctctggagagtaagtccctgcaaagccgccttgctgagcagcagcagcagcacgcccgggagatgagcgaggtgacggcggagctgcaccacacacacaaggagctggatgatttgagacaacatttagataaatctttggaagagaacagtaggttaaaatcgcttttgttgagtatgaaaaaggaagtgaagagtgcagacactgcagccacgttaaatttgcagatcgctggacttcaaacaagtgtgaagaggctgtgtggcgagattgtggaactgaagcagcacctggagcactacgacaagatccaggagctcacgcagatgctgcaggagagccacagctccctggtcagcaccaatgaacacctgctgcaggagctgagccaggtgcgggcgcagcacagagccgaggtggagcagatgcactggagctaccaggagctcaagaagaccatggccctgtttccacacagcagcgccagccatggaggctgccaggcctgctgactcctgccgagaagctgggccaccccttaagcttcctggtaaagttacattgtctgcacctttgtacttctttattgagtgtactggctggcaagagttctctcttctgttggtaattatttaggatttttggaatgtattcaggacctgtagcttggttttctaaagcacctcgtaaaatgatatgattactccaagccctctgcatgttttcagacagaacacattgacatattttgagacaaactgactattaatcttgtatccagtatcctgagatgaagtaaatgcagtgttctactgcctgatgtgaaagagagctatgtatgataattaaagaaaataattttctgtgtaacaagcaatctttatttaataaacaaatacattgttctgaaaagttaa

SEQ ID NO: 8753 - DNA, 2392 bp, Homo sapiens
cgccaggctctcggttctgccgacgcaggtcccgcccctctcgtagcctcgccccgcccgccggaggcgccgtccgagggctccgtttgaaacatggcgcgggctggccctcggctggtgctgagcgaggaggcggttcgggcgaagagcggcttagggcctcaccgcgacctggctgagcttcagtcattgtctattcctggaacttaccaagagaagatcacccacctgggacattctctgatgagtttaacaggtctgaaatctttggatctctcgcgcaactccttggttagtctggagggcattcagtacctgactgcattggagagtctcaatctctactacaactgcatctcctcgttggcagaagtgtttcggctccacgccttaaccgagctcgtggatgtggacttccggctgaaccccgtggtgaaggttgagcctgactaccgcctttttgttgtgcacctgctccccaagctccagcagctggacgatcgccccgtgagagcaagcgagcggaaggcttcccgactgcattttgcatcagaggactcactcgactccaaagagagcgtcccagcttctttgaaagagggcagaccacaccaccccagagccaagtgcaccgaggccttggccaagcagagcctggtcatggatgcggatgacgaggcagtcctgaacctcattgcagagtgcgagtgggacctcggcaggcctcccgggagcacgagcttcagccagaaggggcgtgaggccgactctcgtggttcccaagaatccagacatctgttgagcccgcagttggtacagtaccagtgtggggactctgggaagcagggccgtgagacgaggaggagcagctgcagagggtgctgtctggagaagatgccttggagccagctctgtggagagcttccgccactgtacggagcggagccagaggcctcccgtgcccccaggccacacacgtacttcaccccacacccagactccatggataccgaggactcggcctcttctcagaagttggatttgtcaggagaaatggtgcctggtcccctgccagcccccggaaagtgcaggaagcgaagaatgcctgttggaagattccagacgttttcggaccaggagggtttgggctgcccggagagaactcatgggtcctccgtgcccaaggagagcctgagcagacaggacagctcagaaagcaggaacgggaggaccttgtctcagcctgaggcctcggagactgaggagcagaggtctcggggtgtgaccgacaccagagagccgtctcccgggtcacactcggctctacccgggaagaagacggccctgcaggcggcgctcctggagacgctcttggacctggtggacaggagctggggcggctgcaggtccctgcacagcaacgaggcattccttgctcaggcaagacacatcttgtcatctgttgaagaattcacagcagctcaggacagctctgcgatggtgggtgaagatgtcggctccctggctctggagagtaagtccctgcaaagccgccttgctgagcagcagcagcagcacgcccgggagatgagcgaggtgacggcggagctgcaccacacacacaaggagctggatgatttgagacaacatttagataaatctttggaagagaacagtaggttaaaatcgcttttgttgagtatgaaaaaggaagtgaagagtgcagacactgcagccacgttaaatttgcagatcgctggacttcaaacaagtgtgaagaggctgtgtggcgagattgtggaactgaagcagcacctggagcactacgacaagatccaggagctcacgcagatgctgcaggagagccacagctccctggtcagcaccaatgaacacctgctgcaggagctgagccaggtgcgggcgcagcacagagccgaggtggagcagatgcactggagctaccaggagctcaagaagaccatggccctgtttccacacagcagcgccagccatggaggctgccaggcctgctgactcctgccgagaagctgggccaccccttaagcttcctggtaaagttacattgtctgcacctttgtacttctttattgagtgtactggctggcaagagttctctcttctgttggtaattatttaggatttttggaatgtattcaggacctgtagcttggttttctaaagcacctcgtaaaatgatatgattactccaagccctctgcatgttttcagacagaacacattgacatattttgagacaaactgactattaatcttgtatccagtatcctgagatgaagtaaatgcagtgttctactgcctgatgtgaaagagagctatgtatgataattaaagaaaataattttctgtg

SEQ ID NO: 8754 - DNA, 1495 bp, Homo sapiens
  misc_feature (22)..(22): n is a, c, g, or t
  misc_feature (26)..(27): n is a, c, g, or t
agcttcgcttaagatgctcccncgcnnacacgtactcaccccacacccagactccatggataccgaggactcggcctcttctcagaagttggatttgtcaggagaaatggtgcctggtcccctgccagcccccggaaagtgcaggaagcgaagaatgcctgttggaagattccagacgttttcggaccaggagggtttgggctgcccggagagaactcatgggtcctccgtgcccaaggagagcctgagcagacaggacagctcagaaagcaggaacgggaggaccttgtctcagcctgaggcctcggagactgaggagcagaggtctcggggtgtgaccgacaccagagagccgtctcccgggtcacactcggctctacccgggaagaagacggccctgcaggcggcgctcctggagacgctcttggacctggtggacaggagctggggcggctgcaggtccctgcacagcaacgaggcattccttgctcaggcaagacacatcttgtcatctgttgaagaattcacagcagctcaggacagctctgcgatggtgggtgaagatgtcggctccctggctctggagagtaagtccctgcaaagccgccttgctgagcagcagcagcagcacgcccgggagatgagcgaggtgacggcggagctgcaccacacacacaaggagctggatgatttgagacaacatttagataaatctttggaagagaacagtaggttaaaatcgcttttgttgagtatgaaaaaggaagtgaagagtgcagacactgcagccacgttaaatttgcagatcgctggacttcaaacaagtgtgaagaggctgtgtggcgagattgtggaactgaagcagcacctggagcactacgacaagatccaggagctcacgcagatgctgcaggagagccacagctccctggtcagcaccaatgaacacctgctgcaggagctgagccaggtgcgggcgcagcacagagccgaggtggagcagatgcactggagctaccaggagctcaagaagaccatggccctgtttccacacagcagcgccagccatggaggctgccaggcctgctgactcctgccgagaagctgggccaccccttaagcttcctggtaaagttacattgtctgcacctttgtacttctttattgagtgtactggctggcaagagttctctcttctgttggtaattatttaggatttttggaatgtattcaggacctgtagcttggttttctaaagcacctcgtaaaatgatatgattactccaagccctctgcatgttttcagacagaacacattgacatattttgagacaaactgactattaatcttgtatccagtatcctgagatgaagtaaatgcagtgttctactgcctgatgtgaaagagagctatgtatgataattaaagaaaataattttctgtgtaacaagcaatctttatttaataaacaaatacattgttctgaaaagttaa

SEQ ID NO: 8755 - DNA, 594 bp, Homo sapiens
agtgatctgcccacctcggcctcccaaagtgctgggattacaggcctgagccaccatgcctggccagatgtttcttaaggacagcttgcccatgtccaatccacaggggcctatagtcctacacactagtctggactattcctaaaatccaccagtcactttgcggcctgcagatcttgcccgtggactccctctccccgacatttcttttccttttctcccccagtacagtcctggtcctgatcattgtttataggcttttatttttatttttgagacggggtcttactctgttgcccaggctgtagtgcagtggcgcgatcacaactcactgtacctcctgggctcaagcaatcctcccacctcagcctcccaagtagttaggactacaggcaaacatcgtcgtgcctggctaatttttaaattttttgtgtagctggtgatcttactaggttgctcaggctgatcttgaactcctgatctgaagtcattctcttgcctcggcctcccgaagtgctgggattataagcatgagccactgtgcctggcctatgtatggtctttttaaagccagcttctcaagaaccttctata

SEQ ID NO: 8756 - DNA, 798 bp, Homo sapiens
cagtgaatgtaagaaagtttcacatcagttcatcagttggaggatttttaaaaagtggggaggttaggagaaagacattttctaaattgttacctagaatgctggaaatgaatgtggtcttaaaaaaccatctaacttaaatcacacaacacacgggaatctcaaacgggtgcttctctccacatttcattgagaaatatttctacttggaaatgctgtactgtatgaagagaagaaatccaactccatttgatacacgatttgagtacaatagggcagtgcatggccaggtctacccattcttttggcctactggtgacccccatcttaagctggatggactactgcagggaggtggtacagcagcctcactccctacaagagactattcagagaagatccaattgaattgaaagataccaagagccaccctgatgcaggtgtctcaccctgtaaggtctaaatgaaaatcagatttttctaaaattaacaggtaagcagtttttttcctaaataaaagcaaaaagactatttaatgtactttaatatgaaaaccacaaaatgaaaaaatgccgaatttcccttaaatatttacgattagaatatcaggacacagtactaccatgccttgaaacctcaggaatgacaaaggacacttaactaagttaccaggaagtaatgggggtaggaggtgtgaacggaggggagactggaggtgagtgttaaaagagcaattatgataaatgtatcctttaaacattaactaaaaaacatttatttctttgttctttcactttc

SEQ ID NO: 8757 - DNA, 156 bp, Homo sapiens
tttttttctattaatgtaacttcaatatttttaattcattcttcagtttttcttctattttttatttggggcttagtatataactttcaaatttacatgtttatataaatgcaattaatttaatattctttaaaaatctttcttctagtgtttcag

SEQ ID NO: 8758 - DNA, 402 bp, Homo sapiens
caaattaacaatcatattattgattccatagcaacgtgttaaatttgctatatccagtagcctttacattagtatagaagtaatgaacctgcattttgtattaagtaaattatattatttttaataaatcagtaaaacagcaggacaccagaatctttttgagagattttctacttcctggtcctactgctttaacttcactgtttgtgacaactttgtgtagagagatattattgaagataaaactgatggccctggctctgtaggtgatcttcccaatgaaacactcatggagatagtgttttacataaatttttaaaagcagtgatgacttctgtgtaggagtcagtttttttaaacttagattataaatgactgtgtatacagtgaatgttgctgaaa

SEQ ID NO: 8759 - DNA, 1714 bp, Homo sapiens
agtgagctgtcattgtgctgctgccctccagtctggccaacagagcaagactctgtaaaagacttctctgcattcatcttcccttttccccttccagtgggaggtgaggccaaatccctgactaaccgtccagattcttaatacctagccaagacatcagtcctcactttattttaggctgtggaaatgaaggcctctttatggaaaagtaattttaagacagatggaaacttcagaatcccaaagacttgagagttctggtgaaacagttcaaggaaatcccagctgagagacagcccagctctcagactttgcaggctttctgccatgttacttaacttgacagcagcccttatgattacctaaatgaccaacccaacttgcttttgtccatgccttaaataacataattaacagagttagaagatcaggaaagaggcctttttgtgtgtgtttcagagttcattataacccagtggaagtggaggtgagcctacctagaggttcacatttcagcctctctccgaagacaaggcagcaatgagaatggaacactgtgcccattcgctctgcttcaatgaaggatgctctttttacattttagtggacagcacaattaagcaaccgcagttggggcccagggattcagcacctccagtgagtcaggtagcctgacaggaaatagctgtaacagtctgtgcccactgtcaccttcctatccttgataaggaagctgtcctggtgcactgcttctcctgcctcctgagtgttggtacagtgggtggcctatccagatcctcagtcacccagtgctggcttcttagggaatgtgtcattgctgctgttgcagcagggcatacatctgatggtaaccgttctccgtttggagaagggttttggttctgtaagtggagggaagcgaaacctgtaaacacttgtgatgaagcggtccagggaagaacactctcaaggctgccagtgggattgttagtttcagcatgaaactaactttgactttgacataggcaaagttggggaacccagttttaaattttgagggcagtaaagtggttaggctgatgttgtcacactgtccggggccacatttgtggtaactgagtgacttaggacaagtcactttgtatctcttctgtcccaatttcatcctcggtaaaaatggcgatgctaattgtctgccccaagggtgggtgtgaggattacatgaggtaatgcattgtaaagcatctagcaccaagtgttaactgctattaaataataggtattaggatgtatgcagcttgacagctgtgtagtaattaaccacactggctgttttgtgagggcatcatctatgctacagaaaggaataatcattagactaaatattcctagaaatcccaaacgacaggctcttcaaactcaagtggaaatgagacctcatcagagtattctcctgatccagtagagtgtggtgtgtggagtcaaagcctaggtttttgtccatccactcctagttggatgttacctaacttctttgagtatggttttttcgctggtgatatgaaatcagtatgtattttgctgcgttattgtggagcttgaataaaatagtaatgcatataaagcagtggtgtagtgcctggcccatcacagcaactcaagaaaagagagctgccactatcgccgtcatcaaagcacccacttcttccctcca

SEQ ID NO: 8760 - DNA, 425 bp, Homo sapiens
tgcattcaagcatctagcactatattaggatgtcatgcagcttgacagctgtgtagtctgtaatgctacagaaaggaataatcattagactaaatattcctagaaatcccaaacgacaggctcttcaaactcaagtggaaatgagacctcatcagagtattctcctgatccagtagagtgtggtgtgtggagtcaaagcctaggtttttgtccatccactcctagttggatgttacctaacttctttgagtatggttttttcgctggtgatatgaaatcagtatgtattttgctgcgttattgtggagcttgaataaaatagtaatgcatataaagcagtggtgtagtgcctggcccatcacagcaactcaagaaaagagagctgccactatcgccgtcatcaaagcacccacttcttccctcca

SEQ ID NO: 8761 - DNA, 449 bp, Homo sapiens
agcaaagacatggagtcaatccaggtgcatccaaggcagattgaaaatccaaggtagattggaatgttccatacataccatggaatactatgcagccaagaaaagaacaaaatcatgtcctttgcagcaacatggatacagctggaatccactatcctaagcaaactaacacagaaacagaaaccaaatatctcatgttttcacttatgtgggagctacacattgggtgcacattgtcataaacctgggaacaatagacactgggaaataagaacagggagggacagagtgggccagggttggaaaactacttattgggtcctatgcttactacctgtgtgatgggttccactgtactctaaaccttggcatccctcaatattctcttggaagaagcctacacaggtaccaccttaatttagaatacaaactagaaaaaaacaaacaaa

SEQ ID NO: 8762 - DNA, 284 bp, Homo sapiens
cacgtcctctcaccaaggctctttatagcacaaacattcttactttgaatgaaatcgaattgattgatttcttctctctggccgatgctttggttgtcatatctgaaaactcttcaccaagcaccaggtacagaagattttctcttctccttttttaccacttacgagtttcatactttacatttaaatgtacaatccattttgagttaatttttgtgtaagttgtgagatttacgttgagatacgcttttttttgggacagaatcttgctctgtcacccaggc

SEQ ID NO: 8763 - DNA, 215 bp, Homo sapiens
ggtgaaattcagaggtggggatgtgggactttgactttttactttatacacttttgtgtgatttttttaaattatggatttattttattattgataaaatatacaaaggttacaatactcctgattgtaaaaaaaaatgcttagtaaagtatatttagaaaacagggaaattggaacagtttttagccaaagaaaatcccacactacatattggc

SEQ ID NO: 8764 - DNA, 928 bp, Homo sapiens
actggggatgccacgggacaaggctgctggcctggaaggtagtcacgtggagaaccgcaggagatgagattggaaagtagtaataagccatgtggataagaacagaggagcgggttttaagggggacgtcctgaaatgctgctcatgtcgtttcagttccatagaccacaggaaatgcaggtgagagggcagcccggtgggaaggaaggaagagggtggtggtgagccaggtgagtgtggagccgcccagggcaccgtgctgtgcgatagctcaggcatcgggtgcttctgccaaacccttcagcagctggtttggggccaaacgtccttcctgtgtgagagaaggcagagcctaggcagcattccaaaccccatccagatgggaggctgagtgcagagcaaacggagcccagcactccagagccgtgtcccttcactgccatgatcacatcacaaacagcgaggcttggagaggacttaagagctccttcaatgccatcttccatccactgcgtgagccagaatagaaaaaaaggaataagaagaggtcggttaagctctctattaagttgagaaaatgggaacttcaggtgatcatgtgagatattcaagttaaaaaaattatttaaaaagcacattcttattattaaaattttagaaagtacagagaaggaaattttaataacctacacctagaacactaagatactggtaacgtagaaaaatgtgtagttaatgccttgatggattcttttctatttttttctctagcaatatttatgtctatccacagaaagcgtacactcatgtatttgcatggctaatatattttatgtaaagttctatatatttctcaacatttcacttaatatttctttataaacatttttccagtgaataaaaatttttccaaacagtaaaaaaaaga

SEQ ID NO: 8765 - DNA, 297 bp, Homo sapiens
tgggaaactggggccttctttgagtactagtgagtaagacattttgcaacagtgctgagtatgaaaggccctggtctctgaaaggctaatgcaaatgttggaaggcctttaaagaagatgccaagccacagtgagtgccagctgctagctctgaaatagtgatgtgaaaaggtagatttcttttgtgctatatttgtgctaagcagtgcctttaaaaatataactagaatcattacggtgaatagacacagaaaataattttatgttatacagtagttgtatactagcttcctttaa

SEQ ID NO: 8766 - DNA, 1216 bp, Homo sapiens
tttgatacataagctgatgtctttggtattttacttttgtcagggagaattgaaggcggcatttgactcatctaggggcacagttggttttttgaagttgccgtagtacagtttgattagttataattctacagatgttctgccaaattgtagttttgggctttcttacaatgtaaatccttttattctttaggattttctatagctatagcaatttggtaggagctagcattctgaataaatattttataaaaaatgttagtagcaaaatttgagggagaacattctctttgactgtctatctggcagctttcttgctttggtttttctctgtgccaagacaaccaatcagcatctgctttgcccactcaaccccagttgggcagtagtctaaactgaaatcctggcccgcaggcctccctgtcgcccgcatcctgtcagaactgtgtactgtactcttctcttggttgctgtcgtatctgcatgcttcgtatagaaggacaagtcctttatctaggctgtaggagccagggtgcagattgtgatcctcttgaatgaagttctggaggaagtttctcttgagacagtatttctaggtccatgttgacatgaaatcatctgatgataaaatggtgacgattcagagctctgttaccatcttaaagatggactcggagaggaaggagaactcgtgtcccctgcagggggttcgtgggcaggtgtccccgtcaggcccgcgggctggaagtgtcgctgctggggatgaaagcagctgctcctctgcacgcctgctggtttcctccttccacgcttcctttctcactttggacacctgattctataggccatgtgcaggctgtgtatctggtgtgtcccctgatagctctgcaggtttgatggaattcatcccagggtgcgttggccacgggtgatctaccaaaacagtttgagttttaaattatccagtgcagtggttcctagactcactttgtgcatggaggcagccccctcttcagatggagtcttagataaaatgagtgaattcactgggtgggcagctgaggctgcctcagagtcttcagaggaaggccttggcctccaaccccacaactctaaggttctgagaaggcagaatgctaaactcgaccaacttttgattttcttttcaaagtacactttttcccccccaagactctgtctcaaaaagaaaaaaaaa

SEQ ID NO: 8767 - DNA, 1237 bp, Homo sapiens
acccccaaaccactctgcatcctccccagcctcgcagactgctggcttctccaagccatctttccttctgtctgtctcctctgctgagctccatgtgccgctccttctcctccccattctcccgtttttctgtcctcagaacaccgtcgaagacgatgttctgccaaattgtagttttgggctttcttacaatgtaaatccttttattctttaggattttctatagctatagcaatttggtaggagctagcattctgaataaatattttataaaaaatgttagtagcaaaatttgagggagaacattctctttgactgtctatctggcagctttcttgctttggtttttctctgtgccaagacaaccaatcagcatctgctttgcccactcaaccccagttgggcagtagtctaaactgaaatcctggcccgcaggcctccctgtcgcccgcatcctgtcagaactgtgtactgtactcttctcttggttgctgtcgtatctgcatgcttcgtatagaaggacaagtcctttatctaggctgtaggagccagggtgcagattgtgatcctcttgaatgaagttctggaggaagtttctcttgagacagtatttctaggtccatgttgacatgaaatcatctgatgataaaatggtgacgattcagagctctgttaccatcttaaagatggactcggagaggaaggagaactcgtgtcccctgcagggggttcgtgggcaggtgtccccgtcaggcccgcgggctggaagtgtcgctgctggggatgaaagcagctgctcctctgcacgcctgctggtttcctccttccacgcttcctttctcactttggacacctgattctataggccatgtgcaggctgtgtatctggtgtgtcccctgatagctctgcaggtttgatggaattcatcccagggtgcgttggccacgggtgatctaccaaaacagtttgagttttaaattatccagtgcagtggttcctagactcactttgtgcatggaggcagccccctcttcagatggagtcttagataaaatgagtgaattcactgggtgggcagctgaggctgcctcagagtcttcagaggaaggccttggcctccaaccccacaactctaaggttctgagaaggcagaatgctaaactcgaccaacttttgattttcttttcaaagtacactttttcccccccaagactctgtctcaaaaagaaaaaaaaa

SEQ ID NO: 8768 - DNA, 465 bp, Homo sapiens
ttttttttttctttgagatggagttttgctcttgttgcccaggctggagtgcagtggcgcgatctcggctcactgcaacctctgccttccggtttcaagggattctcctgccttagcctcccgagtagctgggattacaggtacccgccaccacgctcggctaatttttgtatttttagtagcgatggggtttcaacatgttggacaggctagtcttgaactcctgacctcgtgatctgcccgtctcagcctctcaaagtgctgggattacagggcctctttttcttaactggacaagaattccttcaaagtttttggtaatgtactttcaaagcaagccctcccaaataatggggtgacaattcccactggaggttaccttcccagtgaccagaggctaactgtatctcttgtgtttggggcagggtagcaagaatggtgaaggagttgaaaccctactagggg

SEQ ID NO: 8769 - DNA, 453 bp, Homo sapiens
taaatccatgcatacatggtcaactggtcatcacaaacggtgccaagaatacacaatgggaaaggatagtctcttcaactaatgatattgagaagactggacgtgacatacaaagcaatgaaactggaccttatggcatacacaaaatatcaattcaatattattattttacatttaaagatctgaaactgtaaacctgctagaagaaaacatacatgaaaaaccacttgacagtcgtcttggccatgatttcatgggtatgacacaaaaggcacagggaacaaaaacaaaaataagtaggactacatcaaaataaaaagttcatgcacaacaaaagaaacagtcaactgagtgaaaaggcaacttactgaatgggacaaaatatttgcaaaccatatatcagatacgaggttattctccaacctatacaaggaattcctactactcaatagt

SEQ ID NO: 8770 - DNA, 181 bp, Homo sapiens
ctcattctctaataagctgctcctctctagttatcaaggtagaatgatctgataaactaattgatgctataagtgtcatgggatatgctgccagggttatctacttcagcagtagcctcttcccagacaaagcaaaggtactcgaaagaggattctttagtgatagaatgacacacactac

SEQ ID NO: 8771 - DNA, 412 bp, Homo sapiens
cgttcctcacactgtggccacaggacagaagtcgaggctcaggcggggggcctggtaaagactttgggtttttcttgggacccccaaagttctatcccctaaaagcaaaggtaaaccagcaacagaattgtctttgtggggactgaagccagccttaaatcacctcaagccctgagagaattaaggtgagccgctcaccgggacacctgtggacagaaaagtacaccttccctggaggaaggtaaaacaaaacaaaaacagacagaagtcctcactgcacggtgctggaatggatccgggtcaggaaaaattattacaaagtgcatgatggggacattcacaatttggaatatgccttgtacattgtgcaacaaaattctaccaatgataaactccagaattttttttgttt

SEQ ID NO: 8772 - DNA, 325 bp, Homo sapiens
gtacaggtagaatgtgtgcatcctctcatctgcctgtgtcttcattggaaaacacctgtgctagcctttatctgtgtctgcaagtgaatatttgaggtctctgctctatttattttattttatttatttatttttgagacagagtttatttatttatttatttttgagacagagtcttgctctggcgcccagcctagggtgcagtggcgacatctcagctcactgcaacctccgcctcccgggttcaagcggttctcctgcctcagcctcccttgtggctgggatacaggcacctgccaccatgcccagctgatttttgtatttt

SEQ ID NO: 8773 - DNA, 388 bp, Homo sapiens
ggttaagttattttgcttatttagtagcaaccacactctgataagagtattctgcccatttcagaaatgacgttttttaaaaacttatctaggaaacagagaccaaaggcaataaaggatgaaaggctaaaagatcatcttctctatgaagaaagagatcacacaaacttcagttattaagcttgaagaagagacagcttagaggcacctaaatcattatctttaattccatgaaaatgtatactgcatgaaagatggtgaccagatgtttctcatcacttctgaggagaaaataaacagaaaaagccttgaacttcagcaaaagggctctgagaggccatgttcctgagctagtccagtaagtctcagattttaatgcacacgtgag

SEQ ID NO: 8774 - DNA, 422 bp, Homo sapiens
aaaaattttaaaaatcagccaggcatggtgatgcatgcctgtagtcctagcttctcaggaggctgaagagggaggattgcttgagcccaggtgtttgaggttacagtatgctatgatcacagcactgcactccagcctgagcaacagaactcacatctgtaatcccagaactgtgggaggccaaggcgggaggatttcttgaggccaggagttcaaggccagcctgggcaacatagagaccccatctctacaaaaaaaaaatttaaaaatataattagttgggtgtagtggcacgtgcctatagtttcagctatataagaggctgaggcaggattgcttgaccctaggagtgtaaggcttcagtgagctatgattgaaccactacagtccagtctgagaaagaccctgtctcaaaaaaaaaa

SEQ ID NO: 8775 - DNA, 345 bp, Homo sapiens
aataaaccccatgtgtcaagggtggggccaagtggagataattgaatcatgggggtggtttccaccatattgttcttgtggtagtaagtctcacgagatctaacggttttataaatgggagttctcctgcacaagctcttttcttgcctgctgccgtgtaagacatgcctttgcttctcctttgccttccaccatgattctgaggcctccccagccatgtggaactgtgaatcaattagacttctttgctttataaattacccagtctcaggtatgtctttattagcagcatgaaaacaaacagacgcatatgggaatctaaagtcaagggccaagaaatctgtg

SEQ ID NO: 8776 - DNA, 353 bp, Homo sapiens
aaggaaccttggctgcctcaccccacaggtcgggcagggccacctggctgggaggtgccgggaaggctgggccctcactcctgaccgccagctcacaccgccgcaaagccatctccacaaggtctggctacaacacggagggcagactcaacagagaacagtgttgttaccatgaaaatgacaacctgtctttggaggaggccccgtgccactgagcatccagaaataaaccacaacatggacaggcttagaacaacaaggaaagctgccaggtcagaagagaaaaatgagccacaggggtcggataaggctcacacacgtcctcagctaaaaagggcaggaacagaaccttc

SEQ ID NO: 8777 - DNA, 409 bp, Homo sapiens
cctctagtgattctcagaagaactacgggatttttctgtgaacccagcaacttagtttcttagactgcagtaaagaagtgttgaaggcaatggggtggatttccaccagaaacaggctacagaggaatattccagagaagataccaggagtatgttttcagccttatttcatattttacagagtgcttaccattgctaacaatgaagatatagcatggatggaaaccctattgtcactcatgataacctaattcagagcacaatatttactgaaaataggttgatagtcttctggattttaaagtgtggttctccatccctttttttctggttttattttgtcactagcagttagccactaggtgtcagtagcaatccaacatcacaatacaaattgccaactctgaaa

SEQ ID NO: 8778 - DNA, 1385 bp, Homo sapiens
tggaactacaagcatgcgccaccatatgcagctattttttaaatgttttgtagagatagggtcttactgtgttgctcaggctggtctcaaacacctgggctcatgtgattcttctgcttcagcctcccaaagtgctgggattatacgcatgatacactgtgcatgaccagaaaatataaaacttttaaaaagagcattgtttcatatgttggaatttgactaatatttctctttttgaattctgtgagtatataactgatacaatttttttcttctattatgaccagtttcttacctaagcaaaaatgtatgaccagttggtttgtataaggttagcaataacttaggggtatattctcttcctgcatcccagtgcacagtgagttgtatatcacaaatagagccactcagatacttgggccctaacaactggcagcactaccccaagtgatataccagatggcttgcagagtgttgtatcagggtagtccattattcatagtgtgtgtactctttgtgttgtttttttttcctccttattcagccatgaataagggtaccatgaactacctatacccagctgcctggtgtgtctgtaataagcagagcagcctgtgagattaggagcctctgggatgggacgaggtttgtttctgagcctttgctactagcccattcaatgctggagcacaatcagaggccagttttactgttagcctttcctagagaaactcccctcttccttcacagttggtccagaggttatagttgtgttcagatgtgtagaagagagcccctgcggggagaaagtccgtcccatcagctaagtctagctaaagcctacttcatgggttcagaagacattaatggttccacctgtttctacactgcagttctaaggatgctgtattgatcagaagtagtagtagcatgatggttttccaataatcagttctgttttcagtggaaaaaatgcttttgatttatttagggtctggtatatatttttcatgtcagtttacctaatatgcatgaaagtgttttaacatctatgtatgtctttacagaagttagttgtagctggttccatatctattgtataaagaagtattaacagaataggtttgcttgcattattatactttcatcaatgtgacagtttacttggatttttgttttcagaaagtggtattttcatacttgtatctaagtattacgttgcattagacaaagtgtcttccatgaagataaactgccatcttagctaatttggaacaaccaagtcctattaatataaatagaaaatattgacacaaagaattcttttcttatttagttggttatttaatttaaagattaatatttttaccttatggaaagtttgg

SEQ ID NO: 8779 - DNA, 1110 bp, Homo sapiens
ttattcgtgttgcaccatgctcagatcaagtaacccaggtttccagatatccaagggaataccctggaactcttaatggtccttggaggaatcattaaatggcctcttccctggactcattgaaccagcagtaactcctaagttggatggatctcaatcttgatttcaattcaggtctctaacatttgagtacttgcttttcatgtaggtgctcaggatctgctatataccatagattttaaggtgacttgttgagactgagaaaagaaatgtctaacgaacagtattaatgcagtcttaatacaactcaggacctatgtgacctttagtttctcatcagaaagggaaatttacatgttattgcctcataattatgagccagccttttgtagggctaacagtgcatttgaccagctataaatgtggcctccagatattatgtcatatttatagaagttattttttaagtgcaatcagtcattgcctttggtagaaggaagttccctttggagtgttgtactaaactaggcagcatggatggacaaatgaatttcccaagggcttcaactactagaaatcatctggtaatataagggctggccccaaagttttttaaatgaaaaaagaagcatgaaggttgaaagaataagaaaaaggaaaatattatataagtataaatggatttatgacatggcctgcatcagagatttagtattgttttcctaattcttatacattagactaacatgcacagcttctaatgaagaaacacaaatgctctcctgcccctatctatagttccagatccgtttttgtggtcccagaatgaaggcaaataaaacataacatacacagcattaaccataattttttacacggccaaaacttcacctcaagatataatagagaacatttttggtattttccatgggtggcttagaaacatgcctttattattgtcaataagacttacctgctagactaagaccttaccctctttttgctgtggattcagaattttatgactatacattatctgttctttattatatactgtttgttttatgctagacactaatcctttctggagcagaggaagaaacaggaatg

SEQ ID NO: 8780 - DNA, 447 bp, Homo sapiens
ccatctgcaattcctaaggttgagctcaatgcatcacatgtagtagatgttcaagaaatgtttgttaaatgggcagttgtaaacagagacagtgccgtgtttatttcgttttccagaaaggcacctgactccttgctttgcacataacaggtgctcaagaaatgttgaagaaaaaagcaaattgctttgaatgcagtgtatcctaaaaccagatttccaggttgccccagtactctgtacaggcctccattttggctgttaacacagtgtatcttttgttacattaaaatgggtccacgtttgcatctcctccgaaattataaactcctgggagtgcagggatgtgtctcatacattcttccttgacttttccacagcataccttagcacagagttggatatgtagtagatgttcaatggagaattactgaattttcttaaaaaaaa

SEQ ID NO: 8781 - DNA, 285 bp, Homo sapiens
ccactgcccaccaactgtcatgcctgactcagtgagaaccctctcacttgctctatgtttacccagtgattgccaggaccaggtgagaacaagcttgttaccgttttctattactctattaggaacgatcttcatctcatctttctcttctttaacctgtaggtgttcacattggtaggaatgcaccactgaaatcatcttgaggatgcctgaggtccacatggccagctaggttctcctgttatcagggaaggcagcttgaggcttttgcagctctactccaac

SEQ ID NO: 8782 - DNA, 527 bp, Homo sapiens
gatcttaaatgcttttaactttgaacttgtgacaataatgtgctattaatttcttcatccagttttatcaggatacagttttctgatagatgaagcttattctctagattgtcagtaccgtttatttgaattatttaatgaagcttagggaacaaaccccaaaatttcccaccttactagcctaatttgaattttttaaaacagcttaattaaaccatcattaaacatttataattgctggctgggcacagtggctcatgcctgtaatcccagcactttgggaggctgaggcaggcagatcatttgaggtcaggagtttgagaccagcctggcccacgtggtgaaaccctgtcccttctaaaaataactatatatatatattagctgggcattgtggcaggtgtctgtaatcccagctactcaggatgctgaggcaggagaatctcttgaacctgggaggcagaggttgcagtgagccgagatcgtgccctgcactccagcctgggcgacagagcgagacttcatct

SEQ ID NO: 8783 - DNA, 644 bp, Homo sapiens
  misc_feature (594)..(594): n is a, c, g, or t
  misc_feature (621)..(621): n is a, c, g, or t
ggaggaaggattccaccagtaaggaggcaacaagaggtctaggcaagatatgggagttgacagctggtctaggctgttagtggagaaactgggaagcaacagctgggtcaaaagtagcttttcttttcttgtctttgtcttttcttttattttctttttaagacagggtctcgctctgtagcccaggctggagtgcagtggcacgatctcggctcactgcaacctctgcctcccgggttcaagtgattctcctgcctcagcctcccaagtagctgggattacaggtgtatgccaccatgcctggctaattgttgtgtatttttagtagagcagtgtttctccatgttggctaggctaaaaatagctttatttctgcctcgttttatgttcaggtcccccattagacagaggaaccaaggccagaatgaggcaggggcactggccaattgatctcccaagcacagtgaatctgaatggttgtagagttgtgtaatggatcccactgaggtgatcagggcccaaagtggagggtagatggccaggttttaacaaaagagggaatagtagttgaggctgaggttgcagtgagccgancctacgccattgcactccagcctgggnaaccagagcaaaactccatctca

SEQ ID NO: 8784 - DNA, 397 bp, Homo sapiens
gggacagcccatatccatggccctcagggtcaggctaagcacatcccagcccagcccatcctgcctggcctcttggggccaggcctcacagagcagaggggtgtgtcctgggcggggggaggtaggattctctttttcctttctgccagtgagtcactcatagcggtgagagtgacctcccaatgacacccgcccactgtggcctgggcaccgagcctgggggatgtgggcagcacagatggagacagcagcctgggcaggatggccagggagcctgggagatggacacacgtacactcacacccacagtcctcttgtcacacacacacagagactcatcctgacaccaacacaggttcacataaacattcccatacatttggccgggcgcagtggc

SEQ ID NO: 8785 - DNA, 625 bp, Homo sapiens
acagttcctagccttgtagagactgatgaatcaatcaaagagccaattactcaataggtagatggagaatgtgagctggatgataagaggtagaattataagtgattacacaagtatatttaaaacatttaaaaatttctgaattgatgtcactctaaagattagctctaactataaaatcttagaagacaacacaggggaaaagctttatgacattatatttcacagtgatttcttggatatgataccaaaagcccaggcaaggaaagaaaatatagataagttggattttatcaaaattaaaaaaaaaaacttttaggcatcaaaggacacaatcaacagagtgaaaaggcaccccatggaatgggagaaaatatttgaaaatcatttatctgatgaggaattaatatccagaagatttaaagaactcctacaacacaaccaccaccaaaaatcctcatcaaaaaacgggccaaggacttgaatacacatttctccatggaggatacacaaatggccagtaagcacatgaaaagatgctcaacgtcactcatcagagaaatgcaaaccaaaaccacaatgagaaaacaaacaaaaataataaatgttgataagaatctagaga

SEQ ID NO: 8786 - DNA, 464 bp, Homo sapiens
ccaacccctccttatcagttcagtgagggtgaatgagttaatgtcgtgaaagcacttgagttctccaaaacaaagatgttgtgataatattactacagtactttgtgattacaagttagctttgtaaataattaccaatgtgccatatccaatcgtgttctatcttggcctaggagtgttaggatttaccctcatttataagtaagcctgttaagcactatggatgttgagccagggaattaatatagccctcctcttcccaccaaataatctctcctctaggttaaatttctagaatttaaaaacacaatgaggaacctgattagggaacatgggcaaagatgattttttggggagaatgtaagtgtgtttgaggagtatgaatttatggactaaatatgcattttaatagattttgtgattgaagctaatgaaactttccaggactcttttgaaattttcta

SEQ ID NO: 8787 - DNA, 1735 bp, Homo sapiens
gtgcttctaggtcatttcatgttttatagggaaaaagatctttgtacacctcctcaacctgttagtagaaatgttgacttcgattttttgcaccctcttcacaggacctcataagttgcctctgttcttggaaagcaatgggaataaaaatatgctgttgaaaatagtgcatggggccaggcacagtggttatgcctgtaatcccaacactttgggaggctgaggcgggcgcatcatgaggtcaggagatcaagaccatcctgaccaacacgtggtgaaaccccatctctactaaaataaataaaaaaaaaaattagccaggcgtggtggtgcacgcctgtagtctcagctactcgggaagctgagacacaagaattgcttgaacccgggaggtggaggttgcagtgagccaagattgcgccactgcactccagcctggctacagagtgagactccgtctcgaaaaaagaaaatagtacatggagggcatgcattttagtttaggaaacccccctcccttcccagttccagagggagaaattataagctatactgtgccaaaagtgagtggggctgcagagagaatggtgccttttctcaccttctgagttaatgcccgacatctgccattggattcattgaccaaaggaagtcatttctactgtataaactcaggagtatcatagcccaacaagtaaataataaatgttcattggttttggaaggaaggaaaggtgagtattaccccaccaaataccagcgaagagcaccctggctttggccatctttccaaggttcataattgctgtgggcctggtgagccctgttcccaggtatgcaagggagggcttctccaggccagacatttctgtaggttttcaggtagcaactcccccatcatattttgggtgtcattccccactatctctccccacttctcagcctgtgccccagaaacaaccacagcagcctcattctgcagacttaacatctgtcaaataaccttcctgaaaaggaaagttattggaggaatccaggccaaacaacaagtagaatagagccatctaaagttattaataatgagttcagggaaatagatgaattttttcctggcatagtcaatatttatatctcacaacaagtcaaaaataattttccatttggaaaacaaaacacaccatgactgtaattgttaaggcatataatcatgaacttcacatgctccctcaacaaacgttactgctctagggaaatcatagaaaaggaccctcttattccccaggggatcaaagcaagtccccttaggaatttcatgtgtgccatgggtctgtttttatttcacagtgactagtcatatactggagtagctctgttgttcattatttgtaacaggtccatgtaacagtcaagttagcattcaagcaattatggatgtgatactatgatgtacttttgttatgattgtatatgattaataacaaagttatttttcttaaaaaaaaaacaacacaaaaaaaagaaagaaaacaaaaagacaaaaaacaaagaaagacagaaacaaaacaaaaaactaacaaaaaaaaaagaacaaacacaacacaacaccaacaacacgaaaagaacgaccaacggggggacacataaagacgacacaggacaaaagcaaaaggcgagacgcgacaaaaagaagaggcccggcaaaaaccatactcacaaataacaaaaccacaaaaga

SEQ ID NO: 8788 - DNA, 1649 bp, Homo sapiens
gtgcttctaggtcatttcatgttttatagggaaaaagatctttgtacacctcctcaacctgttagtagaaatgttgacttcgattttttgcaccctcttcacaggacctcataagttgcctctgttcttggaaagcaatgggaataaaaatatgctgttgaaaatagtgcatggggccaggcacagtggttatgcctgtaatcccaacactttgggaggctgaggcgggcgcatcatgaggtcaggagatcaagaccatcctgaccaacacgtggtgaaaccccatctctactaaaataaataaaaaaaaaaattagccaggcgtggtggtgcacgcctgtagtctcagctactcgggaagctgagacacaagaattgcttgaacccgggaggtggaggttgcagtgagccaagattgcgccactgcactccagcctggctacagagtgagactccgtctcgaaaaaagaaaatagtacatggagggcatgcattttagtttaggaaacccccctcccttcccagttccagagggagaaattataagctatactgtgccaaaagtgagtggggctgcagagagaatggtgccttttctcaccttctgagttaatgcccgacatctgccattggattcattgaccaaaggaagtcatttctactgtataaactcaggagtatcatagcccaacaagtaaataataaatgttcattggttttggaaggaaggaaaggtgagtattaccccaccaaataccagcgaagagcaccctggctttggccatctttccaaggttcataattgctgtgggcctggtgagccctgttcccaggtatgcaagggagggcttctccaggccagacatttctgtaggttttcaggtagcaactcccccatcatattttgggtgtcattccccactatctctccccacttctcagcctgtgccccagaaacaacaagtagaatagagccatctaaagttattaataatgagttcagggaaatagatgaattttttcctggcatagtcaatatttatatctcacaacaagtcaaaaataattttccatttggaaaacaaaacacaccatgactgtaattgttaaggcatataatcatgaacttcacatgctccctcaacaaacgttactgctctagggaaatcatagaaaaggaccctcttattccccaggggatcaaagcaagtccccttaggaatttcatgtgtgccatgggtctgtttttatttcacagtgactagtcatatactggagtagctctgttgttcattatttgtaacaggtccatgtaacagtcaagttagcattcaagcaattatggatgtgatactatgatgtacttttgttatgattgtatatgattaataacaaagttatttttcttaaaaaaaaaacaacacaaaaaaaagaaagaaaacaaaaagacaaaaaacaaagaaagacagaaacaaaacaaaaaactaacaaaaaaaaaagaacaaacacaacacaacaccaacaacacgaaaagaacgaccaacggggggacacataaagacgacacaggacaaaagcaaaaggcgagacgcgacaaaaagaagaggcccggcaaaaaccatactcacaaataacaaaaccacaaaaga

SEQ ID NO: 8789 - DNA, 1425 bp, Homo sapiens
gtgcttctaggtcatttcatgttttatagggaaaaagatctttgtacacctcctcaacctgttagtagaaatgttgacttcgattttttgcaccctcttcacaggacctcataagttgcctctgttcttggaaagcaatgggaataaaaatatgctgttgaaaatagtgcatgggggcatgcattttagtttaggaaacccccctcccttcccagttccagagggagaaattataagctatactgtgccaaaagtgagtggggctgcagagagaatggtgccttttctcaccttctgagttaatgcccgacatctgccattggattcattgaccaaaggaagtcatttctactgtataaactcaggagtatcatagcccaacaagtaaataataaatgttcattggttttggaaggaaggaaaggtgagtattaccccaccaaataccagcgaagagcaccctggctttggccatctttccaaggttcataattgctgtgggcctggtgagccctgttcccaggtatgcaagggagggcttctccaggccagacatttctgtaggttttcaggtagcaactcccccatcatattttgggtgtcattccccactatctctccccacttctcagcctgtgccccagaaacaaccacagcagcctcattctgcagacttaacatctgtcaaataaccttcctgaaaaggaaagttattggaggaatccaggccaaacaacaagtagaatagagccatctaaagttattaataatgagttcagggaaatagatgaattttttcctggcatagtcaatatttatatctcacaacaagtcaaaaataattttccatttggaaaacaaaacacaccatgactgtaattgttaaggcatataatcatgaacttcacatgctccctcaacaaacgttactgctctagggaaatcatagaaaaggaccctcttattccccaggggatcaaagcaagtccccttaggaatttcatgtgtgccatgggtctgtttttatttcacagtgactagtcatatactggagtagctctgttgttcattatttgtaacaggtccatgtaacagtcaagttagcattcaagcaattatggatgtgatactatgatgtacttttgttatgattgtatatgattaataacaaagttatttttcttaaaaaaaaaacaacacaaaaaaaagaaagaaaacaaaaagacaaaaaacaaagaaagacagaaacaaaacaaaaaactaacaaaaaaaaaagaacaaacacaacacaacaccaacaacacgaaaagaacgaccaacggggggacacataaagacgacacaggacaaaagcaaaaggcgagacgcgacaaaaagaagaggcccggcaaaaaccatactcacaaataacaaaaccacaaaaga

SEQ ID NO: 8790 - DNA, 483 bp, Homo sapiens
ctgcaaattgattctttttcacatctatttccttgtcttgtaacttttaccctttaccttttatgagatgcagaaaaaccctctcggctttgcattagcacccgtgacagatcctgttgatccaccactgatttttagcctgaactgggatggacactccacaggagctcaggctctcctcctcctgtttccatcttgctccttcccaccttggagccttcgccagcaccatggatgtcccctcagccttcatgcaaatattccccaggtatccagaagttactgctcagggaacacttgcaggcagacaagctctccagcctcctgtccttcaggggacaaatttgggaggcattctgtagacctcctcagaggtccagaggaatcacaccagtggcctcaatactgtctctcctgctggcttctcctggtttcccatctcactgtcccctctccttcagatctgcttcctgggatcacctc

SEQ ID NO: 8791 - DNA, 328 bp, Homo sapiens
tcagaggttacaagcaaagtcataaatcaatacgtggacactgtacattattttgacctaaaaaggtaggatggacatctcagagaaggggcttacaggtcataggtagattcaaagattttttgatttgcaattggttaaggaggcaaagctttgtctgaaaatttgggatcagcagaaaaaaaggttagctctggcttgcgggtgtgacttcttccaggccccacaggaagaactttagaacaaagcagcggttggagttcagtcctcagttccccattatctgaggtcttcagaccagtggatccatttggtggaggtatgggtt

SEQ ID NO: 8792 - DNA, 334 bp, Homo sapiens
ttgccaaccccagctatatgagtcaatcagacacaatacacactgagacccaaagtcaccatatgccccttcatttggtacctcattcattccagtaggtctagccccctgcaggtgaaggtctttacttttaaaagtcagttcatgaattttggaggggatgactgcttcttcaaatgcatagacacctacacaaagttacaagaatcacagagaatcaggaaaacatgacgccaccaaaagaacacaataaacttccagtaattgtcctcaaaaaaatggagatccacaagttgactgaaaaagaatttgaaataattgttctaatgaaatt

SEQ ID NO: 8793 - DNA, 498 bp, Homo sapiens
gggaatgaatttggactcctacctcatatcatgtacaaaaattaaccgaaaatataaaagttaaaaatgtaaaactcttaggagaaaacataggttgaaatcttcatgacctcggactaagcagtggtttcttagacgtaataccaaaagcacaagcaacaaaagaaaaatagataaactggacatcatcaaaataaaaaacttttatttatgcttcaaagatactatcaagagtgaaggccaggcatggtggctcacgcctgtaatcccagcactttgggaggctgaggcgggcagatcagttctgtccaggagttccagaccagcctggccaacatggcgaaaccccatctctactaaaaatgcaaaaattagcagacatgttggcagacacctgtaatcccagctacttcagaggctgaggcaaggagaattgcttgaacccaggaggtggaggttgcagtgagccaagattgcaccactgcactccagcctggg

SEQ ID NO: 8794 - DNA, 421 bp, Homo sapiens
cattctgaatcagcttatgtaacttgtccaaggtcagtggtggagctaatattttagttgagattaccttcatcaagacatcatacttaaccacaacactggttaaaccatggatagcttatgattggcttcatagccttacactcagttacctatgctgtccctctgcactctgcctactcttttacttggttgtgtcccttatgcctccaaatatttatgctactcattgactataaatgatagttgagcaggtttctttaccacaaaactctaacacttttaaatattagtattgaaaacttcaagaatctgttgtaggtgttcacaggattgtttgtctatattttatcccccacctccccagctgtctttcatagaattcatcccttttctcatctccttcctctcattgtaatac

SEQ ID NO: 8795 - DNA, 371 bp, Homo sapiens
agcactgaatgataagaagggataagcagttgaataatttatcaaggatgctggtgtagctaaatcaggagacaagtaggataccagtaggtaacatgggtgaagaactagggaggcaagagactgcatacaatcttacagatcaggagaaagggtctggattttactctaagtgtaaagggaaactatgggagagatttaagcaaataagtaagacaatattttacttgcaatgattaccctcactgctgtgtagagaatacatgtagaatagaaacaaggagactagtaatctcaggccaagagctgaggctggcttagacttatactacatttagcaagagtaagattaagatcttttaaggcgtgtt

SEQ ID NO: 8796 - DNA, 217 bp, Homo sapiens
aagaagctattctagcaaagctggaggaattccaccagactgacagaacaacacaaataagtccatgcctgacgcacagcaggggctcaaggcaagtttgtggactcgaagccctgttagaatggatggaatttggtcttatgaagcagatagaagaacaggagcttgactgtaaagatttgtctccacctcttaataaagcatatcatctccaaga

SEQ ID NO: 8797 - DNA, 423 bp, Homo sapiens
gctggtgagatccctcaatgggcccccctctgtgggcaccaggtccggcaactgtgctgaaggaaaacccacatatgtccagcgtgcggctccatctcccatactgccttgcactcaccttccctcccctactgaggaggaaatgagtgtctactgggcacccccttgtacccagcatcatgccaggagccttcagtaactggtgatgcatcccccaccacaaccctgggaggcggacaccgtgatgatctctgtttgacagatgaggggactgaggctaagagaggttaagtgacatgcccaaggtcacacagcaggcgcacggcagagccaacaccatctcctggcccacgatggttctgtgtcccctgacgcagcaggtgcacaggcgggccccccacctgctcctagctgggccgggtc

SEQ ID NO: 8798 - DNA, 938 bp, Homo sapiens
attctagttggtgtgaaataagaggtgcgtgatgagttggagcattactgcagaaaacatagccccatcttttccctgtgaggaatgggcatcccacaggtctgaattccctctggggccctggctgcagctatggctcaaggtggatgctgtttggccccacccgagccctgggaaggtgatgctcaggctctgccaccgtcggcaacactgaggatacgcagggatgaggtgccctgatttggggaacattacccttaagatactagtgtgatgtcattccacttcgcagtggggggccccagctttcaggccagcattgaggacaggagccgttgccatgtgaaaaagttattttcccaaacaatgaacaatcctcatgatgtcatgggccctgccagaggcccaaatccaatcggttctggtgctggggcagcctcctgtaacactatcctgagaggatgactccgcctgggttggggacagagagcagagaggccgggggtcttcaggtggggcccctgcatgtgtctgcgttcacatttcaaagtggctttcactcagaggaaggtggagcttagcaaagaattgcgcagatcaaggagcagcagaaatgggggcctccccctgcaggagcagcccatgggtcagaagtggggctggcatcggggtgagccaggacatcccaggatggaagaactaaatgaatggccacagaacggggatcactggagcaggaagtggcctcccccatgcgccttcacgcctggctgaaatctaatcctcattcttgggccctcatgtcacggcccgggcctggcttcccagcagcctgatgcagccaagctgttcccactcttctctcttcctccagaggaaggacctttgccgatgaagtcatgggaataaaacctccctctgccctgaaaacagtggga

SEQ ID NO: 8799 - DNA, 1004 bp, Homo sapiens
aactgaaaggttgggattaagttttggtgccagcttaaatcttccccaggctggagacccatagcaggacaacaataaaattctagggcagtgtttaattttcagtgctcactgtaagcctaccctagaggaaataatagcaagtcaaggagttagttccagggaagtgttttagttccagtactcatgtaaatcctccccagaatgggaaaaaaacaacagcccagcatttaagttctgatactaagtagtaaatctctaacaccaccaaagagcacttgcaaaaactggaagaggtagccaactcctcaaatgaaccatcatcaatgtaaaaatacaaggattgtgaaaacatggagaaataggatactaccaaaagaaaccaacaaacctccagcaatggacgcagaagaattgaagatctatgaaatgttgtacagaaaattcagaataatcctgttaaagaggttcagggaatcacaggaaaatatggatagaaaacaaaatgaaatttaaaaaataatccaggatcacaatgagaaatttgtttcactgtatcttttatttttatctttgtatcttttatttttatcttttataaataaaagatacaaaccttagaaataaataatacagtaagccaaaatctcattagaaagttttgattgaagcaaatttgatcaaacagagaaacttagtgagcttggagatagaccatatgaaataaccctatcagaggagcagaaagaaaaaagaatttaaaagagtgaaggagacctatgagaattatgggataccatcaagtgaactaacctctgtgtaatagggactcctgaaggagaccagagagaaaaaggcctagaaagcacatttaaggaaatagtagctgaaaatttctcaaatctggagaaagacaacaccatccagctacaggcttagaggtaaccaactatattcaatacaaagaggaaatccccaaggcacatcataatcagactagcaaa

SEQ ID NO: 8800 - DNA, 613 bp, Homo sapiens
aaggaaaaaatgcctaaaagcaaagataatatgagggtagccatggggaaaacataaattggcaccaaaatccttgaaaagtatcctaacccatgctgtttcacgtttacactttactcaatttacctttatcagaggggccagaaacaatcaattcaacttcattgaccctataatttacaaaggaatagcgtatgtattggctttggggtttctaagaaatagtaaaaggataaatagtgaattggtcacctaatcgggaaaggtggttccttggtaagatgataatttcaggtgtgaatgaccacagtgtattcctctgcccactccttcagcctcatagcctcagcaaggtggccacttcaatagaaccctgcaaagtcagagggcctgagttcaagccctaacgcctttgtctctctgatttacccactctgacacaaggcaggcttctcacttctcagagtgtttcctcattaggagtctgataataattcagatattacctcccaagggaaaagaggaaataatatatacaacaatgctttatatagtataccttgatatccctaaatcattatatttctggatgcttttcctgaagcaaatgttt

SEQ ID NO: 8801 - DNA, 365 bp, Homo sapiens
tgtagagacagggtctcatgatgttgcccaggctaatttcaaactcctggcctcaagtgatccacctcagtttccctaaaaatgtgctgggattataggtgtgagccaccactctggccatagatacctacggcaatgtttgctgccatcatcctattcttgttctaattcatctctccacactgctgccagagtgggctttatagaacacaaccctaatcatgccatttctctgcttagtggtcttagctggtccccatggcttacccaattaagtttagtggtcagaatcaaaaggataatcccctagacctatgcaccattgtcaatcccttcatccctgaatccagaggaagctggtggtc

SEQ ID NO: 8802 - DNA, 374 bp, Homo sapiens
gtccatgcagatagtgtctgctgggttacctctgctgatttccttttctctttctctattgaggagtctgtgacattgaaaatggtgcttgaggctgggcgtggtggctcacacctgcaatcccagcactttgggaggcccgaggcgggcggatcatgaggtcaggagatcgagactatcctggctaacatggtgaaaccctgtctctactaaaaatacaaaaaattagccaggcatggtggcgggcacctgtagtcccagctactcgggaggctaaggcaggagaatggcgtgaacccaggaggtggagcttgcagtgagccgagatcgcgccactgcactctagcctgggcgaaagagcaagactccatcta

SEQ ID NO: 8803 - DNA, 263 bp, Homo sapiens
ccgccagcaggctatccctggcatgttctaatgctgatggcaaataggaagagcacaaagagaaatacacaaagccttttcaagtctctttccaagtccatttgctgatatcacattggccaagtcaagttacatggctaagccaagcatccaaaggtgagtcaggatgcagagtgggaagacattgcaaattacatggggccatttttgctctctgccacaagagctgtggtctaggtgcctgtgacttattgccaagtccc

SEQ ID NO: 8804 - DNA, 963 bp, Homo sapiens
cactgcaaccgccgcctcctagttcaagtgattcttgtgcctcggcctctggagtagttgggagtaccagcatgcgccactgtgctcagctaatttttgtatttttagtagagacggggtttcaccatgttggtcaggctgttctcgaactcctggccttgtgatctgccccccttggcctctgaaagtgttgagattgcaggtgagagccactatgtctggccatatttaagcatatttatgatagtatcttaaatttaagtgaagggaaagaggaaaacatacacagccaatgaagtaagtttgaagtggagtgaaaggaaaagttggaggtaaaaagaggttagagaggtgggcaggggccaaatcatatagggcctttaggacatgggaaattctttggatttgttctgagattagaagtcatttagatattctttagaaagggaatgacatgatctgatattaaaaaaaaaactagaatcactgtgagtaggagtagatctaattccattctgactaaatagtaaactaatatgataatttggacaaatataaaaaggaattcctggctgggagcagtggctgatgcctgtaatcccagcactttggaaggccgggcaggtggatcacttgaggtcaggagtttgagaccagcctggccacatggtgaaaccctgtctctactaaaaatacaaaacattagctgggcgtggcagcaggcgcctataatcccggctattcaggaggctgagataggagaatcactttaacctgggaggcggaggttgctgtgagcagagatcgagccattgcactccagcctgggagacggtgcaagactcaaaaaaacaaaaaaaaaaaaaaaaacggaaaggatttcataatattaatttccttgacttagtgacttctgcctattttatttgaagtcattggttcttctcttctcttctcttgaga

SEQ ID NO: 8805 - DNA, 371 bp, Homo sapiens
aggggctctagaatgggaattctggccccaaagtggtagtgcaccagattttaataggcaggcttgaggagatggtgtctgatttatgtaaggcccaagattggctggaccaggtgtgatgtttacacagcctgccgggaagactggaaggctagaaatctcaccctaatctttttttttttttgagatgaagtctcgctctgtcacccaggctggagtgcactggcacaatcttggctcactgcaacctccgactcccaggttcaagcaattctcttgcctcagcttcctgaagctgggactacaggcacacactgcaacacttggcgaattttttgtattttagtggagatgaggtttcaccactaaag

SEQ ID NO: 8806 - DNA, 206 bp, Homo sapiens
cctcaagggtcgacgctttctccccagcacccttaattcccacggcagttcattagctatccagcagcagagtcccaccatggtcattagttaattttatttaccaacatatatctagctcctggcatgttatgtgggaaacagcagggatgccaaaacatggttgtgaaataaatgaaagataggagggagacaaacagagagta

SEQ ID NO: 8807 - DNA, 1268 bp, Homo sapiens
  misc_feature (608)..(608): n is a, c, g, or t
  misc_feature (1187)..(1187): n is a, c, g, or t
catggtggctcacgcctgtaatcccagcactttgggaggctgaggctggtggatcacttaaggccaggagttcgagaccagcctggccaacgaggtgaaaccccatctctactaaaaatacaaatattagaactgggtgttgtggcacatgcctgtagtcccagctactcgggaggctaaggcatgagaatcgcttgaaccccagaggcagaggttgccgtgagccaagattgcgccattgaactcctgcctgggtgacagagcaagactctgctaaaaataataataaaaataataataatagaagtacatacataaactttaaaatgtaatagaaattatattttgtattcacccttttcccctctgtgaatgaagaagtccaaggccagtcacgtagtacttctgcaaaagaggttatgaatgaatttgtgggacttgttgaaatttcacaggtgagatcctacacagatggagaagaaaatgaggcaagaataggattttggaaacttgcctagaactttcaagattcaagaatcagaaatgataatcaaagagataggagaattaagagtttagtgtcaaactaagaagagtgaattcaatgntaatagacaattcttgtaaacaacatgtcggccgcttgggccagccgatttagactgagcaagctatgcatgcgtccgaattgagctcactcgccaatcggcctatggtgagcgaatacaatcaatggccgcgtttaacacggtcggattggaaacccctgcgtagccaattattgcttggagaaatccctttccccggttgcgaataggaaagtcccaccgaaggccttccaaaggtgcgacctgaagggatggaatgtaggcgtaaaatggtaaatccggtaaaatggaaaacaccattttaaacaggcccaacggaaaatcttataaccaggattcccccaaggggtgaggggtccttgtacaaggccttttgagacgggtcctcttaaggggaaaacgttttggggggcccctggcaccccctattttttggggggcctaacgaccctaaggcccttttcgtggtctaactcttatcctaaggggctaatcaggtgctcctgggcctccaagggacgggaacatcacgcgtcttgtttacggcctctgctgtttcacatcggtgaccccgaacantcttgtctctctactatcacgatcggcagcacgcattatggccgcatctcccccctaccgtccgtcctgttgtttcatccc

SEQ ID NO: 8808 - DNA, 1045 bp, Homo sapiens
tgtttccctttgtctatattttaaagcacttgatagaaaaggcgtatgcaaggtttttccaaacaatttttctgtttgtttgtttgataactgacaacaatttgaattccaagaaaaaaaggaggaaaaattttgttcggtgttataaagaggtagagctggatgaagactaagcatttaaatactaagttgagggcatagtagctggcatgtgcctataatcccagtgttttgggaggcctaggcgggaggatgccttgagcccaggagattgaagctgcagtgaattatgagccaatgcactccagcctgggtgagagtgagaccctatctcaaaacagcaacaacaacaagatacaaattgagaaactgttacttgatttgcgatatgtattctgtccagcagtgatagaataacaaggactgggtttaccttgctattttaagcaacaatatatgaaatagcaatttgtaggcattgggtaacaggcaaagcaagactgtggtcactgaaagctgggaaacaaacctactgagctctatggttgccccaatttattatctggaggtagttttcaggctgcagagcagggatggggaagtcaaacagagcatggtgtcttagaattgggaggacaagatgggggttggcggggagggaaggttgtcatcattcgtggggcagagtaccagagaggtgggagttgtacacagaactccagtgataggtggaggagtctcctgaaatctggttgagtcctgatctacaggtgcatgagaggagaacacctgaggccagagaaagaaccccactggaaagcagcaggccaaacaattcctgggactcaacacagagctgggaatagtctgtgttcccattagccagagtatatacaagggcatcaaaagggcattgtaaagaggctaaattcgccctaatttaaaggctactctggatctactctaacaatgaaaaagcaagtcttggaagatacagccgatttaaagaatcttacctgtgtgtgagaacaaagtccagccctat

SEQ ID NO: 8809 - DNA, 1545 bp, Homo sapiens
catggtggctcacgcctgtaatcccagcactttgggaggctgaggctggtggatcacttaaggccaggagttcgagaccagcctggccaacgaggtgaaaccccatctctactaaaaatacaaatattagaactgggtgttgtggcacatgcctgtagtcccagctactcgggaggctaaggcatgagaatcgcttgaaccccagaggcagaggttgccgtgagccaagattgcgccattgaactcctgcctgggtgacagagcaagactctgctaaaaataataataaaaataataataatagaagtacatacataaactttaaaatgtaatagaaattatattttgtattcacccttttcccctctgtgaatgaagaagtccaaggccagtcacgtagtacttctgcaaaagaggttatgaatgaatttgtgggacttgttgaaatttcacaggtgagatcctacacagatggagaagaaaatgaggcaagaataggattttggaaacttgcctagaactttcaagattcaagaatcagaaatgataatcaaagagataggagaattaagagtttagtgtcaaactaagaagagtgaattcgaattccaagaaaaaaaggaggaaaaattttgttcggtgttataaagaggtagagctggatgaagactaagcatttaaatactaagttgagggcatagtagctggcatgtgcctataatcccagtgttttgggaggcctaggcgggaggatgccttgagcccaggagattgaagctgcagtgaattatgagccaatgcactccagcctgggtgagagtgagaccctatctcaaaacagcaacaacaacaagatacaaattgagaaactgttacttgatttgcgatatgtattctgtccagcagtgatagaataacaaggactgggtttaccttgctattttaagcaacaatatatgaaatagcaatttgtaggcattgggtaacaggcaaagcaagactgtggtcactgaaagctgggaaacaaacctactgagctctatggttgccccaatttattatctggaggtagttttcaggctgcagagcagggatggggaagtcaaacagagcatggtgtcttagaattgggaggacaagatgggggttggcggggagggaaggttgtcatcattcgtggggcagagtaccagagaggtgggagttgtacacagaactccagtgataggtggaggagtctcctgaaatctggttgagtcctgatctacaggtgcatgagaggagaacacctgaggccagagaaagaaccccactggaaagcagcaggccaaacaattcctgggactcaacacagagctgggaatagtctgtgttcccattagccagagtatatacaagggcatcaaaagggcattgtaaagaggctaaattcgccctaatttaaaggctactctggatctactctaacaatgaaaaagcaagtcttggaagatacagccgatttaaagaatcttacctgtgtgtgagaacaaagtccagccctat

SEQ ID NO: 8810 - DNA, 143 bp, Homo sapiens
gtgaggagctagaactgagctctgagccctcctctgaggttggggcttctgggcaggcagcccccttagaggccctcccttgtaggtattcggccttggttccgtggcccatatgcttctaaataaaacatttgggagctacc

SEQ ID NO: 8811 - DNA, 317 bp, Homo sapiens
cttatgtctgacagaaatgatacttagagtcacctctagagactgtttcaaagaatgaaagcaatggttaaagatggcaatagtcagccaggcacagtggctcacacctgtattcccagcacttttggaggccaagacgggtgactaaaaaaatacaaaattagccaggcatcatggctggtgcctgtaatcccagctgcttgggaggctgaagtaggagaatagcttgaactcgggaggtggaggttgcagtgagctgagatcacaccattgcactccagtctgggttacaagagcaaaactccgtctcaaaaaaa

SEQ ID NO: 8812 - DNA, 842 bp, Homo sapiens
gagtttgaggccagctggcaaacatggtgaaactccatctctactaaaactataaaaattaggctgggattacaggcatgagccaccgtgccctgccctttattactatttttttagagacagggtctcactctgttgcccaagctggagtgcagtggcacgattcatagttcactgcatcctcgacttcctgggctcaagcaatcctcctgcctccttccccagtagctgggactacaggtgtacaccaccatgcccagataatttttttgtttattttttgtagagatggggtctcgccatgttgcccaggctggcattagccatattttaagtgctcattggccacatgtgatgtgacagcacagatatagaatatttccatcatcacagaaagttctggaaatagtgctcttctgtagtaagttttctataggggagattgtattttgactcttgagtattcttgaaataagggaacatttggatgctgctttctataaattcatctcatacttaaactgatacctcattggtcttcccacctgatgagcttcttgaatgaagtgggcacatcacattcactgtatgcctggcatctagcatagagttgatagtggcagatgcttatcagtttcttgtggagttgctgctatttctataacttattactcattgcacttgcttggtctttttcttagtcgtgtagacagtaatttcttttttcagcttctatcagtatagctcattttttctcttcaatctgcttagacaaaatgaggttttcgttggtgtttaatttaaaaattaaaaaaaaattcaggccaaaaggtcttaaaaaa

SEQ ID NO: 8813 - DNA, 743 bp, Homo sapiens
aattcttctgcctcagcctcccaagtagctgagactacaggcgcgcaccactacgcccggctaatttttatatttttaatagagacgggtttcaccatgttggccaggatggtctcgatctcttgacctcgtgatccacctgccttggcctcccaaagtgctgggattacaggcttgagccaccgcacctggcagaggcgggtaaattttgattttactttttcacatagcaggggctgccatctcttatcccccaaccccatgacaggcagctgtggggactgcagttccccattcctggtgcagcttgctggacctggggtgagcaataaggaccttgtcttccaaaagtcagagttgtggggttctgattattgattgttgtttttgattgctgagaggccagcacagaagttggccattgtttatatatccacaggctgaagcaacttaccaaacatgaggggatttaaagaaacaggacctaggtactttttccctcttgagaaccagacatttaaagaaatctctcatcaggtcactggctgaccccagagacaatggaagaaaaatttcagtgaaaacacacaaggaatacttgctttacaaaaatagcttagaaaagtcacaaaaggatggttccagccatcaacaagcaaaacccagcaattcctgaggagtgagagaattaagactgcagaactaccacaacataaggctcagaatgtccagttcacagtaaa

SEQ ID NO: 8814 - DNA, 378 bp, Homo sapiens
agcaatagcgagagacagggagggacctgagagtggaagcctttattgggatgtaaggtggtacctgagcaggtttcctgtggggaggtctaatttggtttaacacaagcagccatgagtctctactgtgactgagaggtggtcactgatatatccacgtggtccctgcagagtatgggggcctatggggggagtcaagtaggttatatctagctgtcccataataaagtggtcaccaggggaaggttgtataaggcagatatcgggatcagtcacatggagaaactgggagatgaactggaaactgctgagggtgactgaaccctgcttctgatatcagaaagtccaatttatatttaaaagggatgctgaggcaac

SEQ ID NO: 8815 - DNA, 495 bp, Homo sapiens
caggatgtctcatgaccgtgccaccttctgcctagccccattctctggaggagctgtgggcagaccgaccccagcctggccgcctggcatggggactggttgcgtcagatcggagctctgagataagggtgggccagggcatgatcatcaccactgccagcctcgaagcctctttgctgacctggaggtgatctgtgtatcaaagggggctgtgtattcaacagcacttccagaagaggccaaagatctgtctctacttcagcctccactgggcagaaaactaagcctatttgctctaggcccttcagacttgcacttggagaaagaaaactcactaagtcagcccttatgtaactccactctcctctcttccaaacctccttgctttggacaaatatttgacagaaaatgcccttttgcaacgccttaaaagttacaaaaatggtgcaccctatcctttaatctgtactgtaaataaaaaatattaacacaaac

SEQ ID NO: 8816 - DNA, 613 bp, Homo sapiens
ttttaaaagtctaatttgagattccttattaaaagatccagaaaagccaacttaaagagaccctgtgtggtaaaacactattcctgctgcacttgtgtaaatattaggccaactttaaagacactaaatttattttgcaaacagattactcttactaatactttgatgatgtttgataaaaagggagtaagtatagagaaaaaactttcagagaaaaaaatatagtgcacctgttattagactctagctcattgtttttgaggttttttcgtctacctgaaatctagactggatcttgaattttttgtttcctgtaatatctggcaatgggctgggtgtcagagctcgcaactgcaatcccagcgctttgggaggtcgaggtgggaggattgctgaagcccaagacttcgagaccagcctgggcaaaaggcgaaacaccgtctctacaaaaagttcaaaaatttgctgggcatggaggcatgcgcctgtggttgcagctgcttggaaggtggaggtggaaggattgcttgagccaaggaggttgaggctgcagtaagccttgtttgtgccactgcactccagcctcaattacaaagcaaggaccccatctcaa

SEQ ID NO: 8817 - DNA, 712 bp, Homo sapiens
tggcgagctccaactgcgggagcatggccttcaaggattctcaactcagggctttctgagctcaggggagatggggtatcagctggaagttcttccctctggaggtgggtttttgggttggtacccccagctactccactgaagagtgggtttcaaatttgtcaccttctctcacgttcatcctccagcctcatccatgcagcgagcaacacacaagctaagagggagtttcaatctacttaatgtccccactgaggtgggtggaaaagggcttagactttggagctgggtagatctgggcttaaatcctggctctagcacaactggctgcatgactctgagcaggttattcaaccactctgacccttggtatcctcctctgtgagacaaatgatccacctcaccagtcaggattgcttaaaaacacctgcacttctgagaagatagctagcccctcctatcagtcaaactagccttgttatttctcccctagcccaatctctatctccacacatgcttacttttgtctctgtatatagcctcacttgttaaaatccacttgacatgtctgtaaggcagatgttcatggtgctttaccaactatcatgatgggataagattcaggacagggagaggtaaaacaagtcatgcagtgaattcctaggtcaccttgttacttttaaaagaccctaagagggctgggcgtggtggt

SEQ ID NO: 8818 - DNA, 263 bp, Homo sapiens
agaccaacaccacccacctggatttgatatgagcgagacgtcaacttccattttgttttatctattgcaatttgggttttctgccatttccagctgaacttaattctaatttaccaattttattaaagctgtttcagagaaaagaacaatagagaaagctgtacaactcctcttatgagagaaaaaatggaatagatgctattcagagacagttataggccattttcccatgtgtagcttgatgtaaattctaaaaaatgaaa

SEQ ID NO: 8819 - DNA, 441 bp, Homo sapiens
ttcatttcttttttccaaaaaaaatttttttttttcagagacaggatctcactatgttgcccaggctgcccttgaattcttaggcctaagggatcctcctacctcagcctcccaaagttctgagattacaggcataagccaccacacccggcccgatctttatttcttttgataggcctctgatgtttcagggtgagctctagggtcagaaatacctgggttcgtgtcccagttctgctgcctagaagctctgtgtgacctcgggtgcattatgtcatctctctgtacctcattttgctcatttgtaaaatggggctcacagttgccatgaagtgccaaggagctgatgtccataaagtcctgggcagagcatcacagtcaatccacgtagccgttgcatttgtcagatggtcctagttaatattaccctctaaaggctgt

SEQ ID NO: 8820 - DNA, 931 bp, Homo sapiens
tctggacatcttgggctctgtctcatattctctaggctcctttttcactctagcccttggtatggctaccaatgcctgagaatgtagcctgacagcacctctgttcagctccaccataaatctcttgatttctgcctcttagcacttctccaccactgcctccctaatacctgccgaaacttgttcagctattctggtctccaggcaaacctggaagtaagatggagttaatatcccatgaagcattcaccaatggggaacagaatttgcttgataactattctccccttgaagcccttgagtgaataactctcaggtgaattatcattggctcctcagatgttcccacgtggattgagtttcagctgcctacagcagtaaaaactttcaataacacacccttggattatttttcctctcttccctattcgttactttcattctttgtgatcgttttccagaataaactatctgtatgcaagttgttgtgttagatttgacatattgaggcgacttagactaaaacaatttacacttatgagagacattacccacttaagaatttcagaaattagtgaacaggtgtagaaattttcactgcaaatttagttgcttaacttacctgtttataaggccaattcaactacacagtcaacatttatggatacagtattaagaagaagtcagtattgacctctttccttagctatgttctatcatagacaataaccagatgatataaatgcaactatgagcaatggagtactttctcttggcagaatctaaaaacacacgacacaatctcccttggaaataacttgtagcacaggaaggaaagtgcatgaaagagccaagaaataaagttgatttgaggttgaaaagaaacatctcttcagggagccacatactcccagaatttttaaaagcaaaa

SEQ ID NO: 8821 - DNA, 587 bp, Homo sapiens
atatatagagtatgttagattgttatgatgacaggaatagtgctagaggcatttagtactcagggtctagggatgctaggtgtcctgagacgtaagagccagccccatattatttgtcctgccccaaatgctagtaacttccctactcacaaagaaatactgatacaggaaagagtgaattctttaataaatcatgttggggaaaaatggttatccatacagaaaaaataaaattagattcctacctcacaccaaacacaaaactcaattctaggtatattaaatacttttagaagaaaacatagttcagtggttctcaacttgcagtaccaccatctacagaacatttgaaaatatatagagtatgttagattgttatgatgacaggaatagtgctagaggcatttagtactcagggtctagggatgctaggtgtcctgagacgtaagagccagccccatattatttgtcctgccccaaatgctagtaacttccctactcacaaagaaatactgatacaggataatttctctagtcttgggataggggataatttctgtaaaaaaaaaacataaagtaccgactat

SEQ ID NO: 8822 - DNA, 344 bp, Homo sapiens
ctatagtatttataacagtgtaatattggtgcacaggttgacaaataggctaatggaacagaacagaaaacctgaaaatagacctatacctatttggaaatttgatatctgacaggtagcattgcagatcggtcaaggaaagagtgaattctttaataaatcatgttggggaaaaatggttatccatacagaaaaaataaaattagattcctacctcacaccaaacacaaaactcaattctaggtatattaaatacttttagaagaaaacatagttcagtggttctcaacttgcagtaccaccatctacagaacatttgaaaatatatagagtatgttagattg

SEQ ID NO: 8823 - DNA, 1720 bp, Homo sapiens
ctctgctcagaaggtccagcatcctgaccagactcggcagcttattgaatttgccggggtgcaagcttccttgcactgtccacatgttcttaccagggaagggtctacccagggccatcctgcctcaaaggagaagtggtttactgttttctccacctttagagggaatgagggtccctgctcctggtccttactctactccactgtccaattggcgcatgccctgaggctctcattatacaaattggaagctaaggtgcaaaagaactaagaatttgcataaggtccccaacaggtgaaggcaggccccaaacctaggatctagatttcgtttttctgaccccgcttcctttaacctgcagggctggcccaacgccccgggcttcacccaacactgggcgcaggcgggaaggccgagaggctgggtcgggcgcccaagcgagggcccaggtggggcgaaacaggcgcagtcaaggggctggcaccttggccccccgccgtggattcaaagggtcaggctccgccccctccaagccccgagcccactttgatgtgctgatgcggcctggaaggggccacttcacacctcgggctcggcataaagcggccgccggccgccggcccccagacgcgccgccgctgccatggcccagcccctgtgcccgccgctctccgagtcctggatgctctctgcggcctggggcccaactcggcggccgccgccctccgacaaggactgcggccgctccctcgtctcgtccccagactcatggggcagcaccccagccgacagccccgtgccgagccccgcgcggccaggcaccctccgggacccccgcgccccctccgtaggtaggcgcggcgcgcgcagcagccgcctgggcagcgggcagaggcagagcgccagtgagcgggagaaactgcgcatgcgcacgctggcccgcgccctgcacgagctgcgccgctttctaccgccgtccgtggcgcccgcgggccagagcctgaccaagatcgagacgctgcgcctggctatccgctatatcggccacctgtcggccgtgctaggcctcagcgaggagagtctccagcgccggtgccggcagcgcggtgacgcggggtcccctcggggctgcccgctgtgccccgacgactgccccgcgcagatgcagacacggacgcaggctgaggggcaggggcaggggcgcgggctgggcctggtatccgccgtccgcgccggggcgtcctggggatccccgcctgcctgccccggagcccgagctgcacccgagccgcgcgacccgcctgcgctgttggccgaggcggcgtgcccggaagggcaggcgatggagccaagcccaccgtccccgctccttccgggcgacgtgctggctctgttggagacctggatgcccctctcgcctctggagtggctgcctgaggagcccaagtgacaagggacaactgacgccgtctctgtgagcaccgaggctttttggcctcagcaccttcgaagtggttccttggcagactgcctttcctggaagagggcacgggcgatcccgacgggggcattcctgcgggtgagagccgtccccaccgcggcggcccttctcagcccctccctccatggagggacccatagggctagacactttgaggcaagcaggaggctctgcctaatgtgaatttatttatttgtgaataaactgtactggtgtca

SEQ ID NO: 8824 - DNA, 1205 bp, Homo sapiens
ctctgctcagaaggtccagcatcctgaccagactcggcagcttattgaatttgccggggtgcaagcttccttgcactgtccacatgttcttaccagggaagggtctacccagggccatcctgcctcaaaggagaagtggtttactgttttctccacctttagagggaatgagggtccctgctcctggtccttactctactccactgtccaattggcgcatgccctgaggctctcattatacaaattggaagctaaggtgcaaaagaactaagaatttgcataaggtccccaacaggtgaaggcaggccccaaacctaggatctagatttcgtttttctgaccccgcttcctttaacctgcagggctggcccaacgccccgggcttcacccaacactgggcgcaggcgggaaggccgagaggctgggtcgggcgcccaagcgagggcccaggtggggcgaaacaggcgcagtcaaggggctggcaccttggccccccgccgtggattcaaagggtcaggctccgccccctccaagccccgagcccactttgatgtgctgatgcggcctggaaggggccacttcacacctcgggctcggcataaagcggccgccggccgccggcccccagacgcgccgccgctgccatggcccagcccctgtgcccgccgctctccgagtcctggatgctctctgcggcctggggcccaactcggcggccgccgccctccgacaaggactgcggccgctccctcgtctcgtccccagactcatggggcagcaccccagccgacagccccgtgccgagccccgcgcggccaggcaccctccgggacccccgcgccccctccgtagctccttccgggcgacgtgctggctctgttggagacctggatgcccctctcgcctctggagtggctgcctgaggagcccaagtgacaagggacaactgacgccgtctctgtgagcaccgaggctttttggcctcagcaccttcgaagtggttccttggcagactgcctttcctggaagagggcacgggcgatcccgacgggggcattcctgcgggtgagagccgtccccaccgcggcggcccttctcagcccctccctccatggagggacccatagggctagacactttgaggcaagcaggaggctctgcctaatgtgaatttatttatttgtgaataaactgtactggtgtca

SEQ ID NO: 8825 - DNA, 2944 bp, Homo sapiens
  misc_feature (1892)..(1892): n is a, c, g, or t
  misc_feature (2215)..(2215): n is a, c, g, or t
  misc_feature (2272)..(2272): n is a, c, g, or t
ctctgctcagaaggtccagcatcctgaccagactcggcagcttattgaatttgccggggtgcaagcttccttgcactgtccacatgttcttaccagggaagggtctacccagggccatcctgcctcaaaggagaagtggtttactgttttctccacctttagagggaatgagggtccctgctcctggtccttactctactccactgtccaattggcgcatgccctgaggctctcattatacaaattggaagctaaggtgcaaaagaactaagaatttgcataaggtccccaacaggtgaaggcaggccccaaacctaggatctagatttcgtttttctgaccccgcttcctttaacctgcagggctggcccaacgccccgggcttcacccaacactgggcgcaggcgggaaggccgagaggctgggtcgggcgcccaagcgagggcccaggtggggcgaaacaggcgcagtcaaggggctggcaccttggccccccgccgtggattcaaagggtcaggctccgccccctccaagccccgagcccactttgatgtgctgatgcggcctggaaggggccacttcacacctcgggctcggcataaagcggccgccggccgccggcccccagacgcgccgccgctgccatggcccagcccctgtgcccgccgctctccgagtcctggatgctctctgcggcctggggcccaactcggcggccgccgccctccgacaaggactgcggccgctccctcgtctcgtccccagactcatggggcagcaccccagccgacagccccgtgccgagccccgcgcggccaggcaccctccgggacccccgcgccccctccgtaggtaggcgcggcgcgcgcagcagccgcctgggcagcgggcagaggcagagcgccagtgagcgggagaaactgcgcatgcgcacgctggcccgcgccctgcacgagctgcgccgctttctaccgccgtccgtggcgcccgcgggccagagcctgaccaagatcgagacgctgcgcctggctatccgctatatcggccacctgtcggccgtgctaggcctcagcgaggagagtctccagcgccggtgccggcagcgcggtgacgcggggtcccctcggggctgcccgctgtgccccgacgactgccccgcgcagatgcagacacggacgcaggctgaggggcaggggcaggggcgcgggctgggcctggtatccgccgtccgcgccggggcgtcctggggatccccgcctgcctgccccggagcccgagctgcacccgagccgcgcgacccgcctgcgctgttggccgaggcggcgtgcccggaagggcaggcgatggagccaagcccaccgtccccgctccttccgggcgacgtgctggctctgttggagacctggatgcccctctcgcctctggagtggctgcctgaggagcccaagtgacaagggacaactgacgccgtctctgtgagcaccgaggctttttggcctcagcaccttcgaagtggttccttggcagactgcctttcctggaagagggcacgggcgatcccgacgggggcattcctgcgggtgagagccgtccccaccgcggcggcccttctcagcccctccctccatggagggacccatagggctagacactttgaggcaagcaggaggctctgcctaatgtgaatttatttatttgtgaataaactgtactggtgtcagttggcaatttcttcttcctacccgtggacacagagctccctctctccctccaaagaagagcatgggagaggtgggaggggttcttgcaatctttagccccccgacccccacaggcccagacccctttggccttacccccagccctggctcagcatctagtccagatgggtnagcctggaatgggtggggagggacgtcctgtgagaaggcagcggcaagtagaatctgctcatcttttctttgaacctggtggggaactggttaaaaccaaaatatctgtgtagaaatacaactccattattgagtatttattgtatgtacatcaggtacctattatactcaagtaaccattttacagaaggatgaggatcagcgctcaagcccaggtaggcctccagagtcccagcgctcagctcttgtgggattttgccagctccatacatgttggggcctgagggataacagctccaaggggttattttcttgcatcctgnggtcttattctccatgcacgggagcatcctggccttggaactcccccaccctccgcnggcattttcccatctgccttttctctggtttccccaccttgtggcttagagacataaataatggtgtggcggtcctgagtttatataaccatgacctcctacaggcctagatggggtgagatgaggggcccatggggttgcatcggaatccacacaggcagttgcgtgcctgtctgcattggctggattcacatcagggagcaagaaacgggaggcttgagcccagaaagtgtgtcctcatccagccagggtgtctgggcaacagtcatgattagagggtgcggtggggagaagggatgtgtagcctctctgccaagcgtcctttaccctctatggatagatacccagttctcccctcctctccttcaagtgtctgaaacacaggcttcagtgtctgtttttataagagctttattaggatacaattcacataccataaaattcactcttttaacaactgaatggctttagtacatccacagagttgtgcaagcattgccactaattttagaacgttttcaccccccaaaagaaaccgtatacctgttaacatcactcctcactattccctactcccagtccctggcactcactcttctagtctctgtctctataggtttgctttttcaggacatttcatataaaaggaatcgcaaaatacggccttttgtg

SEQ ID NO: 8826 - DNA, 2429 bp, Homo sapiens
  misc_feature (1377)..(1377): n is a, c, g, or t
  misc_feature (1700)..(1700): n is a, c, g, or t
  misc_feature (1757)..(1757): n is a, c, g, or t
ctctgctcagaaggtccagcatcctgaccagactcggcagcttattgaatttgccggggtgcaagcttccttgcactgtccacatgttcttaccagggaagggtctacccagggccatcctgcctcaaaggagaagtggtttactgttttctccacctttagagggaatgagggtccctgctcctggtccttactctactccactgtccaattggcgcatgccctgaggctctcattatacaaattggaagctaaggtgcaaaagaactaagaatttgcataaggtccccaacaggtgaaggcaggccccaaacctaggatctagatttcgtttttctgaccccgcttcctttaacctgcagggctggcccaacgccccgggcttcacccaacactgggcgcaggcgggaaggccgagaggctgggtcgggcgcccaagcgagggcccaggtggggcgaaacaggcgcagtcaaggggctggcaccttggccccccgccgtggattcaaagggtcaggctccgccccctccaagccccgagcccactttgatgtgctgatgcggcctggaaggggccacttcacacctcgggctcggcataaagcggccgccggccgccggcccccagacgcgccgccgctgccatggcccagcccctgtgcccgccgctctccgagtcctggatgctctctgcggcctggggcccaactcggcggccgccgccctccgacaaggactgcggccgctccctcgtctcgtccccagactcatggggcagcaccccagccgacagccccgtgccgagccccgcgcggccaggcaccctccgggacccccgcgccccctccgtagctccttccgggcgacgtgctggctctgttggagacctggatgcccctctcgcctctggagtggctgcctgaggagcccaagtgacaagggacaactgacgccgtctctgtgagcaccgaggctttttggcctcagcaccttcgaagtggttccttggcagactgcctttcctggaagagggcacgggcgatcccgacgggggcattcctgcgggtgagagccgtccccaccgcggcggcccttctcagcccctccctccatggagggacccatagggctagacactttgaggcaagcaggaggctctgcctaatgtgaatttatttatttgtgaataaactgtactggtgtcagttggcaatttcttcttcctacccgtggacacagagctccctctctccctccaaagaagagcatgggagaggtgggaggggttcttgcaatctttagccccccgacccccacaggcccagacccctttggccttacccccagccctggctcagcatctagtccagatgggtnagcctggaatgggtggggagggacgtcctgtgagaaggcagcggcaagtagaatctgctcatcttttctttgaacctggtggggaactggttaaaaccaaaatatctgtgtagaaatacaactccattattgagtatttattgtatgtacatcaggtacctattatactcaagtaaccattttacagaaggatgaggatcagcgctcaagcccaggtaggcctccagagtcccagcgctcagctcttgtgggattttgccagctccatacatgttggggcctgagggataacagctccaaggggttattttcttgcatcctgnggtcttattctccatgcacgggagcatcctggccttggaactcccccaccctccgcnggcattttcccatctgccttttctctggtttccccaccttgtggcttagagacataaataatggtgtggcggtcctgagtttatataaccatgacctcctacaggcctagatggggtgagatgaggggcccatggggttgcatcggaatccacacaggcagttgcgtgcctgtctgcattggctggattcacatcagggagcaagaaacgggaggcttgagcccagaaagtgtgtcctcatccagccagggtgtctgggcaacagtcatgattagagggtgcggtggggagaagggatgtgtagcctctctgccaagcgtcctttaccctctatggatagatacccagttctcccctcctctccttcaagtgtctgaaacacaggcttcagtgtctgtttttataagagctttattaggatacaattcacataccataaaattcactcttttaacaactgaatggctttagtacatccacagagttgtgcaagcattgccactaattttagaacgttttcaccccccaaaagaaaccgtatacctgttaacatcactcctcactattccctactcccagtccctggcactcactcttctagtctctgtctctataggtttgctttttcaggacatttcatataaaaggaatcgcaaaatacggccttttgtg

SEQ ID NO: 8827 - DNA, 2106 bp, Homo sapiens
ctctgctcagaaggtccagcatcctgaccagactcggcagcttattgaatttgccggggtgcaagcttccttgcactgtccacatgttcttaccagggaagggtctacccagggccatcctgcctcaaaggagaagtggtttactgttttctccacctttagagggaatgagggtccctgctcctggtccttactctactccactgtccaattggcgcatgccctgaggctctcattatacaaattggaagctaaggtgcaaaagaactaagaatttgcataaggtccccaacaggtgaaggcaggccccaaacctaggatctagatttcgtttttctgaccccgcttcctttaacctgcagggctggcccaacgccccgggcttcacccaacactgggcgcaggcgggaaggccgagaggctgggtcgggcgcccaagcgagggcccaggtggggcgaaacaggcgcagtcaaggggctggcaccttggccccccgccgtggattcaaagggtcaggctccgccccctccaagccccgagcccactttgatgtgctgatgcggcctggaaggggccacttcacacctcgggctcggcataaagcggccgccggccgccggcccccagacgcgccgccgctgccatggcccagcccctgtgcccgccgctctccgagtcctggatgctctctgcggcctggggcccaactcggcggccgccgccctccgacaaggactgcggccgctccctcgtctcgtccccagactcatggggcagcaccccagccgacagccccgtgccgagccccgcgcggccaggcaccctccgggacccccgcgccccctccgtaggtaggcgcggcgcgcgcagcagccgcctgggcagcgggcagaggcagagcgccagtgagcgggagaaactgcgcatgcgcacgctggcccgcgccctgcacgagctgcgccgctttctaccgccgtccgtggcgcccgcgggccagagcctgaccaagatcgagacgctgcgcctggctatccgctatatcggccacctgtcggccgtgctaggcctcagcgaggagagtctccagcgccggtgccggcagcgcggtgacgcggggtcccctcggggctgcccgctgtgccccgacgactgccccgcgcagatgcagacacggacgcaggctgaggggcaggggcaggggcgcgggctgggcctggtatccgccgtccgcgccggggcgtcctggggatccccgcctgcctgccccggagcccgagctgcacccgagccgcgcgacccgcctgcgctgttggccgaggcggcgtgcccggaagggcaggcgatggagccaagcccaccgtccccgctccttccgggcgacgtgctggctctgttggagacctggatgcccctctcgcctctggagtggctgcctgaggagcccaagtgacaagggacaactgacgccgtctctgtgagcaccgaggctttttggcctcagcaccttcgaagtggttccttggcagactgcctttcctggaagagggcacgggcgatcccgacgggggcattcctgcgggtgagagccgtccccaccgcggcggcccttctcagcccctccctccatggagggacccatagggctagacactttgaggcaagcaggaggctctgcctaatgtgaatttatttatttgtgaataaactgtactggtgtcaaaaaaaagtaaaaaaaaaaaaaaaaaaaaaaaaaaaaaaatttgttggggggcttgggccctggaaaggtttttaaaaccattgggtgggggggggggccccatgatgggtaacggtcgaccctgtgggccaaaagcgctggtccccaaggagaggactcgtggcgcctggcgacgagagggcctggggggtttccctccacaattataaaaaaaaaccgcgccgggggcgggacagccccgaggcgcctgtctcaggagaacaaactcccccaagagggagagtccagggagggcccataacacgggggtcctcaatcaacagggggggctctccaacggggggacgccagattttctaaaattaacgccgaccgcgtgggggcg

SEQ ID NO: 8828 - DNA, 658 bp, Homo sapiens
tgaatttttttaagaaaactcatcaaatttcagggtatcacaaaactttattatattattatactgcccactatttattatatgttatagatgtctgagaggtaaaccaaatattttatttttaatgttaaaaaaacatcaaatttaactttattagcatattttagcaactttgggataaatacggacttttacttgattttgaaataatcccagtgtaggcccatgtgctggatctgttggatgctagaatatgggctttgaacctaatacaaatatattactagaaaatgtgatttttttaaatgccaagtaaattgatattagtgtatgaattagtcatattttaaaacattatgtggttagagaaatgcggttttctgccatgaatgttaagttgcaaatcagtggaaatggagtcgacctcttcggagcacagggtgtcattgccctcgttgttcaagaggccagaatttttctatccccgctaagaaacaaagcatctatgttgagatatgtgtttttttgtttgattaatttgagatcattctaaatactttatacaatattttcacatgcacaaaaatgcgcgttagtggtttttggagaggggtgaggggtgggggaagtgcaaaataaagattattggctatttcat

SEQ ID NO: 8829 - DNA, 330 bp, Homo sapiens
taaattcgcggccgcgtcgacaatatatttaggttagcaaaactgtacatatactccctgaatcttaaataaaagttggaaaagcaaaagaattctgtcaagatatttgttttccctttagtaccttaaaaatgtagttcatatcttcaggctgtattatttcttatgaaatgtctgaattgtttttattgttcctttgtatgtaatgtttgttttgacactaatttaaaattttaaaatttgtctttggttacagaaactgactgtgatatgcctatgactgatattctttgtactaataaattaacatgttttatcaaatttaaaaaa

SEQ ID NO: 8830 - DNA, 352 bp, Homo sapiens
gctgccgcctactactactaaattcgcggccgcgtcgactactccctgaatcttaaataaaagttggaaaagcaaaagaattctgtcaagatatttgttttccctttagtaccttaaaaatgtagttcatatcttcaggctgtattatttcttatgaaatgtctgaattgtttttattgttcctttgtatgtaatgtttgttttgacactaatttaaaattttaaaatttgtctttggttacagaaactgactgtgatatgcctatgactgatattctttgtactaataaattaacatgttttatcaaatttaaaaaaaaagtcgacacgcaaacgaatttagtagtagtag

SEQ ID NO: 8831 - DNA, 335 bp, Homo sapiens
accaaaacccagcgacgagacatccccaagtcccaccttaatgggacttttggtagcctttggaacagggaaaacccaaaaatagccaagaggtattcaccagaaagcctgaaagtgggagtggttttgctcgttcctatagtagtgagggcaagtggcgtcgaggaggtctgaaaggtgtagagttctctgggccctgtgaactctgccactaaccagccacgctgatggccagctttcaggatagctgtggagaagctgctgggagtagaggcacattgaaaaggttagggatggccaggcatggtggctcacgcctataatcccagtacttt

SEQ ID NO: 8832 - DNA, 496 bp, Homo sapiens
ctctcttcattctcagtaattgctagtcccaagaactagaattgcaaatgggcacaacctatatccttcctgtggaagaggaggccactctcttgagctgaagttccagaagagcagttaatgttcaagagaaattgaactcaactcagcaacaaaggactctattttgaagagcaacatatcacaaagctaaatgtgattgtgccaaacacattaggtgcttatttggggtcatgctaggcctttatcaagtaactggaaaacttttcttgcagccacaatctcaatgtcgttagtaggaagataagaggggagaaaaagctgtagaacaaatgtttggggttaccattgaaaatctaatgtctgcaatatttttctcctcacaacttggaaacgttcccagttcattttcagtcctgttgtgagcacagttctgaagggtttattattgtcaaaataagttttgttttgttttgtttatgttgggtttttaatg

SEQ ID NO: 8833 - DNA, 841 bp, Homo sapiens
tatgattaaaaattaaaactcttttattcaatcttttttttcccttgtctataaggcagaaaaaaagggtgacaaggaataggcaaagcatgttatttccttaacttacataattacaatccagtaccactctaccctgcacgctacttttctacactatgcttcctccttctcattcttattcagggagaaaaatgtcaaataattttagaacagattttaaggttaaactgtattaacttctaagagaccttcattttacttacagatagtcatgtacacaagcaaccaatacatttatttaaagttatggctagaattaacagctcttatgaatacaatgtgcccacaaaaactcactattgaaggttttaaaaccaaaaaacttcataccaccacatttttacacacattaaataagaaaatataacctggaaagaaaacaagttttaaaatagtattttagggccatttcattcacccaaacatttgctgaatttctattgtgtatccagaattgttctaagggggtgtgtgtgtttatgctagaagaacacagcagtaaacaagacaagagtccttgccctcatagagcttacattctaatagggaaaagaccattagcaaatacataatataatttcagatatatgctaagaagaaattaaaagcagcatacaggataggcagtgatttgggagagaaagaccatagtttagataaaatggtgaggaaaatcttccctgagaagataacttttgagcagcactgaatgataagaagggataagcagttcaccctctttataatccaattctaaaaggccatgaggaatgagctt

SEQ ID NO: 8834 - DNA, 581 bp, Homo sapiens
tgcgagtagcaaaccacaagacctgggaatcattggggttttttctctttctcttatactcggcacatagaatctggccaagaaaacccaattgggctctatttttcaaagtagatcccagattattctttctacaaggtctaccgctatcaccctagtgcaggccaccatcattatccaccttaatgatgggaatagtatcctaacttccccctacttgggtgccttacaatctatggtccacagagaatccagagtgattaaggtggggtgtgtgtgtttatgctagaagaacacagcagtaaacaagacaagagtccttgccctcatagagcttacattctaatagggaaaagaccattagcaaatacataatataatttcagatatatgctaagaagaaattaaaagcagcatacaggataggcagtgatttgggagagaaagaccatagtttagataaaatggtgaggaaaatcttccctgagaagataacttttgagcagcactgaatgataagaagggataagcagttcaccctctttataatccaattctaaaaggccatgaggaatgagctt

SEQ ID NO: 8835 - DNA, 637 bp, Homo sapiens
ctgattcttaaaatgaggtgatctgaactttttaggacatcctaatgcccatgcagtctgaatctttcttcaaaatacccactcagacgctaaaagcaggggagcttgagatccagggtgatgtttgaattgaggctttcaaaggaagaggaagataacctttgaagaaggtaaccaagcaggagggagaaggccctacatggcaatggtaacatcatctcaaagccaaggaaatgggcatgttgtttatatcgccacaggattttttttgtgtgcaatagtctacctttttctttccaaagtctatcatactatggcaaaagatgtagtcattcaatagagttatgcaattctagctttccatcaattacaaaaaatatgactatctaccttgattaattggattgttatacaaacagccctgcagtagtaaacgtccagtgtgtgggcagtgggggcatatgtttgtcatatccattaggggagcacttggggcccagaggactgatgaattggccccacattgtcttactacacagctgtcatagcttcttctgatagcaggtgatagttcttgcaagagcgtgtcaaattggagcttatctcttatgacatctgttgatggaagctccctttt

SEQ ID NO: 8836 - DNA, 568 bp, Homo sapiens
ctccatcatttttcattttttcatagtctttttttttttttaaggggctcactacattacccagacaggctcaagcaatcctcctacctcagcctcctgagtagctgggactacaggctcacaccaatgcccccaaccattttgtcatagtctacttgttagaaggaagtcactgagtatagccattacccaaggaaagggaaattaggctccatcaaagggaggaatatcttaaaatttgtgggcaaattttaaaaccatcacagctggctctgggagtacttttctgaccaaggtagtatcataacaggttttattcaagtgtatatctggttagtcaagaacttagttctcactcacaaactggttcttagagctgggtaactattgctgtcttattccccccttgaaatatatttaacagttattagggaactggatgaagaggaataatgtgaacatgtacattaatttattcagtaaacattcaccagatgtcactctgcagagatataaaacaaaccacggtctatgtctttgaggaatttgtactagggaaaatagacaa

SEQ ID NO: 8837 - DNA, 484 bp, Homo sapiens
ttttttaatagaacagaaaaggagaggacaatggttttctgtctctactcagtttccaaaaacctctattgactactcttaccacaacacagcacccctccccgcagctgtctgccacttgcttcacttgtggcacctggttccatccaagcaaactcgagtccgcacacctgtgggaaggcaaccggcaggagcaaggcagagccctcgagggaaaggtcctggctgagctgtcttgcaaggccacccacagccgggccagctcccttgtgccaggccacaacagagatcccctgtatgggggagatgggggctcccctgcctgggggaagctggtggtgtccagcctgcccagcaccacagccaggccagcaatcagatgcaggcgggagaagaatgatctattagttgagtggccatagttatttggtgttaggcaacaccccaccctcccccaaaaaggtcttcggacatctggtcttct

SEQ ID NO: 8838 - DNA, 431 bp, Homo sapiens
gacagtctcagcatctggaaggttccagctcccacagctggtgtggaaatctcctcctcaccccacctgggtcccctgcccatttcagccgtcacctagctggataagcctggaccactgagtgctgccctagagggaaagtcggagcccaggaggtcccagtaggcctcgggtagcccctcatgtcgcacgctggcccctgccaggctgcatgcccttggcactgcctcgtcccacatacattccatatggggacctagagccgcaggaaaacacagacccacacaggcccggcttcactgtgaaaaaacaggcatcatagaaaagggtcagaaaacgggttactgcatctttcacatttcatgatactttatcggtttactatcatagtaaacgtaagcttgaaataaaaaggtttcttgtcactaaat

SEQ ID NO: 8839 - DNA, 456 bp, Homo sapiens
ttttttttctgagatggagtctcactctgtcttccaggctggagtgcaatggcgcaatctcagctcgctgcaagctctgcttcccgggttcatgccattctcctgtctcagcctcccgagtagctgggactacaggcgcccgccaccgcacccagctaatttttttgtatttttagtagagacgaggtttcaccatgttagctgggatggtctccatctcctgaccttgtgatctgcctgccttggcctctcaaagtgctggaattacaggcgtgagccacagtgcccggcctataacagtccaatctaatgtgactcctgaatgaaagtaggcccaccctatttgcttaggtgatctgaagaagccattccagagaatctgtgagcctctcttatgcatccaggggtgaaaatggaaacagagtacaaaatctgactatttaactttaccaacca

SEQ ID NO: 8840 - DNA, 543 bp, Homo sapiens
ttcattaaaaatgttccggtcgggtgcggtggctcacgcatgtaatcccagcactttgggaggctgaggcaggcggatcacgaggtcaggagttcaagaccagcctgaccaacatgctgaaaccccatctctactaaaaaatacaaaaattaaccaggtgtgtaatcccagctactcgggatgttgaggcaggagaatcgcttgaacccaggaggcggtgagccgagatcgtgccattgcactccagcctgggcaacagaggaagactatcaaaaaaaaaaaaaaaaaaaaaaagttcctgctgttcaattagttccttttacctgaaactattctcagcctgtcccaagttacttgtgttaaactttggcatcacatcacaaactcaagatccagaaacttgagcactctgcatcataattgtcttgtgcctcctggtggttaaaaaacctgtcgctccgtgaagcctctggaaaggcaagggaatatacttgatggggatagtagttattctctaatcctccattcaaccaaaaaaaaaaa

SEQ ID NO: 8841 - DNA, 483 bp, Homo sapiens
tatttgtcctattgtgcagattcaggaggagcctaaagcggtagcaacaatgagttagactcaaacccgtctcctgactcccagtctaaggctttacagagactctcttcctgacccaagcatggcttccttgggtactgggcaaagtcctaagtgtcctgcaaccaagtaaagaacaaagaactaatcatgactgccccctctccccccagcagcttaacattgaactgtcttccaaggcaaaggtgaggcaggaggcagcccagtgtagtgaggtggtgtgtgtaaagtctccaaatgtacctggctacatagtgcttgctggaagctaggtactctgcacatgccctacatgggttgttttacttaatgcttgtaacagcctcgaagcgtagattatccccagtttacaatgaagagtgcgaagtgtcttgtcgaaattcaaagagaataaactactgacatagatttgaaaatcggctc

SEQ ID NO: 8842 - DNA, 1061 bp, Homo sapiens
atattattgctattattatttaaataattatttgtaaaccacagcttgatttggagttaagtgttgtctgtgtcttcactgtagctggtaatttactatggtattaatttaaagaaataaattcaatacagcatcacgtctgtttgggaacacacattttgctctatgtatattgtaactaaatggttagtaaactttaaggcatgtggtgactaacgtagcccttagataggaggtttgtcatttttaatgtgttgaaaatagtacagacatggtgacagaaagcaggggtaaagttgaacgtctatgagcattgtctgtctgttttcttaactctttacatgatctgtgagcacctgcttcttctcaaagaactcccttagtaatcatttgtgcctaatgcatcccacacatgtggagtatgactggaacacaattgaaagattcctaacaactggctgcggtaaataacccaagttaagagcatgacttaaagtggaggtcttcagtatctctggcactggcaatacatttaagaacatacagagatcacacattatgtgggacagggcctgcagatagacttgaggacagaaaacaaaaacaaaagcagaaactctaaagtggatccttgctgcctgttatgccttttgtggatataatacctataataccaaaatgagttgttatgtttaatttcaaacaaatcccaactggtgtggaagtaattaactgctagtcgatgtaatgtaatcatcaatatgctggtgacatatgatggcatgtcaggaatactgttgtacagaaagggattgttcagtctacctagaacctatgggaaagctgcaagaccatttacatatcagtacaaaactcctttattttattaaaatatgagaattaacttccatttattaagattacgtattgctcctttaaattattaaaggtttacatttgataggattaatggatttggtagtgaaatatttttatatatatacatttttgttttattttgagcactattgggaaacacttccgaggtaccgactcgatct

SEQ ID NO: 8843 - DNA, 466 bp, Homo sapiens
ggcagcatagtgaattcgcatctctacaaaaaatcttaaaaattagcttggggtggtggcacacacctgtagtcctagctacttggaaggctgatgtatgaaaactgcttcagctcaggagtacgacgctgtggtagctatgatcatgccactgcactccagcctgggtgacagagcaagatctagataattacagtctgtcctgctcctgtttatgttaaaatgctttcaatcagcaggataaaaattaagtgaaatgtgacttgggagcttggccagaaaataggcaatggagaaacaggcacttcccacaagaataaaaatggccaataagcacataaaaatgattcaaggccagggccgtggctcacgcctgtaatcccagcactttaggaggccgaggtgggtggatcacctgaggtcaagagtttgagacgggcctgaccaacatggtgaaatcccatct

SEQ ID NO: 8844 - DNA, 388 bp, Homo sapiens
gaagatgagcagaaatcttgagggagaaggtatttctctgtgtaaccaattccaagtgacttctgttgctctgaaaactctatggcccatgattaaaatgaccatgatctaagagtgttgtgtacaattaatagaacaaagccaacctgtggccagttcatttttacttactgaattcttaccagctgttgaggaaaaagaaatgatgcaagactgaggcaatgccagagaacactccttgtatttatcatcagttgtcttcagttggcttttcttagttctgggttgcatctttgcagcctggttccctctgcatgctcattctaccttcctttgtgccctcctaggctgtattaagaagcagtacagggtcacctttagatgaaag

SEQ ID NO: 8845 - DNA, 962 bp, Homo sapiens
cgcacacgacctcagcctcctctgccccgctgggcgcgagctgcagtcctggcaccttctgctggggtcctgatctgagccagttgtctagcgatttaatttggtgaatttaccactgcgtcccagagtttatattggcacttaacagcagtaatatgtttctctctcgccaagaactattttcccgaccaagatggaacaccacgcacaaaaaataggtttgtgaactaatctgctgccctgacaagtgtcattcacagaatcactgctatagagcgcactcggaattaaatgaggctggggttgtctggcctggatcacaggtgctttttcccactcagttaacaggagtctgggatgagacaccctttccctgcagccgcaggcactttcaaatcacactatcagtattcatgacagatttctctcttagaaaaatggtttgaggatggttagaggtctctctctctctctctcttttcccttctaacctccctttcttccctcctgggtggttctttttaggatgcccccaccctgtctgtccttataaaatgcagctctgtaaacatttgtctaatttcacaagctcagggaggtgcccccatcagttaaaaaaaaaaaatctcctagtgcctgatgcctgtttgaaattctaaagtggaacttaattgctttcgcgtaaggatttgattcgggcaaactgcccatacctctgggagtagaagcaggatctgtcatttacactttagtctgaatgggtgcctgaacctgggagaaaacagctttgtctttccctggtctgccttggatgtcagaggcttcttaaagacagcgttattgaggggcatggtggctcatacctgtgatcccaccccttggggaggccaaaatgggaggatcacttgaggccaggagttcgagagcagcctggccaacgtggcaaaaccccatctccttaa

SEQ ID NO: 8846 - DNA, 603 bp, Homo sapiens
tgcatctttttcttttgcaaattaaaaaaaaattctttttcggtttttttctacatttaaattttgtcagatgataggtgataaaaggatatttagatggtttcattagcattctttaatgtattagtgagctagaatgcattttcttgtgattactggccatttgcgtttcttcacctgtgaaccatatacatattttttcagttttgttattttgttataggagctgtacatgtgttaaacctaaaacccttcactgatggatgcatgcattatttcaacacatctttgttgggtgaatattatttatgagacactctagcaaaatccatgtcctagatatctcttctgagatcttggctcttatatttatgggagatgtccccctgcagcaagaaaagtattagtgcccatgtaaacatgcgtggcttgtcaaggatcacatgcacagacagttcacacttactcctaaacccggcatggccacagagtagaaagggtgtgtagtgcgttatatgaggagagcactggctcaggattgtgatttctgtgatctctatattaatggcaatgttttaaaaaattacataacatttctgagtt

SEQ ID NO: 8847 - DNA, 531 bp, Homo sapiens
caagggaggtaactcgtctatcattcactcaaattggtaaaacaatgacaccagtataccgtgtggttaagatatagatgcacagatatacgaatgtctggaaaaaccaagagggctatacaaacagacatactcaaaagcactatggataaggcaaaacaccattctcaaagatgttcaagtcatgacaggaaggtaagaaaaagaaagcatatccagaaaacgaaaccagggagaacaaacagaaaaggaaaaataaaatggcagatttaagccctaccatgtcaatatcattaaatatcaatggcctaagtataccagttgcaagacacaggctggcagagtaggttaatggacacgaaccaactacatactggctacaaagagactaacttcaaatatgatgatacaggcaagttgaaatgaaaagggtgggaaaagatatatcatgcaaaccttagccaaaggaaagcaagactggctatattaatgccagatatagtatatttcagaacaaataaactaatcaga

SEQ ID NO: 8848 - DNA, 408 bp, Homo sapiens
cctgtacagccaccatcctcatttccctgtgagctctctgtccctctcctactctcagcccagtgacctgagtggggctggcccctactccctgatcccatggtgaactggcccaggcctctcctgttagcatattccatcccctgactcagggatgtgttcagtgatgaggatgtgacccaagctagaccaattaagtgtcagcattgggcatttggggccactggaaaacaggtatactctttctttgaagatttctaatctcgtaggatacaaatctagattttctgggaatattttttccctttcttttttgaaacagtctctcaggctggaatgcagtggcacaatcagggctcatggcagcctcaacttccctggctcaggcattcctcctacctcagcctc

SEQ ID NO: 8849 - DNA, 389 bp, Homo sapiens
atgtccagagtaatataatttggcaatgttaatgcttttaagatttgaacttgtcctcaaaccaaggagacaacaatagtgtaatactattggacttacaggattagttttaaagcaactttgaatagaagtgtttcagacataggacttctgccttgttgactagagtggatagttttctgtttaaatgcattggtcttttggctgtttgtaattcacttcagcttatagagaagttgatgaccttggatcatgctgggtatgattggtctttaaaaagcagtaatataccaccagcccaaggagaaaacattgttaaaatgaagagtggtggaaatagtgtgttgggaagaataaaaaatttagattggcacttattctaaagtgag

SEQ ID NO: 8850 - DNA, 650 bp, Homo sapiens
tcttaattgatctaacaaataatttgttcaaattaataaaagcagcaatgtatttggtgattatagcttatggataagtgaaacaaatgacagtaatgtcataagggacaggagggagaaattagaaagaccctcacatgatgcttctactacccatgaagcagtatagtgttatttgaaagttgttagccgggtgcagtggctcctgcctgtaatcctgtactttgggaggacaagacaggaggatcacttgagcccatgagttcaagaccagcctgggcaggatagtgagaccctgtctctacaaaaaatttaaaaattagccaggcatggtggtgcatgtctgtagtcccagctactcgagaggctgaggtgggaggatcccttcagcccaggaggtggaagtggcagtaagccaagattgtgcacccctgcactccagcctaaataagagtaagagcccgtctcaaaaaaataaaaaataaagaaagttgtaaattagttgtaaatgtatgctgcaaaaactaaaagacagtaataaaaacaatataaacatatatatgtataaatgatatgatgagaggaaaaaattatagtcatataaaacacacaattaaaaccagagaaggcaggaaaaaagtggaagacaa

SEQ ID NO: 8851 - DNA, 423 bp, Homo sapiens
ttcatgcttcagtcagcggtacttaattgcatataaggcatctggggagctctttgaaaatgtatatttcgggacaccatatccagagagtttgattcattgagtccagtctgggtcctaggaagaactattatcaacatcccatttaaatctagtgcaggtggtcttttgataaccgttggtgtagaacatatatacatttcatgttttattaatatttattaataatttacaaggtcaaaaagatattattttgattgttattttgtattgagtctactgctttacttccattactaaattggctttgcataaatacagtgggccaggattaaccaggattattgagtgtctctgggctttagtgtactatggttttgcatacgtaagtcatattctttctggttttctccatgaaagcca

SEQ ID NO: 8852 - DNA, 292 bp, Homo sapiens
ttttctttgtgacacattttaaataataatcatatatttctccattaaaataattgaaataaataatatgggtgtataccaggaaaatcatcagcatcacacatttcttatacagattagagaaaatataaaactatgttttatccctttagctattcatatagtttatatatatagcaggcatgagagttaaccattttatcctgaatgtcctttatttaacaagaagaaagtatagtaattgtaggctacatttaaagatatctatcaattttaagattaagtagttgtg

SEQ ID NO: 8853 - DNA, 719 bp, Homo sapiens
aactttttttttttaaagaaagtctgatggacaaactaaacattttcccagattatcaaagctgttttgcataattcttaatcttcacaaaaatgctaaaacacaggcatcattattcccgttccatagataagaaaactgaggctttaaaaactgaagataacacgctggtttcccttcaggtaatataaatctttcaacttttactaaaaagtgaacataaactgctcaaggttcattaacaccaggcaccatgtaacataattgattttgatacatcaaaattgatgaataaattaatagatcttagttatttctggtcaaatgatacgacatttgctattcaaaaagatacaacccaaaaacattttgagatgttttccagaatagcagttgtattatcaacactgtgatgcaacttggttaaaaatactggccaggcacagtggatcacacctataatcccagcattttgaggccgaagtgggtggaatgctttgagctcaggagtttgagaccagcctgggcaataaggtgaaactttttgtctctacaaaaagtacaaaacttatccagacatgggtggcatgcacctgtagtcccagctacacaggagactaaagtgggagtcacctgggcccaggaggtcgaggctgcaataagccatgattgtgccactgtactccagcctaggcaatagagtgagaccctgtctcaaa

SEQ ID NO: 8854 - DNA, 328 bp, Homo sapiens
tctgccctttagatcatccttcctttttcatgaaaggtggcacatgtttgtggctgagcagtttcatcagcctgtttcctgcctgtggtattttgggagtctgagagtcttttttgaaattttgtttaaaattttgtcttctctttccccctttcaatttaaactggcagtgtttctgtttatgtaatgttctgaagaacttttggggcctagtacagtggctcatgcctgtaatcccagtgctttgagaagccaaggtgggaggatcacttgaggccaggagtttgagaccagcttgagcaacatagtaagaccttgtctctacaaa

SEQ ID NO: 8855 - DNA, 466 bp, Homo sapiens
atctattcaatattaaaacaaaagtcctgcaaacctcggatggtgagtgtaatacttcagcactagcaccaaagcctcaaatataaacagataccaatatcaccactagcaaacaaaatgagccctcggccaggagcagtagttcacacctgtaatcccaacactttggcaagccaaggtgggaggatcactttaagtcaggagttcaagaccagcctgggcagcatagtgaattcgcatctctacaaaaaatcttaaaaattagcttggggtggtggcacacacctgtagtcctagctacttggaaggctgatgtatgaaaactgcttcagctcaggagtacgacgctgtggtagctatgatcatgccactgcactccagcctgggtgacagagcaagatctagataattacagtctgtcctgctcctgtttatgttaaaatgctttcaatcagcaggataaaaa

SEQ ID NO: 8856 - DNA, 497 bp, Homo sapiens
agttttcttaatagatttgtatgtctgatatgtataaccatttactataatatgttgcaaatcattctaatatatgtaaaacaatattatttgtaatgcagttattggtaaaatattatgtaatgttaattttgttcctagctgctaatttttctgccaaaagtattctaattttcaggttgttttaaaggcttttaaaactttttagttaagttttttattcacgtcatttaaattagttttttgctttttttctacctgataatctctttaacaagatgcaacaagacagaattattaaaattaaacctaaagttaagttacagatttaaaggcattatgatattaagcattaaaattggagattaaaatgtacaaaacagggttttccttatgaacaaaccttacagggtaaattgtttttttttctaaatgtcattaaatttatttgtactcagaactgttactaataaaaattaaaaatgcaaaaaaaaact

SEQ ID NO: 8857 - DNA, 755 bp, Homo sapiens
agagaggtcagatcatttgtccagagcacatgggtaccaagtgacaggccatgatctgaactcaggaacactggctctgatgtgccattctttgccatgtcaccgtagctgccaagagcataggtttccctcttccgaaccctgcctcaagcaatgaaatttctagaaaagtatatgaagttttaatacgatagctgctatggtctgaatgtgccccttttaaattcatgcactgaaacttaatcatcaatgtgataatattaagaagtcgggcccttaggaggtgaatgagattagcgagtttatatgagggctggagggagctagctaggccttttggcccttttgtcctttccagcgtatgaggacaaggcattcatcctctccggaggacacagcaacaaggtgccatcttggacgcagagagcagctctcaccagacactgaacctgccagcaccttaatcttagatcttcagcctccagaactgtgatcaataaatttgtgtgtttttataaattctaatgcaaggtttcttctataaggttattttgtctatgttgaaaatctatgttttagtttagtttacctttatcaatgatcttagctagatctgctggatcacttgctgcattcagttaaagacatcagcacttgctacttcaccttgcactttatgttatggagatggcttctttccttcgacctcataaactaacctctgctggtttcaaacttttcttttgcagcattct

SEQ ID NO: 8858 - DNA, 344 bp, Homo sapiens
caaaggaaaaataaattgaactgcatcaaaattaaaaacttttgtgcatcaaatgacactatcgacagagtgaaaaggcaactcacacaatattagacattatttgtaaaccatctatctccaagggattactatccagactatataaagaactgtaactcaacaacaaaaacaactcaattgaaaaacgggtaacggactagaattgacacatctccaaagaagatatatgactggctcacaagcatatgaaaagctgctcaacttcactcatcactagggaaatgcaaatcaaaaccacagtgaagtaccacttcatgcccattaggatggatgtcataaaa

SEQ ID NO: 8859 - DNA, 370 bp, Homo sapiens
ggtttatatattaaactaataaaaaggtacagggtaaattatatacatatatgtatgaatgtatatatacttagattaagaaaaaaaaatgactcacattcctgtaatataaaggtccattgctagttgaaaagtgacctcttttctctgtacatagtgaagcccgtatgtatggagttttaatctgtacagaaagaaatgtattattcattggtctttctgctgctggaaagataatagaatagctgattcttacaacaactgtatgatcagggatgagttagagtatttcttttgtctttgctcaaagccatacatatataaatatatataaagattattaataaattcaacaaaaaataaactacaa

SEQ ID NO: 8860 - DNA, 365 bp, Homo sapiens
cgctgtggctacatggtaaatcacctctgcattttcctggtccatcataggaatatacaaagcagtgcagaataaaatacaaacatttccacttaaaatgttatttttactttttcttaatatattgtattgtctaataagtttttgatatgctgcaaaatgaacctatctacctgatataatacacaaattctataattcttgtttaaaaagtacaattagacataatttttctatacttgtaattataattatggaatatagttaagtaagtataacatatatacttgtaattttatgtgtgcatataaaacgttatgtatatgtaccattaataaatataaactatgagaaaataataatat

SEQ ID NO: 8861 - DNA, 991 bp, Homo sapiens
acagtgatcacagaaggctttcagagaggcatttgcagccttaaaagagcaagacaatactttgttttgactttcagcgttaatatttggggtttgaaacctttctttgtagtttttgctagttgctgatacatttttttgtctgagaaaggcagggaaatgtgttgtacttcatcattctttctcagttcttcacttgcccttctcattccagtcgttgagctttcttcatggatccattcccacctagaatgccctttctcagtcttttccaaattctaccattcctcttgttcagatcacatcttcttttagaaactttctgagttctcagctctagagactatttcccaagaagttttccctaaaaagtagagaatttgttgttatgaaagaaaaacctggctgagcgcagtgcctcacgcttataccatcacagctctttgggaggccgaggcagccagatcacctgaagtcaggagttcgagaccagcctggccaacatggcgaaactccatctctactaaaaacacaaaaattagccgggtgtggtggctcatgcctgtaatcccagctacttgagaggctgaggcgggagaatcgcttgaacccaggaggtggaggttacagtaagccgagattgtgccactgcattccagcttgggtgacagagtaagactgtctcaaaaaaagaaaaacaaaaaccttacagttctgttagcaacatctatcaatgatatttctgcctaaaacactaaaaaaactaaagaacattaataagtggggccagttgtgtcagctaatttatattattggtgaatttctctgatctagcatgataagtagaaacattaaactgtgatactgttattgtttactgtttgattaatataagctggtccctttgttgaaaacataaagtattgcacatagaacatctttagatatttgggccagaaatttaatttctattcctctagtcctgttacct

SEQ ID NO: 8862 - DNA, 490 bp, Homo sapiens
aggtgacttttaagctaaggcttaaaagtgtcagccttgggccgggtgtggtggctcatgcctgtaatcccagctacttgagaggctgaggcgggagaatcgcttgaacccaggaggtggaggttacagtaagccgagattgtgccactgcattccagcttgggtgacagagtaagactgtctcaaaaaaagaaaaacaaaaaccttacagttctgttagcaacatctatcaatgatatttctgcctaaaacactaaaaaaactaaagaacattaataagtggggccagttgtgtcagctaatttatattattggtgaatttctctgatctagcatgataagtagaaacattaaactgtgatactgttattgtttactgtttgattaatataagctggtccctttgttgaaaacataaagtattgcacatagaacatctttagatatttgggccagaaatttaatttctattcctctagtcctgttacct

SEQ ID NO: 8863 - DNA, 695 bp, Homo sapiens
acagtgatcacagaaggctttcagagaggcatttgcagccttaaaagagcaagacaatactttgttttgactttcagcgttaatatttggggtttgaaacctttctttgtagtttttgctagttgctgatacatttttttgtctgagaaaggcagggaaatgtgttgtacttcatcattctttctcagttcttcacttgcccttctcattccagtcgttgagctttcttcatggatccattcccacctagaatgccctttctcagtcttttccaaattctaccattcctcttgttcagatcacatcttcttttagaaactttctgagttctcagctctagagactatttcccaagaagttttccctaaaaagtagagaatttgttgttatgaaagaaaaacctggctgagcgcagtgcctcacgcttataccatcacagctctttgggaggccgaggcagccagatctcctgacctcaagtgatccgcctgcctcagccttccaaagtgttgggattacaggcatgagtcaccatgtccagcaatagatctttttttttttcttaaccacctgacatatctttatttactgcctacaaacctgtatagatccctttctatagtataagcactaagtttagtgcaggaactttgttttacttgctactcaacctcccctagtatagaacagtgcaa

SEQ ID NO: 8864 - DNA, 262 bp, Homo sapiens
gggtttcaccatgttggccaggctggtcttgaactcctgacctcaagtgatccgcctgcctcagccttccaaagtgttgggattacaggcatgagtcaccatgtccagcaatagatctttttttttttcttaaccacctgacatatctttatttactgcctacaaacctgtatagatccctttctatagtataagcactaagtttagtgcaggaactttgttttacttgctactcaacctcccctagtatagaacagtgcaa

SEQ ID NO: 8865 - DNA, 481 bp, Homo sapiens
acattctgtcccatctccacagtactgaaagtacattcatttatgacacctcaatccatttccactccaaaaccctagtgaaacgaagtgccccactcacttctggaagatggctttcttctttccaaatggagcttcaggaatgcacgggaaaagaggcagcctaagcatttacatgtatccgtgctcccaggctgattcacacaaagcatcagcaacctgcataaatttagcctgtgagggcgattgtgatagttgtgagagtgatgactgatttcaatatgcaagtatttattgggtgcctaaatgggcaaacattggggttatagtgatgaacacaacagatgtagtcttatcatacttttggggattttactttttaaaagtcacaatttgccagttgaggttgaaaggtgtgtcttttcttcccttaggggattataagggggggacaaagaattgagcttaaaggaaaatcatt

SEQ ID NO: 8866 - DNA, 475 bp, Homo sapiens
ttttttgatacatggtctcgctcagttgcccaggctgcaatgcagtggcatgatcatggctcactgtagcctcgacctctaccagctcaggtgatcctcccacctcaggctcctgagcagctggaacgacaggcacacaccaccatatgtggctaatttttgtatcttttgtagagacagggttttgccatgttgtccgggctggtctggaactcctaggtcaagtgatcctcccactttggcctcccaaagtgctggaattacaggcatgagccactgtgcctggccatacttgccttttaattccaactgacttcttagtccagttgatattttcctttgtcctgtttctgttctgtattttttgttatattgcatattgcatattctcctatggaataagaaatgtaaaccagcaaccaaagggcatatccagaaaactgcattaacgtaactggccagtagagcaaatgta

SEQ ID NO: 8867 - DNA, 201 bp, Homo sapiens
tagtctgaaagttaatgccactttaaaagaaacatctttgataatgagcttacatttaaaaatgaagagttgtatgggatgtagcaccatttcaggattgtggagcagagataggcaaactaatggctgcagaccaaatctgaccacaccagtttttgtgaataagtttttgattggaatgaagctattcatttgcttata

SEQ ID NO: 8868 - DNA, 1587 bp, Homo sapiens
gcagcattgtgacatcaccgtgcactagccaatggctgcctgcctaagctgggtccctggtctcctgggactactagccctttgttgatagggagaagccaacatctcccgcaggaccccctaatcttcagggcagctcccagagcatggatccctcctgattccactcagcccgatgttcctcacagtcaagctgctcctgggccagagatgcagtctgaaggtgtcagggcaagagagtgtagccacgctgaagagactggtgtccaggcggctgaaggtgcctgaggagcagcagcacctgcttttccgtggccagctcctggaggatgacaagcacctctctgactactgcattgggcccaatgcctctatcaatgtcatcatgcagcccttggagaagatggcgctaaaggaggcccaccagccgcagacccagcccctgtggcaccagctgggactggtcctagctaaacactttgaaccacaggatgccaaggccgtgctgcagctgctaaggcaggagcacgaggagcgcctgcagaagataagcctggagcacctggagcagctggcccagtacctcctggcagaggagcctcacgtggagccagctggagagagggagcttgaggcgaaggcacggcctcagagctcctgtgacatggaggagaaggaggaggcagcagctgatcagtaaacgggccatcctacccatttgcatgctaaaattctcccggcctcatccttacgtgttccctggtgacttttcctactacttcctgctgatgtggatgcgtccacacccctttttgaaccttccaagcagctggagggtttttggatccctgtcccctcttgggcctgaggtcctccctctgaaatgcagagtgaaccaaccctcatcaccatgcttcccctagaagggttctgatcaccggagggcagccccaaaggccacagtcccctcctgtgctggcagctttgccacacatacccagcagctccccaggctgaaagcagccctggcccagggtctccatggttctaggcagaccctctttctccttcgggacagaaagacaatgtgagttcattttcctccatcctcagaccgtgacatctcccctaggctccccagcagccaagaggagaggaatgtcaggtagctgccccttgccttctgggtgaggctgcccctgctgttctcctgcttgtgttccagcttaagggacaggcacagcagaggtgagagtgggaggagggcacgtaccgggtgccagccctggagccctcagggagacagacacagaccaagaatagcaggaaactgagcctcaggcagaaaaaaagttcagcaaagtcatacactccctgtggccagcgtgaacagagccatgccccaccctcccagactgatcagtcagtaggtatcacagctcacattacctgcccagcgctcccaaggctccctggaaggaaaaatggtatctgtcaatgaggatccttgccctcacagagcacgcagcctagatgcagagagctgctatacatgtgaaaagtaaagtggtgacatgaaactagagt

SEQ ID NO: 8869 - DNA, 398 bp, Homo sapiens
tacctctggagcttctccttctccaaacacctgaattttcattactgttggtgataggttttaaggtcatttttgtaaaagagagtatgatgtccatgaaataatgtgagaattacaatgctaattatttcagtccgttcttcagaatgtctaagtacactggaaacccagaaagcatttattttgttcaatgtggagaatacatcataaccagctcaaacactgagggcttcccaaaaggagtgaaagtaaattcactgttcacaagtctttctaataatggtaatctggccaaaagctaaatattatttggaatagttcatggggaaagttttttcatacctcagtctggtattttgttgaactcctttccaataaaatttactataccaaataat

SEQ ID NO: 8870 - DNA, 328 bp, Homo sapiens
gctccttccctgaccaggagtgatgcctccttctactttgccactgcttctcatatttcctcaaggagaatctgtgaactcagaatcaactcctccctgactcctctaactcttctagggtatcatggggagagtttgtggtgggtttttgtagaaagaagtaagatagatatattttcattcaatcctttaagtgagtaaagaaaaggaaaacagtttaatttctgtattaaagttttgaagattcagattttgccacttgtgaaaatatctttcagaaatgcatgctgtctagatgcacaattgaaatatatatttgaaaatgttg

SEQ ID NO: 8871 - DNA, 213 bp, Homo sapiens
ggagtttgagaccagcctgggcaatgtagcaagacctcatctctacaaaaagtttttaaaaattagttggacatgatcgtgcatgcctatagttctagctatttgggagattggggcaggaggattgcttgggcccaggaggtcgagggtgcagtgagctatggtcacgccactgtactctggcctgggcgatggagccagactctgtctctt

SEQ ID NO: 8872 - DNA, 1527 bp, Homo sapiens
ggcatatatgtagaaaatgttagttttatatcaaaatatggaaacctcatccagatagaaattctatgagtttctttggactctgttctaagttttttttgttttttgttttttgttttctttttcatattggactgaaatctgccaccctgtaacttccaactattggttctagttctgttctctggagcagcatggagtaagtgtcttctattagaaggcatctgtcaccttttctagactgaatttctccaggtgtcctcccctttttatatgaaattaaaacccatatctctgaccttcacattgattccctttggaatcttacaatctaatatgaacttcctagtttatcagtgttttccctaatacagttaaaatatgatagccccaaattttaatttaattctatactatatttctatgttactatgcacaccagtacagaataccttgtactatagaccattaatcagagactgagttaattagtgcagcttcaacattttttttttctttctcttagctattcttagttgttggctcatactaaaatgtggtcagctaaaacctatcagctaaataactgttggggctcttctttttttagtaggtgtttctgccttagtaatgtggctttaccttgtggaattgagtgtattattcagaaaacctagaacaagaaatacacttttatatgctaacatctgtaggcctttggttttagtgatataggctttcagtttaaaagttaaaataaacatattcctgtaagaactttagctagaaattcatttgattgctgttttggaaaatgtttttgtctctttgaggtttaaatgtttttaattgcaaagcatctgatttgtgtcttcttttacaaaacatgctattatatatttaaaagtaactttgtataatgaaatgctccctgtaagctggaaaatgtatctaaaataatagatattccattgtaggttttgtaccctggaacagaacttctcaaccctcagcactattgacatactttaaataattctttgttatgcacggctgtcctgtgcattgtaggatttgtaacagcatccctggcctctatccactggatgccagtagctcacatatcaccacctcctctgcagtttggtcatcaaaaatatatgcagatatggccatatgtcccctgggggaaaaattcccccagttgaataccaactgtcctaaagcaacagaagtattttttaatcagctggtcagtagtttctaccttaaatttctttctgtaattgggctagaatagaatatttttcttatggtttctttgtagagatttgtaaaactgtacaacataataaagaacttcacatgtaactaacactaaagttcctaatttggtcagttttttcttttcttcctaatactgttttttatcctagtttttaattcctgttatgtgatacaatctatgatctgaaacgtgtgactatataatgtattgagattaaagaatgaaaatttaaaaaaaaa

SEQ ID NO: 8873 - DNA, 430 bp, Homo sapiens
aggcaggaggcccaagatagaagcagaaataggcatcatatgatggtcacctactgttttctcttagagaaagacaataaataacccatgggctgacactaacataactatgatggcaacagttacacaccacttctgatggaaaagtgtatgcaaccagagcaagaagagcaagaagaaatgagtgcttttctgtcctttgagaccctgatgagccctgacaaagttgtcctcttcaaggagaagaaagggatagaatggcctctggaaatttaaagcaagggttagcaaactatagcctctgggacaaatctgtcctgctatctttttttaatagttgaaaaaaaataaaagaatactttgagacacaatattatatgaaattcaaatttcagtgcttgtaaataaagtatttttggaacgcagcaaa

SEQ ID NO: 8874 - DNA, 1901 bp, Homo sapiens
  misc_feature (1031)..(1031): n is a, c, g, or t
  misc_feature (1121)..(1121): n is a, c, g, or t
  misc_feature (1599)..(1599): n is a, c, g, or t
ctacagtttaaattctgatttttctggctacaagtttctaaaataagttgtgcttccttaaagtcctatgaactgaaaactagatgttttatcaggcgctgcctctaaaccccccaaccatcacagaaggaaatctcttcactgctggcattgacaactaataactgagggtgcccggaatccttcaccccatgtctagtgagtctacggaaccagggtaattgagacaatatctgttacaggaatcaactcctggatacatcacacttgagtcaaagcctggaaagctgaggaagcaacccctgagagcccaaaggaacgtcctaaatataatggaaattatttactacgccttgtgggaattgctttactctactatttgcagtaggactatatactatagcaccttcagggtggaatatctgacagggaatctcaattgctgtagcattttgcttaattattatcctcatagcaggaataactgttactaacaaaagataatatgtgggcctttccaaacatgtgcctctgcctctcattaggtagggaatgttgtttctatctcaaccaatcaggcctagtaagagactgctgaaaaacttaaaggtctaaaaagctaagggaataccaaaacaaccagacagattcttggtttgggagcagaatcatagcatgggtcaccccattcctgggccctctcctaataatatgcctaggactaatgttcttaccctgcctaattaacctttttcaaagatttttagctgacagactcatgaccatttcacacacaactacccaaaaacatctacagtgttatttctgcagtcaatccaagacccaaaaactgtctgtccccttgtcagcaggaagtagccagaaagaacacactgcccctcgtcatttttataactacagggtctggattgacagagcaggagcatcaccctcttcgacttcgacgaggaccatcattttaagtttcaccttgatcaaaacccaccaaaatccaaagggcatcagccttntggttaaggtcagcatgaacataaatcacacaacatctctgaccagaaacattcgaaacccctcccggaccagagacatgccagccccgngataaccttccccctggctggagagatgtcagccccaagataacctcccttctgaccagagacattccaaccctaccataagcttctcccccatgcagaaacattccaaacctgtaataagttctgtcaccaataaatactgtaagtctgtaagagagagctttcctgactgaaatcagccagaagcctctctcaggtttattctccaaaacaaacctgtctttgactgttgagccactttgtatttctttcctctttaacttacactgtgaccttacaaaacactcttattcaaaaaccctccaaaagtcttgaatttgagtgaatacctttttatagatccaaagagatgttaacgtgcttgttccttttcagtctttcttttctagtacttgggtagactttcctttggttggggagcggggtgcttaccatataacttgtaaaccaaagcatgaaatatatgtttctgtttaancatcaaaagtcttttgctgggcacggtggctcacacctgtaatcccagcactttgggaggatgaggcgggtggatcacctgagttcaggagttcaagaccagcctggtcaacatggtgaaaccccttctctgctcaaaatacaaaattagctgagcgtggtggtgcatgcctgtaatcccagctactccggaggctgaggcaggagaatcgcttgaacccgagaggcggaggttgcagtgagccgagatcatgccattgtactccagcctgggcaacaacagcgaaactccgtctcaaaaag

SEQ ID NO: 8875 - DNA, 344 bp, Homo sapiens
aatagctaatacttctggagaagaggatccattttctatgttatactctttcatattttaaaaaaacaagcacacggctgggcatggtggctcgtgtgtataatcctggcattttgggaaactgaggtgggaggatcgcttgatcccaggaattcaagaccagcctgggccacatagtgagactcccatttctacagaaaaaaaaaaaattgccaagcatggcagtgcatgcctgtggtcctagctacttgagacgctgaggcagtaggattgcttaagcctgggaggttgaggctgcagtgaactgtgattgtgccactgcactccaccctgcctcaaaaaaa

SEQ ID NO: 8876 - DNA, 1395 bp, Homo sapiens
aagccactgtaccccacctctgtgtttgattttaaggggaattggcccaaaaaataacatttatattatttcttcactatgattcacatgtccctcagaagcctctaattacaatggaattcttaaaaaaaattcacatttctcagcaaagctttccaacgaaaatttttatgataatcctttgtcatataagttaaaatagtaaaactagacaatagtgagtaagtattatatttgagacacctgctaggcatctgatataaggtggatgagaggatcagtgtcctttgggagtttaccctctagggaagcaactacatgaaaagttaaataaattataaaaatcacattttgaattgataaaagttatgagacagaacataatttggtttttatttatttttttgagacagggtctcactttgtcctccaggctggagtgctgcggcctcaacctcccaggttcaagggatcctgctgcctcagccccccaagtagctaggactacaagggtgcaccaccacacccagctaatttttgtattttttgtataaatggggtttcgccatgttgcccagactggtctcaaactcctgggctcaaaatctgcgtgccatggcttctcaaaacgctaggattactggcgtgagtcaccatgcctggcctataatttgttaatatggttgttactacaaagtttaaaataaattgcccatgcattcctatttataataggtgagtggaggacacttcaatctaaagtgatcttaaaggaggagtagtaggatttgaagatgaagaaagaagaggggaggtaaattactttccatcacttcaatttcaacccatcagataaaacctctctttagtaaacctgcatgtgggtggagctgtaacagcaattaaggacagtgtgactctgttcttctgactttgggaaaaccagtttggctggaacaaaaagctgatagagaagactaatggaagataaggttgaaaaggtaggtttgagggagctttgttacaggaaaaaaaaaaaaaaaaaactgggctttgtcctgtagacagtggagaggtactttagcagatgtaagacattaccattataggaaagcctctgaagtaacatacactgtggtttttcctgttgctgaaaatatgcccagagtaacaagatgtggcatagttggttatgtgtcttataaccagtgaggtgtgcccaaatgggaaattaatgaatgactacccaaaaagaagagggagagtgtttgaaacactgtcactgtgaaatagactggttgtatgaaaagttgcatatcaagcctttggcaaattatataaatactctgattttgacatcttaaaggagtatactatagaaaataaaagaaaaac

SEQ ID NO: 8877 - DNA, 1131 bp, Homo sapiens
gccgcgggggccattgatacagaggcttgctgcgcttggtgtgcgcggcccggccgggcctctggaaacgcccatgagaaatgagctcatgctggatgcgcgcgctccttgggcgcaactgcccagcgcaaaacgggccccgaaagcagggtctcactttgtcctccaggctggagtgctgcggcctcaacctcccaggttcaagggatcctgctgcctcagccccccaagtagctaggactacaagggtgcaccaccacacccagctaatttttgtattttttgtataaatggggtttcgccatgttgcccagactggtctcaaactcctgggctcaaaatctgcgtgccatggcttctcaaaacgctaggattactggcgtgagtcaccatgcctggcctataatttgttaatatggttgttactacaaagtttaaaataaattgcccatgcattcctatttataataggtgagtggaggacacttcaatctaaagtgatcttaaaggaggagtagtaggatttgaagatgaagaaagaagaggggaggtaaattactttccatcacttcaatttcaacccatcagataaaacctctctttagtaaacctgcatgtgggtggagctgtaacagcaattaaggacagtgtgactctgttcttctgactttgggaaaaccagtttggctggaacaaaaagctgatagagaagactaatggaagataaggttgaaaaggtaggtttgagggagctttgttacaggaaaaaaaaaaaaaaaaaactgggctttgtcctgtagacagtggagaggtactttagcagatgtaagacattaccattataggaaagcctctgaagtaacatacactgtggtttttcctgttgctgaaaatatgcccagagtaacaagatgtggcatagttggttatgtgtcttataaccagtgaggtgtgcccaaatgggaaattaatgaatgactacccaaaaagaagagggagagtgtttgaaacactgtcactgtgaaatagactggttgtatgaaaagttgcatatcaagcctttggcaaattatataaatactctgattttgacatcttaaaggagtatactatagaaaataaaagaaaaac

SEQ ID NO: 8878 - DNA, 1214 bp, Homo sapiens
gccgcgggggccattgatacagaggcttgctgcgcttggtgtgcgcggcccggccgggcctctggaaacgcccatgagaaatgagctcatgctggatgcgcgcgctccttgggcgcaactgcccagcgcaaaacgggccccgaaagcaggtgaggggaaatgccgtcaggccggatatcctgaagcctccgaggaaatgggggggtcagaggagcccgtggtagctttggatcttttggaactagggtgatctataaaagtgcagcttgagaagatttcatacataagaccagcgtccattgttctaccatagaaccagttcctttggtctgctttagaacagtgaggtatggctacgtcaagataacagagaaagtagaacagacagttgccatcctgattgtaatccagtggtgcctgtaatttctacctgcagagtcatctctttctgttaagatgctgtctccagaaagcacatgttaaaggacctatatttgatcagattacctggctcttgctttgaaacactgatgaaggacttgggacagaacaaagtgagtggaggacacttcaatctaaagtgatcttaaaggaggagtagtaggatttgaagatgaagaaagaagaggggaggtaaattactttccatcacttcaatttcaacccatcagataaaacctctctttagtaaacctgcatgtgggtggagctgtaacagcaattaaggacagtgtgactctgttcttctgactttgggaaaaccagtttggctggaacaaaaagctgatagagaagactaatggaagataaggttgaaaaggtaggtttgagggagctttgttacaggaaaaaaaaaaaaaaaaaactgggctttgtcctgtagacagtggagaggtactttagcagatgtaagacattaccattataggaaagcctctgaagtaacatacactgtggtttttcctgttgctgaaaatatgcccagagtaacaagatgtggcatagttggttatgtgtcttataaccagtgaggtgtgcccaaatgggaaattaatgaatgactacccaaaaagaagagggagagtgtttgaaacactgtcactgtgaaatagactggttgtatgaaaagttgcatatcaagcctttggcaaattatataaatactctgattttgacatcttaaaggagtatactatagaaaataaaagaaaaac

SEQ ID NO: 8879 - DNA, 630 bp, Homo sapiens
agagacgctggtgaaactgcacggctgggcgccgccgccgctttgtgattggctggaaaactccgctgggagcgtacctccttcggtgattggtgaagagaagggggcttccgaggacagtctggccagtcaggacttcccctccctctccaagagtcatctctttctgttaagatgctgtctccagaaagcacatgttaaaggacctatatttgatcagattacctggctcttgctttgaaacactgatgaaggacttgggacagaacaaagtgagtggaggacacttcaatctaaagtgatcttaaaggaggagtagtaggatttgaagatgaagaaagaagaggggaggttaaaaaatggaggcaacagctgggtacagtggctcactcctgtaattccagcactttaggaggccaaggctggagtgcaatggtgcgatctcgactcactgcaacctctgcctcccaggttcaagcaattctcctgcctcagcttcccgagtagcttggactacagaactgcttacaatggctaagatttggaagcaacctaagtgtccaacagaggaatggataaagaaaatgtggtacatatacacaatggagtactattccgccataaaaaaga

SEQ ID NO: 8880 - DNA, 815 bp, Homo sapiens
gccgcgggggccattgatacagaggcttgctgcgcttggtgtgcgcggcccggccgggcctctggaaacgcccatgagaaatgagctcatgctggatgcgcgcgctccttgggcgcaactgcccagcgcaaaacgggccccgaaagcaggtgaggggaaatgccgtcaggccggatatcctgaagcctccgaggaaatgggggggtcagaggagcccgtggtagctttggatcttttggaactagggtgatctataaaagtgcagcttgagaagatttcatacataagaccagcgtccattgttctaccatagaaccagttcctttggtctgctttagaacagtgaggtatggctacgtcaagataacagagaaagtagaacagacagttgccatcctgattgtaatccagtggtgcctgtaatttctacctgcagagtcatctctttctgttaagatgctgtctccagaaagcacatgttaaaggacctatatttgatcagattacctggctcttgctttgaaacactgatgaaggacttgggacagaacaaagtaagctttgatggaagacaggaaaggtctagatagtgtttgcagattcaaatggctacagaggccagacaagtaaagcaaatgagtgagactggccttgtgtaagacaatggggaatgatagggaaaatggcaaattggaatatccatgccataactaaaaggaacagctgctcaactctagcagattgttgccctcaggaatgtgggtccagtgttctcagatgttcaatttttttcctcccaaaagaaaccccaaaat

SEQ ID NO: 8881 - DNA, 2162 bp, Homo sapiens
ggctgtcacccgcaccggatctgcttccagggcttggtttcgctttgcctggctcttggctaggcctggcgccccgcgcggagccgagcaggtggcagccgaggagtggcgggggctggaacatttaaccctttgggagcacctgccctctcccagagggcgcgtccccggatcaggcccggtgccccgcagcgcgcgtgggtcctggctggctggaaggaggccctgaccttgctttctctcccgtgccaggtctgccaaggaccatgggtgccgcgctggggacaggcacgcggctggctccctggccgggccgggcctgcggcgccctcccgcgctggacacccaccgcgcccgcccaaggctgccactccaagcctggcccggcgcgccctgtgcccctgaagaagcgcggatacgatgtcaccaggaaccctcatctcaacaaggggatggcctttacccttgaagaaaggctgcagcttggaatccacggcctaatcccgccctgctttctgagccaggacgtccagctcctccgaatcatgagatattacgagcggcagcagagtgacctggacaagtacatcattctcatgacactccaagaccggaacgagaagctcttctaccgagtgctgacttcggacgtggagaagttcatgccaatcgtgtacacgcctaccgtggggctggcctgtcagcactatggcctgactttccgcaggccccgtggactgttcatcaccattcatgacaaaggtcatcttgcaacaatgctgaattcttggccagaagacaatattaaggccgtggtggtgactgatggggagcgcatcctgggcctgggagacctgggctgctacggcatgggcatccctgtgggcaagctggccctgtacacggcatgcggaggggtgaacccgcagcagtgcctccctgtgctgctggacgtcggcaccaacaatgaggagctgctcagagaccctctgtacatcggcctgaaacaccagcgcgtgcacgggaaggcatacgatgacttgctggatgagttcatgcaggctgtgacagacaagtttggaataaattgcctcatccaatttgaagacttcgccaatgccaatgccttccgcctgctcaacaaataccgtaacaagtactgcatgttcaatgatgacatccaaggcacagcctccgttgctgtggcagggatcttggctgctctgcgaatcaccaagaacaagctttccaatcacgtgtttgttttccaaggtgcaggcgaggcagctatgggcattgcccacctccttgtcatggccctagagaaagaaggtgtaccgaaggcagaggccacaagaaagatctggatggtggactctaaagggctcattgtcaaggggaggagccacctgaaccatgaaaaggagatgtttgcccaagaccatcctgaagtcaactccctggaggaggtggtgaggctggtgaagcccacagccatcataggtgttgctgccatcgcaggagccttcacggagcagattctgagggacatggcctccttccacgagcgccctatcatctttgccctgagcaaccccaccagcaaggccgagtgcacggctgagaagtgctaccgggtcaccgagggccgagggatttttgccagtggaagtccttttaagagtgtgactctggaagatggcaagaccttcattcctgggcagggaaacaatgcttacgtgttccccggggtggcactgggagtcatcgccggcgggatccggcacatcccagatgagatcttcctcctgacagcagagcaaattgcccaggaagtctctgagcagcatctgtcccaggggagactctacccaccactcagcaccatccgagacgtgtctttgagaattgccatcaaagttctcgactacgcgtacaaacacaacctggcttcctactacccagagcctaaggacaaggaggcttttgtaagatccctggtctacactccagactatgactcctttacactggacagctacacttggcccaaggaagccatgaatgttcagacggtctgaggcagtctcagaggctagtatggggctagatgaagcccagagtaacacccacaatataaatgggttccaaaatggcccaag

SEQ ID NO: 8882 - DNA, 849 bp, Homo sapiens
gataactttatttgccaaattttgtaatttggagcttaagaaccactgtttttcctcttgagttctggcctgtaccaagtgcagaaatagcttcccaaaggaaaaaaatgggcaacagtaccaaatgctgctgagaggtcaagaaagaagaaggctgagaactgattactgaatttggccacctggaggtacttggggaccctgacaagaggcacagcctccgttgctgtggcagggatcttggctgctctgcgaatcaccaagaacaagctttccaatcacgtgtttgttttccaaggtgcaggcgaggcagctatgggcattgcccacctccttgtcatggccctagagaaagaaggtgtaccgaaggcagaggccacaagaaagatctggatggtggactctaaagggctcattgtcaaggggaggagccacctgaaccatgaaaaggagatgtttgcccaagaccatcctgaagtcaactccctggaggaggtggtgaggctggtgaagcccacagccatcataggtgttgctgccatcgcaggagccttcacggagcagattctgagggacatggcctccttccacgagcgccctatcatctttgccctgagcaaccccaccagcaaggccgagtgcacggctgagaagtgctaccgggtcaccgaggtcagcggggagtccttccttcccccggctgagaggacatagtaacaattacaatgagtaacctcatgagggtgaaaaatactcctacatcgctgatgagcaaactgaatttcagaaagatgaagtaacatgcccaaggtcaaagagctaataaggagtggagctggctgtcaaacc

SEQ ID NO: 8883 - DNA, 527 bp, Homo sapiens
gataactttatttgccaaattttgtaatttggagcttaagaaccactgtttttcctcttgagttctggcctgtaccaagtgcagaaatagcttcccaaaggaaaaaaatgggcaacacatctgtcccaggggagactctacccaccactcagcaccatccgagacgtgtctttgagaattgccatcaaagttctcgactacgcgtacaaacacaacctggcttcctactacccagagcctaaggacaaggaggcttttgtaagatccctggtctacactccagactatgactcctttacactggacagctacacttggcccaaggaagccatgaatgttcagacggtctgaggcagtctcagaggctagtatggggctagatgaagcccagagtaacacccacaatataaatgggttccaaaatggcccaagtgaatccttgtcgctgtgttttttcttttaaactttctggtgtgagaggagatgccaaggcatacagtgaataaaagccttgtctctgaagaccc

SEQ ID NO: 8884 - DNA, 348 bp, Homo sapiens
actgtgcaagctgggatctgtccagggatactgcctcagagaggcaatcatgggtttcttcctctccctccacacaggtttggaataaattgcctcatccaatttgaagacttcgccaatgccaatgccttccgcctgctcaacaaataccgtaacaagtactgcatgttcaatgatgacatccaaggtaggtttccaccccacctgatgaagctacaggggactaacttatattctcaacctcactgggatgccaaaggggtgaggaaaggctgtcaccccatagttggtttgctgccagcagctgttgaaaaaagaatattaaacttagattcaactcctaattgg

SEQ ID NO: 8885 - DNA, 629 bp, Homo sapiens
attgacaggggaattaatggctcttataagcatattcaaattagctccctgaccctgggtggcacaggtccccatccctcaactgagcttggtgctggatgccttgggccaaagggtcttggtgagactcaggcattgcccaaaagcctttctgtcctggcccaggaagccataatcctaacagctcaaataaattctttatggattctccatatgtggtttgggttaaagaaacatgcacacacacacacaccccactctcacacttatgtcccaccataggttctgccaggaaatgtagtcaagaagatgggccccaaaacatctgacagctcaaaccaaagcatggggctcagcaggaaacgctctcagagtttccaaatgcatctgtactcctacccaacaggccatcacgaccacaactgctctgtgttccttttcctgtaggggaggagccacctgaaccatgaaaaggagatgtttgcccaagaccatcctgaagtcaactccctgtgagcagcgttggcacacgcaaaaaagaaaaccaaagtggtccacaaaacattctcctttccttctgaaggttttacgatgcattgttatcattaaccagtcttttactactaaac

SEQ ID NO: 8886 - DNA, 299 bp, Homo sapiens
gacgatggtgtgcgaccagacacagccaaccttatgacttggtagataagatgggcagctcaggccatatggtcatttaatgcctcatggtcaggttgtgttctcatttttttaaatgtttttatccatttagcccttatataattctatgaggctcatgcttctttttgtcttccattatatttatccttgtcattttctttatgaatgatgatggtagcagcacctggctatctgatcccatcttatggggtcaagtaacaaatcaggagctgtttctcaacttcaacaacaaaaaa

SEQ ID NO: 8887 - DNA, 2257 bp, Homo sapiens
ggctgtcacccgcaccggatctgcttccagggcttggtttcgctttgcctggctcttggctaggcctggcgccccgcgcggagccgagcaggtggcagccgaggagtggcgggggctggaacatttaaccctttgggagcacctgccctctcccagagggcgcgtccccggatcaggcccggtgccccgcagcgcgcgtgggtcctggctggctggaaggaggccctgaccttgctttctctcccgtgccaggtctgccaaggaccatgggtgccgcgctggggacaggcacgcggctggctccctggccgggccgggcctgcggcgccctcccgcgctggacacccaccgcgcccgcccaaggctgccactccaagcctggcccggcgcgccctgtgcccctgaagaagcgcggatacgatgtcaccaggaaccctcatctcaacaaggggatggcctttacccttgaagaaaggctgcagcttggaatccacggcctaatcccgccctgctttctgagccaggacgtccagctcctccgaatcatgagatattacgagcggcagcagagtgacctggacaagtacatcattctcatgacactccaagaccggaacgagaagctcttctaccgagtgctgacttcggacgtggagaagttcatgccaatcgtgtacacgcctaccgtggggctggcctgtcagcactatggcctgactttccgcaggccccgtggactgttcatcaccattcatgacaaaggtcatcttgcaacaatgctgaattcttggccagaagacaatattaaggccgtggtggtgactgatggggagcgcatcctgggcctgggagacctgggctgctacggcatgggcatccctgtgggcaagctggccctgtacacggcatgcggaggggtgaacccgcagcagtgcctccctgtgctgctggacgtcggcaccaacaatgaggagctgctcagagaccctctgtacatcggcctgaaacaccagcgcgtgcacgggaaggcatacgatgacttgctggatgagttcatgcaggctgtgacagacaagtttggaataaattgcctcatccaatttgaagacttcgccaatgccaatgccttccgcctgctcaacaaataccgtaacaagtactgcatgttcaatgatgacatccaaggcacagcctccgttgctgtggcagggatcttggctgctctgcgaatcaccaagaacaagctttccaatcacgtgtttgttttccaaggtgcaggcgaggcagctatgggcattgcccacctccttgtcatggccctagagaaagaaggtgtaccgaaggcagaggccacaagaaagatctggatggtggactctaaagggctcattgtcaaggggaggagccacctgaaccatgaaaaggagatgtttgcccaagaccatcctgaagtcaactccctggaggaggtggtgaggctggtgaagcccacagccatcataggtgttgctgccatcgcaggagccttcacggagcagattctgagggacatggcctccttccacgagcgccctatcatctttgccctgagcaaccccaccagcaaggccgagtgcacggctgagaagtgctaccgggtcaccgagggccgagggatttttgccagtggaagtccttttaagagtgtgactctggaagatggcaagaccttcattcctgggcagggaaacaatgcttacgtgttccccggggtggcactgggagtcatcgccggcgggatccggcacatcccagatgagatcttcctcctgacagcagagcaaattgcccaggaagtctctgagcagcatctgtcccaggggagactctacccaccactcagcaccatccgagacgtgtctttgagaattgccatcaaagttctcgactacgcgtacaaacacaacctggcttcctactacccagagcctaaggacaaggaggcttttgtaagatccctggtctacactccagactatgactcctttacactggacagctacacttggcccaaggaagccatgaatgttcagacggtctgaggcagtctcagaggctagtatggggctagatgaagcccagagtaacacccacaatataaatgggttccaaaatggcccaagtgaatccttgtcgctgtgttttttcttttaaactttctggtgtgagaggagatgccaaggcatacagtgaataaaagccttgtctctgaagaccc

SEQ ID NO: 8888 - DNA, 2164 bp, Homo sapiens
aggttgtgggaccgctctttgaggaactcaccagctccgcgagctcgcggccgccagcgcggtccacccattggcgggagaggactcacagaccgcagctcctcaccccgcctgctccgcagcgggaccgcgtagacctcagctccccgagcagcgcaggtctgccaaggaccatgggtgccgcgctggggacaggcacgcggctggctccctggccgggccgggcctgcggcgccctcccgcgctggacacccaccgcgcccgcccaaggctgccactccaagcctggcccggcgcgccctgtgcccctgaagaagcgcggatacgatgtcaccaggaaccctcatctcaacaaggggatggcctttacccttgaagaaaggctgcagcttggaatccacggcctaatcccgccctgctttctgagccaggacgtccagctcctccgaatcatgagatattacgagcggcagcagagtgacctggacaagtacatcattctcatgacactccaagaccggaacgagaagctcttctaccgagtgctgacttcggacgtggagaagttcatgccaatcgtgtacacgcctaccgtggggctggcctgtcagcactatggcctgactttccgcaggccccgtggactgttcatcaccattcatgacaaaggtcatcttgcaacaatgctgaattcttggccagaagacaatattaaggccgtggtggtgactgatggggagcgcatcctgggcctgggagacctgggctgctacggcatgggcatccctgtgggcaagctggccctgtacacggcatgcggaggggtgaacccgcagcagtgcctccctgtgctgctggacgtcggcaccaacaatgaggagctgctcagagaccctctgtacatcggcctgaaacaccagcgcgtgcacgggaaggcatacgatgacttgctggatgagttcatgcaggctgtgacagacaagtttggaataaattgcctcatccaatttgaagacttcgccaatgccaatgccttccgcctgctcaacaaataccgtaacaagtactgcatgttcaatgatgacatccaaggcacagcctccgttgctgtggcagggatcttggctgctctgcgaatcaccaagaacaagctttccaatcacgtgtttgttttccaaggtgcaggcgaggcagctatgggcattgcccacctccttgtcatggccctagagaaagaaggtgtaccgaaggcagaggccacaagaaagatctggatggtggactctaaagggctcattgtcaaggggaggagccacctgaaccatgaaaaggagatgtttgcccaagaccatcctgaagtcaactccctggaggaggtggtgaggctggtgaagcccacagccatcataggtgttgctgccatcgcaggagccttcacggagcagattctgagggacatggcctccttccacgagcgccctatcatctttgccctgagcaaccccaccagcaaggccgagtgcacggctgagaagtgctaccgggtcaccgagggccgagggatttttgccagtggaagtccttttaagagtgtgactctggaagatggcaagaccttcattcctgggcagggaaacaatgcttacgtgttccccggggtggcactgggagtcatcgccggcgggatccggcacatcccagatgagatcttcctcctgacagcagagcaaattgcccaggaagtctctgagcagcatctgtcccaggggagactctacccaccactcagcaccatccgagacgtgtctttgagaattgccatcaaagttctcgactacgcgtacaaacacaacctggcttcctactacccagagcctaaggacaaggaggcttttgtaagatccctggtctacactccagactatgactcctttacactggacagctacacttggcccaaggaagccatgaatgttcagacggtctgaggcagtctcagaggctagtatggggctagatgaagcccagagtaacacccacaatataaatgggttccaaaatggcccaagtgaatccttgtcgctgtgttttttcttttaaactttctggtgtgagaggagatgccaaggcatacagtgaataaaagccttgtctctgaagaccc

SEQ ID NO: 8889 - DNA, 1531 bp, Homo sapiens
  misc_feature (15)..(16): n is a, c, g, or t
  misc_feature (23)..(23): n is a, c, g, or t
caggctggtacgccnnggagtantgggatatcgtcgaacccacgtcgctccggctgaattcttggccagaagacaatattaaggccgtggtggtgactgatggggagcgcatcctgggcctgggagacctgggctgctacggcatgggcatccctgtgggcaagctggccctgtacacggcatgcggaggggtgaacccgcagcagtgcctccctgtgctgctggacgtcggcaccaacaatgaggagctgctcagagaccctctgtacatcggcctgaaacaccagcgcgtgcacgggaaggcatacgatgacttgctggatgagttcatgcaggctgtgacagacaagtttggaataaattgcctcatccaatttgaagacttcgccaatgccaatgccttccgcctgctcaacaaataccgtaacaagtactgcatgttcaatgatgacatccaaggcacagcctccgttgctgtggcagggatcttggctgctctgcgaatcaccaagaacaagctttccaatcacgtgtttgttttccaaggtgcaggcgaggcagctatgggcattgcccacctccttgtcatggccctagagaaagaaggtgtaccgaaggcagaggccacaagaaagatctggatggtggactctaaagggctcattgtcaaggggaggagccacctgaaccatgaaaaggagatgtttgcccaagaccatcctgaagtcaactccctggaggaggtggtgaggctggtgaagcccacagccatcataggtgttgctgccatcgcaggagccttcacggagcagattctgagggacatggcctccttccacgagcgccctatcatctttgccctgagcaaccccaccagcaaggccgagtgcacggctgagaagtgctaccgggtcaccgagggccgagggatttttgccagtggaagtccttttaagagtgtgactctggaagatggcaagaccttcattcctgggcagggaaacaatgcttacgtgttccccggggtggcactgggagtcatcgccggcgggatccggcacatcccagatgagatcttcctcctgacagcagagcaaattgcccaggaagtctctgagcagcatctgtcccaggggagactctacccaccactcagcaccatccgagacgtgtctttgagaattgccatcaaagttctcgactacgcgtacaaacacaacctggcttcctactacccagagcctaaggacaaggaggcttttgtaagatccctggtctacactccagactatgactcctttacactggacagctacacttggcccaaggaagccatgaatgttcagacggtctgaggcagtctcagaggctagtatggggctagatgaagcccagagtaacacccacaatataaatgggttccaaaatggcccaagtgaatccttgtcgctgtgttttttcttttaaactttctggtgtgagaggagatgccaaggcatacagtgaataaaagccttgtctctgaagaccc

SEQ ID NO: 8890 - DNA, 1283 bp, Homo sapiens
gataactttatttgccaaattttgtaatttggagcttaagaaccactgtttttcctcttgagttctggcctgtaccaagtgcagaaatagcttcccaaaggaaaaaaatgggcaacagtaccaaatgctgctgagaggtcaagaaagaagaaggctgagaactgattactgaatttggccacctggaggtacttggggaccctgacaagaggcacagcctccgttgctgtggcagggatcttggctgctctgcgaatcaccaagaacaagctttccaatcacgtgtttgttttccaaggtgcaggcgaggcagctatgggcattgcccacctccttgtcatggccctagagaaagaaggtgtaccgaaggcagaggccacaagaaagatctggatggtggactctaaagggctcattgtcaaggggaggagccacctgaaccatgaaaaggagatgtttgcccaagaccatcctgaagtcaactccctggaggaggtggtgaggctggtgaagcccacagccatcataggtgttgctgccatcgcaggagccttcacggagcagattctgagggacatggcctccttccacgagcgccctatcatctttgccctgagcaaccccaccagcaaggccgagtgcacggctgagaagtgctaccgggtcaccgagggccgagggatttttgccagtggaagtccttttaagagtgtgactctggaagatggcaagaccttcattcctgggcagggaaacaatgcttacgtgttccccggggtggcactgggagtcatcgccggcgggatccggcacatcccagatgagatcttcctcctgacagcagagcaaattgcccaggaagtctctgagcagcatctgtcccaggggagactctacccaccactcagcaccatccgagacgtgtctttgagaattgccatcaaagttctcgactacgcgtacaaacacaacctggcttcctactacccagagcctaaggacaaggaggcttttgtaagatccctggtctacactccagactatgactcctttacactggacagctacacttggcccaaggaagccatgaatgttcagacggtctgaggcagtctcagaggctagtatggggctagatgaagcccagagtaacacccacaatataaatgggttccaaaatggcccaagtgaatccttgtcgctgtgttttttcttttaaactttctggtgtgagaggagatgccaaggcatacagtgaataaaagccttgtctctgaagaccc

SEQ ID NO: 8891 - DNA, 1523 bp, Homo sapiens
aggctcaaggcatcctcgaatttcttcttgttggagcttcctggatcgccatgtgggggagtcacacctgtgttggccgtggtggtgactgatggggagcgcatcctgggcctgggagacctgggctgctacggcatgggcatccctgtgggcaagctggccctgtacacggcatgcggaggggtgaacccgcagcagtgcctccctgtgctgctggacgtcggcaccaacaatgaggagctgctcagagaccctctgtacatcggcctgaaacaccagcgcgtgcacgggaaggcatacgatgacttgctggatgagttcatgcaggctgtgacagacaagtttggaataaattgcctcatccaatttgaagacttcgccaatgccaatgccttccgcctgctcaacaaataccgtaacaagtactgcatgttcaatgatgacatccaaggcacagcctccgttgctgtggcagggatcttggctgctctgcgaatcaccaagaacaagctttccaatcacgtgtttgttttccaaggtgcaggcgaggcagctatgggcattgcccacctccttgtcatggccctagagaaagaaggtgtaccgaaggcagaggccacaagaaagatctggatggtggactctaaagggctcattgtcaaggggaggagccacctgaaccatgaaaaggagatgtttgcccaagaccatcctgaagtcaactccctggaggaggtggtgaggctggtgaagcccacagccatcataggtgttgctgccatcgcaggagccttcacggagcagattctgagggacatggcctccttccacgagcgccctatcatctttgccctgagcaaccccaccagcaaggccgagtgcacggctgagaagtgctaccgggtcaccgagggccgagggatttttgccagtggaagtccttttaagagtgtgactctggaagatggcaagaccttcattcctgggcagggaaacaatgcttacgtgttccccggggtggcactgggagtcatcgccggcgggatccggcacatcccagatgagatcttcctcctgacagcagagcaaattgcccaggaagtctctgagcagcatctgtcccaggggagactctacccaccactcagcaccatccgagacgtgtctttgagaattgccatcaaagttctcgactacgcgtacaaacacaacctggcttcctactacccagagcctaaggacaaggaggcttttgtaagatccctggtctacactccagactatgactcctttacactggacagctacacttggcccaaggaagccatgaatgttcagacggtctgaggcagtctcagaggctagtatggggctagatgaagcccagagtaacacccacaatataaatgggttccaaaatggcccaagtgaatccttgtcgctgtgttttttcttttaaactttctggtgtgagaggagatgccaaggcatacagtgaataaaagccttgtctctgaagaccc

SEQ ID NO: 8892 - DNA, 2114 bp, Homo sapiens
ggctgtcacccgcaccggatctgcttccagggcttggtttcgctttgcctggctcttggctaggcctggcgccccgcgcggagccgagcaggtggcagccgaggagtggcgggggctggaacatttaaccctttgggagcacctgccctctcccagagggcgcgtccccggatcaggcccggtgccccgcagcgcgcgtgggtcctggctggctggaaggaggccctgaccttgctttctctcccgtgccaggtctgccaaggaccatgggtgccgcgctggggacaggcacgcggctggctccctggccgggccgggcctgcggcgccctcccgcgctggacacccaccgcgcccgcccaaggctgccactccaagcctggcccggcgcgccctgtgcccctgaagaagcgcggatacgatgtcaccaggaaccctcatctcaacaaggggatggcctttacccttgaagaaaggctgcagcttggaatccacggcctaatcccgccctgctttctgagccaggacgtccagctcctccgaatcatgagatattacgagcggcagcagagtgacctggacaagtacatcattctcatgacactccaagaccggaacgagaagctcttctaccgagtgctgacttcggacgtggagaagttcatgccaatcgtgtacacgcctaccgtggggctggcctgtcagcactatggcctgactttccgcaggccccgtggactgttcatcaccattcatgacaaaggtcatcttgcaacaatgctgaattcttggccagaagacaatattaaggccgtggtggtgactgatggggagcgcatcctgggcctgggagacctgggctgctacggcatgggcatccctgtgggcaagctggccctgtacacggcatgcggaggggtgaacccgcagcagtgcctccctgtgctgctggacgtcggcaccaacaatgaggagctgctcagagaccctctgtacatcggcctgaaacaccagcgcgtgcacgggaaggcatacgatgacttgctggatgagttcatgcaggctgtgacagacaagtttggaataaattgcctcatccaatttgaagacttcgccaatgccaatgccttccgcctgctcaacaaataccgtaacaagtactgcatgttcaatgatgacatccaaggcacagcctccgttgctgtggcagggatcttggctgctctgcgaatcaccaagaacaagctttccaatcacgtgtttgttttccaaggtgcaggcgaggcagctatgggcattgcccacctccttgtcatggccctagagaaagaaggtgtaccgaaggcagaggccacaagaaagatctggatggtggactctaaagggctcattgtcaaggggaggagccacctgaaccatgaaaaggagatgtttgcccaagaccatcctgaagtcaactccctggaggaggtggtgaggctggtgaagcccacagccatcatagggccgagggatttttgccagtggaagtccttttaagagtgtgactctggaagatggcaagaccttcattcctgggcagggaaacaatgcttacgtgttccccggggtggcactgggagtcatcgccggcgggatccggcacatcccagatgagatcttcctcctgacagcagagcaaattgcccaggaagtctctgagcagcatctgtcccaggggagactctacccaccactcagcaccatccgagacgtgtctttgagaattgccatcaaagttctcgactacgcgtacaaacacaacctggcttcctactacccagagcctaaggacaaggaggcttttgtaagatccctggtctacactccagactatgactcctttacactggacagctacacttggcccaaggaagccatgaatgttcagacggtctgaggcagtctcagaggctagtatggggctagatgaagcccagagtaacacccacaatataaatgggttccaaaatggcccaagtgaatccttgtcgctgtgttttttcttttaaactttctggtgtgagaggagatgccaaggcatacagtgaataaaagccttgtctctgaagaccc

SEQ ID NO: 8893 - DNA, 1071 bp, Homo sapiens
gataactttatttgccaaattttgtaatttggagcttaagaaccactgtttttcctcttgagttctggcctgtaccaagtgcagaaatagcttcccaaaggaaaaaaatgggcaacagtaccaaatgctgctgagaggtcaagaaagaagaaggctgagaactgattactgaatttggccacctggaggtacttggggaccctgacaagaggggaggagccacctgaaccatgaaaaggagatgtttgcccaagaccatcctgaagtcaactccctggaggaggtggtgaggctggtgaagcccacagccatcataggtgttgctgccatcgcaggagccttcacggagcagattctgagggacatggcctccttccacgagcgccctatcatctttgccctgagcaaccccaccagcaaggccgagtgcacggctgagaagtgctaccgggtcaccgagggccgagggatttttgccagtggaagtccttttaagagtgtgactctggaagatggcaagaccttcattcctgggcagggaaacaatgcttacgtgttccccggggtggcactgggagtcatcgccggcgggatccggcacatcccagatgagatcttcctcctgacagcagagcaaattgcccaggaagtctctgagcagcatctgtcccaggggagactctacccaccactcagcaccatccgagacgtgtctttgagaattgccatcaaagttctcgactacgcgtacaaacacaacctggcttcctactacccagagcctaaggacaaggaggcttttgtaagatccctggtctacactccagactatgactcctttacactggacagctacacttggcccaaggaagccatgaatgttcagacggtctgaggcagtctcagaggctagtatggggctagatgaagcccagagtaacacccacaatataaatgggttccaaaatggcccaagtgaatccttgtcgctgtgttttttcttttaaactttctggtgtgagaggagatgccaaggcatacagtgaataaaagccttgtctctgaagaccc

SEQ ID NO: 8894 - DNA, 1307 bp, Homo sapiens
attgacaggggaattaatggctcttataagcatattcaaattagctccctgaccctgggtggcacaggtccccatccctcaactgagcttggtgctggatgccttgggccaaagggtcttggtgagactcaggcattgcccaaaagcctttctgtcctggcccaggaagccataatcctaacagctcaaataaattctttatggattctccatatgtggtttgggttaaagaaacatgcacacacacacacaccccactctcacacttatgtcccaccataggttctgccaggaaatgtagtcaagaagatgggccccaaaacatctgacagctcaaaccaaagcatggggctcagcaggaaacgctctcagagtttccaaatgcatctgtactcctacccaacaggccatcacgaccacaactgctctgtgttccttttcctgtaggggaggagccacctgaaccatgaaaaggagatgtttgcccaagaccatcctgaagtcaactccctggaggaggtggtgaggctggtgaagcccacagccatcataggtgttgctgccatcgcaggagccttcacggagcagattctgagggacatggcctccttccacgagcgccctatcatctttgccctgagcaaccccaccagcaaggccgagtgcacggctgagaagtgctaccgggtcaccgagggccgagggatttttgccagtggaagtccttttaagagtgtgactctggaagatggcaagaccttcattcctgggcagggaaacaatgcttacgtgttccccggggtggcactgggagtcatcgccggcgggatccggcacatcccagatgagatcttcctcctgacagcagagcaaattgcccaggaagtctctgagcagcatctgtcccaggggagactctacccaccactcagcaccatccgagacgtgtctttgagaattgccatcaaagttctcgactacgcgtacaaacacaacctggcttcctactacccagagcctaaggacaaggaggcttttgtaagatccctggtctacactccagactatgactcctttacactggacagctacacttggcccaaggaagccatgaatgttcagacggtctgaggcagtctcagaggctagtatggggctagatgaagcccagagtaacacccacaatataaatgggttccaaaatggcccaagtgaatccttgtcgctgtgttttttcttttaaactttctggtgtgagaggagatgccaaggcatacagtgaataaaagccttgtctctgaagaccc

SEQ ID NO: 8895 - DNA, 2174 bp, Homo sapiens
ggctgtcacccgcaccggatctgcttccagggcttggtttcgctttgcctggctcttggctaggcctggcgccccgcgcggagccgagcaggtggcagccgaggagtggcgggggctggaacatttaaccctttgggagcacctgccctctcccagagggcgcgtccccggatcaggcccggtgccccgcagcgcgcgtgggtcctggctggctggaaggaggccctgaccttgctttctctcccgtgccaggtctgccaaggaccatgggtgccgcgctggggacaggcacgcggctggctccctggccgggccgggcctgcggcgccctcccgcgctggacacccaccgcgcccgcccaaggctgccactccaagcctggcccggcgcgccctgtgcccctgaagaagcgcggatacgatgtcaccaggaaccctcatctcaacaaggggatggcctttacccttgaagaaaggctgcagcttggaatccacggcctaatcccgccctgctttctgagccaggacgtccagctcctccgaatcatgagatattacgagcggcagcagagtgacctggacaagtacatcattctcatgacactccaagaccggaacgagaagctcttctaccgagtgctgacttcggacgtggagaagttcatgccaatcgtgtacacgcctaccgtggggctggcctgtcagcactatggcctgactttccgcaggccccgtggactgttcatcaccattcatgacaaaggtcatcttgcaacaatgctgaattcttggccagaagacaatattaaggccgtggtggtgactgatggggagcgcatcctgggcctgggagacctgggctgctacggcatgggcatccctgtgggcaagctggccctgtacacggcatgcggaggggtgaacccgcagcagtgcctccctgtgctgctggacgtcggcaccaacaatgaggagctgctcagagaccctctgtacatcggcctgaaacaccagcgcgtgcacgggaaggcatacgatgacttgctggatgagttcatgcaggctgtgacagacaagtttggaataaattgcctcatccaatttgaagacttcgccaatgccaatgccttccgcctgctcaacaaataccgtaacaagtactgcatgttcaatgatgacatccaaggcacagcctccgttgctgtggcagggatcttggctgctctgcgaatcaccaagaacaagctttccaatcacgtgtttgttttccaaggtgcaggcgaggcagctatgggcattgcccacctccttgtcatggccctagagaaagaaggtgtaccgaaggcagaggccacaagaaagatctggatggtggactctaaagggctcattgtcaaggggaggagccacctgaaccatgaaaaggagatgtttgcccaagaccatcctgaagtcaactccctggaggaggtggtgaggctggtgaagcccacagccatcataggtgttgctgccatcgcaggagccttcacggagcagattctgagggacatggcctccttccacgagcgccctatcatctttgccctgagcaaccccaccagcaaggccgagtgcacggctgagaagtgctaccgggtcaccgagggccgagggatttttgccagtggaagtccttttaagagtgtgactctggaagatggcaagaccttcattcctgggcagggaaacaatgcttacgtgttccccggggtggcactgggagtcatcgccggcgggatccggcacatcccagatgagatcttcctcctgacagcagagcaaattgcccaggaagtctctgagcagcatctgtcccaggggagactctacccaccactcagcaccatccgagacgtgtctttgagaattgccatcaaagttctcgactacgcgtacaaacacaacactggacagctacacttggcccaaggaagccatgaatgttcagacggtctgaggcagtctcagaggctagtatggggctagatgaagcccagagtaacacccacaatataaatgggttccaaaatggcccaagtgaatccttgtcgctgtgttttttcttttaaactttctggtgtgagaggagatgccaaggcatacagtgaataaaagccttgtctctgaagaccc

SEQ ID NO: 8896 - DNA, 1346 bp, Homo sapiens
ggctgtcacccgcaccggatctgcttccagggcttggtttcgctttgcctggctcttggctaggcctggcgccccgcgcggagccgagcaggtggcagccgaggagtggcgggggctggaacatttaaccctttgggagcacctgccctctcccagagggcgcgtccccggatcaggcccggtgccccgcagcgcgcgtgggtcctggctggctggaaggaggccctgaccttgctttctctcccgtgccaggtctgccaaggaccatgggtgccgcgctggggacaggcacgcggctggctccctggccgggccgggcctgcggcgccctcccgcgctggacacccaccgcgcccgcccaaggctgccactccaagcctggcccggcgcgccctgtgcccctgaagaagcgcggatacgatgtcaccaggaaccctcatctcaacaaggggatggcctttacccttgaagaaaggctgcagcttggaatccacggcctaatcccgccctgctttctgagccaggacgtccagctcctccgaatcatgagatattacgagcggcagcagagtgacctggacaagtacatcattctcatgacactccaagaccggaacgagaagctcttctaccgagtgctgacttcggacgtggagaagttcatgccaatcgtgtacacgcctaccgtggggctggcctgtcagcactatggcctgactttccgcaggccccgtggactgttcatcaccattcatgacaaaggtcatcttgcaacaatgctgaattcttggccagaagacaatattaaggccgtggtggtgactgatggggagcgcatcctgggcctgggagacctgggctgctacggcatgggcatccctgtgggcaagctggccctgtacacggcatgcggaggggtgaacccgcagcagtgcctccctgtgctgctggacgtcggcaccaacaatgaggagctgctcagagaccctctgtacatcggcctgaaacaccagcgcgtgcacgggaaggcatacgatgacttgctggatgagttcatgcaggctgtgacagacaagtttggaataaattgcctcatccaatttgaagacttcgccaatgccaatgccttccgcctgctcaacaaataccgtaacaagtactgcatgttcaatgatgacatccaaggtaggtttccaccccacctgatgaagctacaggggactaacttatattctcaacctcactgggatgccaaaggggtgaggaaaggctgtcaccccatagttggtttgctgccagcagctgttgaaaaaagaatattaaacttagattcaactcctaattgg

SEQ ID NO: 8897 - DNA, 1201 bp, Homo sapiens
aggttgtgggaccgctctttgaggaactcaccagctccgcgagctcgcggccgccagcgcggtccacccattggcgggagaggactcacagaccgcagctcctcaccccgcctgctccgcagcgggaccgcgtagacctcagctccccgagcagcgcaggtctgccaaggaccatgggtgccgcgctggggacaggcacgcggctggctccctggccgggccgggcctgcggcgccctcccgcgctggacacccaccgcgcccgcccaaggctgccactccaagcctggcccggcgcgccctgtgcccctgaagaagcgcggatacgatgtcaccaggaaccctcatctcaacaaggggatggcctttacccttgaagaaaggctgcagcttggaatccacggcctaatcccgccctgctttctgagccaggacgtccagctcctccgaatcatgagatattacgagcggcagcagagtgacctggacaagtacatcattctcatgacactccaagaccggaacgagaagctcttctaccgagtgctgacttcggacgtggagaagttcatgccaatcgtgtacacgcctaccgtggggctggcctgtcagcactatggcctgactttccgcaggccccggtgagcccccgtggagtgagggctctgggaggggctgcctcatagaggggaataaattctttccgcccttcatgcatattgggactctggaggctaactctgattgggtcagtggtccaacaaaaagacatttgatttcaagcacttgctcagaaaaatgaccccgtaagcagagaaatgagtgaaaagagtagctagcaagggtttattgactcttcttcacctccaaataataaatgcccagcatgctcagagttggcctgagagagagttcaggttgtatttctctcattatctacctgtcacttctctcaccccctctggtcacctccaaagtaccaacagctctcctgccaattcaggccaatgaataatggagtgttggataccaaagactgaattcttttgatgtttgaaaaaccagcatatcttcctttgggcttgactcagattccactttaaatgtcattttattagacaaaactttggcactccattttctctcagagccaaagaattttgaggagttttctaaagcaatcaggttttttttcaaaatga

SEQ ID NO: 8898 - DNA, 778 bp, Homo sapiens
ctatgaggctcatgcttctttttgtcttccattatatttatccttgtcattttctttatgaatgatgatggtagcagcacctggctatctgatcccatcttatggggtcaagtaacaaatcaggagctgtttctcaacttcaacaacaaaaaagttatctgcaaaagagagcatggatttgcaccaaaacttgcatgcctacagggcataagggctaagaaaagttgcctgttcctccacagtcccagatgtggggaactctgccaagggtcttctcttgggagctggcggcctgtggccagaggttgatctcaggccactctgtttcaggcacagcctccgttgctgtggcagggatcttggctgctctgcgaatcaccaagaacaagctttccaatcacgtgtttgttttccaaggtgcaggcgaggtatgtggcattgagggtttctttggttgctccaggaagagaataagaatgggtggaagcataccaaaaaagggaggcattctggggttctgaaaagaggaagcagcacagacatattgtgatcattgcagctgcctaggctctgacaattgggtgtctcaaggcaaggacttaattgggcctcctgggagtcattgaggtgggggaaagaaaagggggtccttatggcaagacatcagataaatgttcagcagctgtttgccctgtgtctgaacatctaccctatggtaccttccaggcagctatgggcattgcccacctccttgtcatggccctagagaaagaaggtg

SEQ ID NO: 8899 - DNA, 386 bp, Homo sapiens
tctcctcccaccttctggttcttcctaataatcctggatacttgttggaaaaaaaaaaaacaggaacaccgggagtaggctcagtcaatgggtgctgtctgttccaggagctgctcagagaccctctgtacatcggcctgaaacaccagcgcgtgcacgggaaggcatacgatgacttgctggatgagttcatgcaggctgtgacagacaagtaagtggaccagtctgtcccttttgaaagaggacttttaagagatgccgtgactaaagtcaacactggttttggctgatatacaaagtaaaggcagtagatgcatgcttttccaggtattctgaaaattccaacttgacccctaggagtgataagactggacaccaaatgggct

SEQ ID NO: 8900 - DNA, 4157 bp, Homo sapiens
agggagcgggggagcgccggggaggcgggcggaggcgggcggaggcggggggcggggagcccgaggggtggaagccggcggcggccgagcggggtcagttctctgtagtgtttgccaatgttggagccgtctgcaaagtgtccccggcaagaagaggctgcctaccacaaggactttagcttactttttaaagattgaagaaaaaaaagaagacagaaaaagaagaactcaaagatacacaaagtaatttgaaccaaggctcagaagtttttggagccgtgagggatacagcagtttggtcaatattgtcttaacatgcttcaaataaatcagatgttctcagtgcagctgagtcttggtgagcagacatgggaatccgaaggcagcagtataaagaaggctcagcaggctgttgccaataaagctttgactgaatctacgcttcccaaaccagttcagaagccacccaaaagtaatgttaacaataacccaggcagtataactccaactgtggaactgaatgggcttgctatgaaaaggggagagcctgccatctacaggccattagatccaaagccattcccaaattatagagctaattacaactttcggggcatgtacaatcagaggtatcattgcccagtgcctaagatcttttatgttcagctcactgtaggaaataatgaattttttggggaaggaaagactcgacaagctgctagacacaatgctgcaatgaaagccctccaagcactgcagaatgaacctattccagaaagatctcctcagaatggtgaatcaggaaaggatatggatgatgacaaagatgcaaataagtctgagatcagcttagtgtttgaaattgctctgaagcgaaatatgcctgtcagttttgaggttattaaagaaagtggaccaccacatatgaaaagctttgttactcgagtgtcagtaggagagttctctgcagaaggagaaggaaatagcaaaaaactctccaagaagcgcgctgcgaccaccgtcttacaggagcttaaaaaacttccacctcttcctgtggtggaaaagccaaaactattttttaaaaaacgccctaaaacaatagtaaaggccggaccagaatatggccaagggatgaaccctattagccgcctggcgcaaattcaacaggccaaaaaggaaaaggagccggattatgttttgctttcagaaagaggaatgcctcgacgtcgagaatttgtgatgcaggtgaaggtaggcaatgaagttgctacaggaacaggacctaataaaaagatagccaaaaaaaatgctgcagaagcaatgctgttacaacttggttataaagcatccactaatcttcaggatcaacttgagaagacaggggaaaacaaaggatggagtggtccaaagcctgggtttcctgaaccaacaaataatactccaaaaggaattcttcatttgtctcctgatgtttatcaagagatggaagccagccgccacaaagtaatctctggcactactctaggctatttgtcacccaaagatatgaaccaaccttcaagctctttcttcagtatatctcccacatcgaatagttcagctacaattgccagggaactccttatgaatggaacatcttctacagctgaagccataggtttaaaaggaagttctcctactcccccttgttctccagtacaaccttcaaaacaactggaatatttagcaaggattcaaggctttcaggtatgaattaaaagcaaaaacaaaaaacaaaacaattcattagcctcagattcttcatctgtatacatcacaaggctcattcttgcctgctagtatggcctacatgccacttacgttttaagttatttaggaacacaaaggacagacaaaaaagccatatgcacatgcctcattttctcttatttttgatctatctagtaattcttttgctgcctgtctcttctccattttccttcttcttttttaagcatttttcatattcttcactgtcttctatttggtcttgattaggtgcatctatctcttcgctctgtcttccacaaacaaaaattctgccttcagacatttggtgttagtatttcacactcagttctccctttttttacataaggattgagtttctttttatgatgattttacctttatagcaattttgaattttgcattctgttgctagtattgattcaggtacaccattaagatacaacattctagaagtctattaccttaggagttaattaaacatgatatttgaagaataatgaaatgctttatagttgtttgaggcataacaatgtgtatttgttttactggatcatgttttgaactgactagggagggtagcacctgcctcagatagtaccaacaattctgtttcactgggtagtctaaaactagcttatagtttaacttaacttgttgtgtatgtgaatttagggatggaaactttttttcccctatttattctttgtttccttctgggaaaaaaccccacaaaaatcagcactcctttatggatacattggagcttttgaaagaattgtaaactctaggaaggggaaatatctgtgtcttgatttcttagttgccttgaaaatcatgtactgaactgtaaccgctaacttgactggatgaactagtttgcttgtgtgtagagagtgtattgcttcctcagatttcactgttttcatctccttttccatcttagtctttattccttaagaccaaaaactgtaatatcctttagaaatgctctagaagatctgtattgtgtagaatgatcatgtatttataaatattttacaagtttagattataaaatgaaaaagaaggtcatgtgttttggggggtattttgcatgttcggatttttttttcccttcaccgaacccttctgattctttcaaactattgccaggtagttgttagtgtttctaattggactcttaatatgaacttcaagaagctgttaccagttatcggctctgtcatctgaaattttaaccacttaatttaaagttacaattttagaatttgtttttgttgttttaccttaagaaacacaataaatcactgtttaaaaaagatctcaatttatataaagtactggaaaaaagctaagtaatttttagttctatctataatctccgtaggatgaattagaaataaattgtgatgaaaagaaattaactgcttatttatgaatctaatcatttagaaatgtctgagagtaacactgcattcttatagaaacaaagcacaaattgcattcaagctctgaattgattttttgcttggagctgttgttacagtagctgtaattttgctaccagaatgtcttaattttttaaatttgtttttatttctaagctcttggcaatgacaataattataattttaacatatcttcactgtagtcaacatgtagagtctgcttccctcattattgcattgctaaggcctttttaaaaagcttatgcttacataatatactcttttttatggacacgttatatgtttccaaatctgtgtattgtgatttttacatactaatgaatataaacaggtgattttaaaatattactgtgcttctttggttgaatgagctggtattgatgtaaaatactctgtcattgatggaccactacctgcagctaagcagtgagcagaatctccgggaaatgacttagtctggccacatgcatagcccatcttcataatgtcgcagcagaaggttctttgtggttaaaagttttaaagcctatttctttataggtaaccctctcaggtatatttacctggtagaaaaacatgtagattgtttctattacttaaatgttttaattggactgtagtttagaaattacaggaccagcttgttacagattatacactattctgttacttttatttctgaaacttaaaaacaataaattctttttctgtgtttctaggttagaacttttttattttattgcacactgaacagatactgttgcttattgaatattgtgtaaacccttctttggctttccttgcccattgcaatttgatttaagcctactagagccattgtatgtgacagctatattgtattacaaagtaaaaatatatgagtgtattgaaaac

SEQ ID NO: 8901 - DNA, 2934 bp, Homo sapiens
agggagcgggggagcgccggggaggcgggcggaggcgggcggaggcggggggcggggagcccgaggggtggaagccggcggcggccgagcggggtcagttctctgtagtgtttgccaatgttggagccgtctgcaaagtgtccccggcaagaagaggctgcctaccacaaggactttagcttactttttaaagattgaagaaaaaaaagaagacagaaaaagaagaactcaaagatacacaaagtaatttgaaccaaggctcagaagtttttggagccgtgagggatacagcagtttggtcaatattgtcttaacatgcttcaaataaatcagatgttctcagtgcagctgagtcttggtgagcagacatgggaatccgaaggcagcagtataaagaaggctcagcaggctgttgccaataaagctttgactgaatctacgcttcccaaaccagttcagaagccacccaaaagtaatgttaacaataacccaggcagtataactccaactgtggaactgaatgggcttgctatgaaaaggggagagcctgccatctacaggccattagatccaaagccattcccaaattatagagctaattacaactttcggggcatgtacaatcagaggtatcattgcccagtgcctaagatcttttatgttcagctcactgtaggaaataatgaattttttggggaaggaaagactcgacaagctgctagacacaatgctgcaatgaaagccctccaagcactgcagaatgaacctattccagaaagatctcctcagaatggtgaatcaggaaaggatatggatgatgacaaagatgcaaataagtctgagatcagcttagtgtttgaaattgctctgaagcgaaatatgcctgtcagttttgaggttattaaagaaagtggaccaccacatatgaaaagctttgttactcgagtgtcagtaggagagttctctgcagaaggagaaggaaatagcaaaaaactctccaagaagcgcgctgcgaccaccgtcttacaggagcttaaaaaacttccacctcttcctgtggtggaaaagccaaaactattttttaaaaaacgccctaaaacaatagtaaaggccggaccagaatatggccaagggatgaaccctattagccgcctggcgcaaattcaacaggccaaaaaggaaaaggagccggattatgttttgctttcagaaagaggaatgcctcgacgtcgagaatttgtgatgcaggtgaaggtaggcaatgaagttgctacaggaacaggacctaataaaaagatagccaaaaaaaatgctgcagaagcaatgctgttacaacttggttataaagcatccactaatcttcaggatcaacttgagaagacaggggaaaacaaaggatggagtggtccaaagcctgggtttcctgaaccaacaaataatactccaaaaggaattcttcatttgtctcctgatgtttatcaagagatggaagccagccgccacaaagtaatctctggcactactctaggctatttgtcacccaaagatatgaaccaaccttcaagctctttcttcagtatatctcccacatcgaatagttcagctacaattgccagggaactccttatgaatggaacatcttctacagctgaagccataggtttaaaaggaagttctcctactcccccttgttctccagtacaaccttcaaaacaactggaatatttagcaaggattcaaggctttcaggcagccttaagtgccttgaaacaattttctgaacaaggactggatccaatcgatggagcaatgaatatcgaaaaaggttctcttgaaaaacaagccaagcatctgagagagaaagcggacaataaccaggcacccccgggctccatcgctcaggactgcaagaaatcaaactcggccgtctagcagctcccagaacccgcggctgccaccgcatccttataaacctgtcagcacgcatgagggtgtctgtgttcagggaaatgaatgactaataccattatttgagtcttatgtgaagacaacactattctaacacgagagataatatacatggtactgtttattcaactggggaaaaataaaactttgagcatttcccttggaactcgagatcagatcataactcatttgcctagaggcagcagaaatctgatcctgctactggagcttaaaataacaagtaaagaaaagtgttagaaacaaagctaaaattttaacatgattaataatagagaagttgggtttggttctgttgttatgattgttttgtcgtggtgcttgtgttcagttatattctctctctctctcatttcaaatactgcttgacaattcgaaaatgaaccaatgatgtgctgtggaatgtgatggttgtcttcatatagagtcacatggtttctctttttatgcagatatttataatcttcatcctatatcagtaggaataactataaggtgcactacaaaaagatgtatgcaaacaaacatgttttaaatcaggtcagatatctgatgaaaaatacgaactaatgttaagagcaagtagtttcaacatactccaggaactgagaaacaaaacaaagcaattgtgggttttgagctccatatactcttagcaagtaagggggcgtcttgcccctatatatcatcttcccggattccactccctgttgtgggaatcgcgcccacccccatccgtgtgttgtagccactcacggtttgcatcaagagtgttttttgtaactgcctctggacttgggacagtgagtaggatcaaaaataaataatgtacatgacggggaagggaaaaacctgttggagttgcttccagccagccacgctccgggccagcatgttggaatccagcgtggagcagatgcagtaaaaatgtggttggtttctgtgtga

SEQ ID NO: 8902 - DNA, 3065 bp, Homo sapiens
agggagcgggggagcgccggggaggcgggcggaggcgggcggaggcggggggcggggagcccgaggggtggaagccggcggcggccgagcggggtcagttctctgtagtgtttgccaatgttggagccgtctgcaaagtgtccccggcaagaagaggctgcctaccacaaggactttagcttactttttaaagattgaagaaaaaaaagaagacagaaaaagaagaactcaaagatacacaaagtaatttgaaccaaggctcagaagtttttggagccgtgagggatacagcagtttggtcaatattgtcttaacatgcttcaaataaatcagcttctctccaagataaaatggcaaacccaaaagagaaaactgcaatgtgtctggtaaatgagttagcccgtttcaatagagtccaaccccagtataaacttctgaatgaaagagggcctgctcattcaaagatgttctcagtgcagctgagtcttggtgagcagacatgggaatccgaaggcagcagtataaagaaggctcagcaggctgttgccaataaagctttgactgaatctacgcttcccaaaccagttcagaagccacccaaaagtaatgttaacaataacccaggcagtataactccaactgtggaactgaatgggcttgctatgaaaaggggagagcctgccatctacaggccattagatccaaagccattcccaaattatagagctaattacaactttcggggcatgtacaatcagaggtatcattgcccagtgcctaagatcttttatgttcagctcactgtaggaaataatgaattttttggggaaggaaagactcgacaagctgctagacacaatgctgcaatgaaagccctccaagcactgcagaatgaacctattccagaaagatctcctcagaatggtgaatcaggaaaggatatggatgatgacaaagatgcaaataagtctgagatcagcttagtgtttgaaattgctctgaagcgaaatatgcctgtcagttttgaggttattaaagaaagtggaccaccacatatgaaaagctttgttactcgagtgtcagtaggagagttctctgcagaaggagaaggaaatagcaaaaaactctccaagaagcgcgctgcgaccaccgtcttacaggagcttaaaaaacttccacctcttcctgtggtggaaaagccaaaactattttttaaaaaacgccctaaaacaatagtaaaggccggaccagaatatggccaagggatgaaccctattagccgcctggcgcaaattcaacaggccaaaaaggaaaaggagccggattatgttttgctttcagaaagaggaatgcctcgacgtcgagaatttgtgatgcaggtgaaggtaggcaatgaagttgctacaggaacaggacctaataaaaagatagccaaaaaaaatgctgcagaagcaatgctgttacaacttggttataaagcatccactaatcttcaggatcaacttgagaagacaggggaaaacaaaggatggagtggtccaaagcctgggtttcctgaaccaacaaataatactccaaaaggaattcttcatttgtctcctgatgtttatcaagagatggaagccagccgccacaaagtaatctctggcactactctaggctatttgtcacccaaagatatgaaccaaccttcaagctctttcttcagtatatctcccacatcgaatagttcagctacaattgccagggaactccttatgaatggaacatcttctacagctgaagccataggtttaaaaggaagttctcctactcccccttgttctccagtacaaccttcaaaacaactggaatatttagcaaggattcaaggctttcaggcagccttaagtgccttgaaacaattttctgaacaaggactggatccaatcgatggagcaatgaatatcgaaaaaggttctcttgaaaaacaagccaagcatctgagagagaaagcggacaataaccaggcacccccgggctccatcgctcaggactgcaagaaatcaaactcggccgtctagcagctcccagaacccgcggctgccaccgcatccttataaacctgtcagcacgcatgagggtgtctgtgttcagggaaatgaatgactaataccattatttgagtcttatgtgaagacaacactattctaacacgagagataatatacatggtactgtttattcaactggggaaaaataaaactttgagcatttcccttggaactcgagatcagatcataactcatttgcctagaggcagcagaaatctgatcctgctactggagcttaaaataacaagtaaagaaaagtgttagaaacaaagctaaaattttaacatgattaataatagagaagttgggtttggttctgttgttatgattgttttgtcgtggtgcttgtgttcagttatattctctctctctctcatttcaaatactgcttgacaattcgaaaatgaaccaatgatgtgctgtggaatgtgatggttgtcttcatatagagtcacatggtttctctttttatgcagatatttataatcttcatcctatatcagtaggaataactataaggtgcactacaaaaagatgtatgcaaacaaacatgttttaaatcaggtcagatatctgatgaaaaatacgaactaatgttaagagcaagtagtttcaacatactccaggaactgagaaacaaaacaaagcaattgtgggttttgagctccatatactcttagcaagtaagggggcgtcttgcccctatatatcatcttcccggattccactccctgttgtgggaatcgcgcccacccccatccgtgtgttgtagccactcacggtttgcatcaagagtgttttttgtaactgcctctggacttgggacagtgagtaggatcaaaaataaataatgtacatgacggggaagggaaaaacctgttggagttgcttccagccagccacgctccgggccagcatgttggaatccagcgtggagcagatgcagtaaaaatgtggttggtttctgtgtga

SEQ ID NO: 8903 - DNA, 2258 bp, Homo sapiens
  misc_feature (1482)..(1482): n is a, c, g, or t
  misc_feature (1491)..(1491): n is a, c, g, or t
agggagcgggggagcgccggggaggcgggcggaggcgggcggaggcggggggcggggagcccgaggggtggaagccggcggcggccgagcggggtcagttctctgtagtgtttgccaatgttggagccgtctgcaaagtgtccccggcaagaagaggctgcctaccacaaggactttagcttactttttaaagattgaagaaaaaaaagaagacagaaaaagaagaactcaaagatacacaaagtaatttgaaccaaggctcagaagtttttggagccgtgagggatacagcagtttggtcaatattgtcttaacatgcttcaaataaatcagatgttctcagtgcagctgagtcttggtgagcagacatgggaatccgaaggcagcagtataaagaaggctcagcaggctgttgccaataaagctttgactgaatctacgcttcccaaaccagttcagaagccacccaaaagtaatgttaacaataacccaggcagtataactccaactgtggaactgaatgggcttgctatgaaaaggggagagcctgccatctacaggccattagatccaaagccattcccaaattatagagctaattacaactttcggggcatgtacaatcagagatgaagagttacctaagtcagtgttataagatgttccatggtaaaagggatttgaagacaaattttggaaatgctgcatactgtatctctcttgaagactcctaaaggtgtcatgaagaaaactgtttacctaagtggttcctaacactgactgaacatcaggctttcctgggcagctttaaaaattctgatgcccagactttatgtggactaattaaatcagaatttctggttgcagaagcttgaaccgcactgttttttaaaacttccccaagtaattctatgtccagtcatttaaatactggtccccacaacccaaaacacattaccctctattaacatcaaagattatgagatggtttgaatagtcatagaacttttgaaagaagtaaagaagaagggaagaattacagttaaccacactccttaaggataattgttctggacagctagcttccccacattgctgagggttcacttttttttggaacctaaaactttacttagttcagtaattttggatagaaatatttctaaaagttatggcatatattttttatatccttaaatagaaaatgccacaattcttagcatgaagaatccttgctgttgactcattatcaaccttataaacaataagtattacaagcctcatgagatatgtacatggtttgtccttataccagataatcctagacatctgtttctagagtacccaagtgtgcttttagttactttccaaatcattgttgtcagtcagattgtcatcttatttcttgtttttgtcagtgcacctttgcatattgcttgctcctttctttgatgcttttcaattgctattatcttgaaaacngatattatngtttgaatttggggcaaagtaagagtagcagggctttaattacgccctaagatgtccccttaactgtggaaaacatcgagttttatctagttggtgaatttttttacttcagaatttatttttttctgtcataaattttgctaaggatctgcattttgagtagaatgaagtggccagatagttgaataatggtttggtgaatatctatatgtatatatgtatgtgtatgtgtgttacacatacatatttaatgacatgaagtactttggttgcttggaattggacagaaataacagtttttttttttttttgggacagagtcttgctctgtcacctaggctggagtgcaatggcgcgatctctgctcactgcaacttccacctcccaggttcaagtgattctcctgccgcagcctcccgagtagctgggattgcaggcgcctgccagcatgcccgccagcacgcctggctaatttttttttttgtatttttagtagagatggggtttcactatgttggccaggctggtcttggaactcctgatctcgtgatctgtgtgccttggcctcccaaagtgctgggattacaggcgtgagccaccgcgcctggccagaaataacagttttaataaatttcatgaaatcactttcttgtatgttaaaggaaacagaaagggttcatttgtgcatggtttagtctttcttttgaatgtggaagtttttcttcttatttgtgtgtctaaaaaaattaaaaagtgaaacattttcc

SEQ ID NO: 8904 - DNA, 1018 bp, Homo sapiens
agggagcgggggagcgccggggaggcgggcggaggcgggcggaggcggggggcggggagcccgaggggtggaagccggcggcggccgagcggggtcagttctctgtagtgtttgccaatgttggagccgtctgcaaagtgtccccggcaagaagtttttggagccgtgagggatacagcagtttggtcaatattgtcttaacatgcttcaaataaatcagattgaagaactcccttcaggatttcttgtagaacaagtctggtgttgatgaaatccttcggcttttgtttgtctgggaaagactttatctctccttcataattaaaggatattttcaccagatatactattctagatgttctcagtgcagctgagtcttggtgagcagacatgggaatccgaaggcagcagtataaagaaggctcagcaggctgttgccaataaagctttgactgaatctacgcttcccaaaccagttcagaagccacccaaaagtaatgttaacaataacccaggcagtataactccaactgtggaactgaatgggcttgctatgaaaaggggagagcctgccatctacaggccattagatccaaagccattcccaaattatagagctaattacaactttcggggcatgtacaatcagagatggcaacacttgaatggattacagggactctggagccaaagatccaaggagatgctcttttccttgtcagaacccagattaatcattagcttcttaaggcagggaatgaaaggtgaagtccaagaaacagatgaagagttacctaagtcagtgttataagatgttccatggtaaaagggatttgaagacaaattttggaaatgctgcatactgtatctctcttgaagactcctaaaggtgtcatgaagaaaactgtttacctaagtggttcctaacactgactgaacatcaggctttcctgggcagctttaaaaattctgatgcccagactttatgtggactaattaaatcagaatttctggttgc

SEQ ID NO: 8905 - DNA, 1231 bp, Homo sapiens
agggagcgggggagcgccggggaggcgggcggaggcgggcggaggcggggggcggggagcccgaggggtggaagccggcggcggccgagcggggtcagttctctgtagtgtttgccaatgttggagccgtctgcaaagtgtccccggcaagaagaggctgcctaccacaaggactttagcttactttttaaagattgaagaaaaaaaagaagacagaaaaagaagaactcaaagatacacaaagtaatttgaaccaaggctcagaagtttttggagccgtgagggatacagcagtttggtcaatattgtcttaacatgcttcaaataaatcagatgttctcagtgcagctgagtcttggtgagcagacatgggaatccgaaggcagcagtataaagaaggctcagcaggctgttgccaataaagctttgactgaatctacgcttcccaaaccagttcagaagccacccaaaagtaatgttaacaataacccaggcagtataactccaactgtggaactgaatgggcttgctatgaaaaggggagagcctgccatctacaggccattagatccaaagccattcccaaattatagagctaattacaactttcggggcatgtacaatcagaggtttgtatgtcttttttggttttgttcttaattattattttatccatgttataaaagtttctcacactcaaaagagtattttcattgtaaatctaattgaccttgggcattgtgcatggaatttagataaagcaggttcacaaggaatatttaaattaataacttaaagaaacccagttttcaggaactagttttttttttttttcccctaccccacaaacgtaaaagatctgaaggaactagtttttattgtgtcatgagggccctgtatttgttgcagggaagaccaagtcttaaagtcatttcacagtttatagtgttgactttctcattcatttaccaagcagagctcagtttttttcttgatttgtctaaatacattagtgaacatgaatgtttgtaatttatagggaaaaaagaaaaaatgtaaataatgtaatcccagaatttgccaccttttatattttcatgtactttacattctttttttctttgcatttaaatatatttaaccaagttgaagttgtcctttatatgcagtttttgtagtactttatgaaggtatgatagacatacagtaaaatgtacaaatcttaagtata

SEQ ID NO: 8906 - DNA, 847 bp, Homo sapiens
agggagcgggggagcgccggggaggcgggcggaggcgggcggaggcggggggcggggagcccgaggggtggaagccggcggcggccgagcggggtcagttctctgtagtgtttgccaatgttggagccgtctgcaaagtgtccccggcaagaagaggctgcctaccacaaggactttagcttactttttaaagattgaagaaaaaaaagaagacagaaaaagaagaactcaaagatacacaaagtaatttgaaccaaggctcagaagtttttggagccgtgagggatacagcagtttggtcaatattgtcttaacatgcttcaaataaatcagcttctctccaagataaaatggcaaacccaaaagagaaaactgcaatgtgtctggtaaatgagttagcccgtttcaatagagtccaaccccagtataaacttctgaatgaaagagggcctgctcattcaaaggcagtataactccaactgtggaactgaatgggcttgctatgaaaaggggagagcctgccatctacaggccattagatccaaagccattcccaaattatagagctaattacaactttcggggcatgtacaatcagagcctcacgtgatcaccactcagatcgagatacagaatgttcccaatcacctctgagagtttcctcagacctctttgtctttgacacatccttctcccagaaataatcactattttattatcatagactagtttttgcctgttgttgaactttttatatctagactcatacagtatttatgtgcatctggcttcttttactttgtataatgattttcttgtttggggattcatccatgttgcttatatc

SEQ ID NO: 8907 - DNA, 4617 bp, Homo sapiens
ccatgggaatattgaattatagagttggacaggatagtcttatttattgttgcatagcacattgcaccagaatttaaggacttaagacaacaaacattatcttacagtttctgtgggttagaaatctgggtgcagcttagctgggtgcctgtggctcataaaagaggtggtagtcaagctgtcagttggggttgcagtcacatctggaagctctactggtggaagatctgtttctgaactcattcatgtggctcttgcagggttcagtttcctggggctcttggactgaagaaatcaattgttgctggctgttggccagaggcttttctcagttctttgccatatgggcctctccaaagggcaccacagtttggcatctgcctccctctgagcaaatgagtgagagaaggtgacacctaagaatttttataacctaatcttggaagtggtatctcattatttctgctatattctatttgttagaggctgcctaccacaaggactttagcttactttttaaagattgaagaaaaaaaagaagacagaaaaagaagaactcaaagatacacaaagtaatttgaaccaaggctcagaagtttttggagccgtgagggatacagcagtttggtcaatattgtcttaacatgcttcaaataaatcagcttctctccaagataaaatggcaaacccaaaagagaaaactgcaatgtgtctggtaaatgagttagcccgtttcaatagagtccaaccccagtataaacttctgaatgaaagagggcctgctcattcaaagatgttctcagtgcagctgagtcttggtgagcagacatgggaatccgaaggcagcagtataaagaaggctcagcaggctgttgccaataaagctttgactgaatctacgcttcccaaaccagttcagaagccacccaaaagtaatgttaacaataacccaggcagtataactccaactgtggaactgaatgggcttgctatgaaaaggggagagcctgccatctacaggccattagatccaaagccattcccaaattatagagctaattacaactttcggggcatgtacaatcagaggtatcattgcccagtgcctaagatcttttatgttcagctcactgtaggaaataatgaattttttggggaaggaaagactcgacaagctgctagacacaatgctgcaatgaaagccctccaagcactgcagaatgaacctattccagaaagatctcctcagaatggtgaatcaggaaaggatatggatgatgacaaagatgcaaataagtctgagatcagcttagtgtttgaaattgctctgaagcgaaatatgcctgtcagttttgaggttattaaagaaagtggaccaccacatatgaaaagctttgttactcgagtgtcagtaggagagttctctgcagaaggagaaggaaatagcaaaaaactctccaagaagcgcgctgcgaccaccgtcttacaggagcttaaaaaacttccacctcttcctgtggtggaaaagccaaaactattttttaaaaaacgccctaaaacaatagtaaaggccggaccagaatatggccaagggatgaaccctattagccgcctggcgcaaattcaacaggccaaaaaggaaaaggagccggattatgttttgctttcagaaagaggaatgcctcgacgtcgagaatttgtgatgcaggtgaaggtaggcaatgaagttgctacaggaacaggacctaataaaaagatagccaaaaaaaatgctgcagaagcaatgctgttacaacttggttataaagcatccactaatcttcaggatcaacttgagaagacaggggaaaacaaaggatggagtggtccaaagcctgggtttcctgaaccaacaaataatactccaaaaggaattcttcatttgtctcctgatgtttatcaagagatggaagccagccgccacaaagtaatctctggcactactctaggctatttgtcacccaaagatatgaaccaaccttcaagctctttcttcagtatatctcccacatcgaatagttcagctacaattgccagggaactccttatgaatggaacatcttctacagctgaagccataggtttaaaaggaagttctcctactcccccttgttctccagtacaaccttcaaaacaactggaatatttagcaaggattcaaggctttcaggtatgaattaaaagcaaaaacaaaaaacaaaacaattcattagcctcagattcttcatctgtatacatcacaaggctcattcttgcctgctagtatggcctacatgccacttacgttttaagttatttaggaacacaaaggacagacaaaaaagccatatgcacatgcctcattttctcttatttttgatctatctagtaattcttttgctgcctgtctcttctccattttccttcttcttttttaagcatttttcatattcttcactgtcttctatttggtcttgattaggtgcatctatctcttcgctctgtcttccacaaacaaaaattctgccttcagacatttggtgttagtatttcacactcagttctccctttttttacataaggattgagtttctttttatgatgattttacctttatagcaattttgaattttgcattctgttgctagtattgattcaggtacaccattaagatacaacattctagaagtctattaccttaggagttaattaaacatgatatttgaagaataatgaaatgctttatagttgtttgaggcataacaatgtgtatttgttttactggatcatgttttgaactgactagggagggtagcacctgcctcagatagtaccaacaattctgtttcactgggtagtctaaaactagcttatagtttaacttaacttgttgtgtatgtgaatttagggatggaaactttttttcccctatttattctttgtttccttctgggaaaaaaccccacaaaaatcagcactcctttatggatacattggagcttttgaaagaattgtaaactctaggaaggggaaatatctgtgtcttgatttcttagttgccttgaaaatcatgtactgaactgtaaccgctaacttgactggatgaactagtttgcttgtgtgtagagagtgtattgcttcctcagatttcactgttttcatctccttttccatcttagtctttattccttaagaccaaaaactgtaatatcctttagaaatgctctagaagatctgtattgtgtagaatgatcatgtatttataaatattttacaagtttagattataaaatgaaaaagaaggtcatgtgttttggggggtattttgcatgttcggatttttttttcccttcaccgaacccttctgattctttcaaactattgccaggtagttgttagtgtttctaattggactcttaatatgaacttcaagaagctgttaccagttatcggctctgtcatctgaaattttaaccacttaatttaaagttacaattttagaatttgtttttgttgttttaccttaagaaacacaataaatcactgtttaaaaaagatctcaatttatataaagtactggaaaaaagctaagtaatttttagttctatctataatctccgtaggatgaattagaaataaattgtgatgaaaagaaattaactgcttatttatgaatctaatcatttagaaatgtctgagagtaacactgcattcttatagaaacaaagcacaaattgcattcaagctctgaattgattttttgcttggagctgttgttacagtagctgtaattttgctaccagaatgtcttaattttttaaatttgtttttatttctaagctcttggcaatgacaataattataattttaacatatcttcactgtagtcaacatgtagagtctgcttccctcattattgcattgctaaggcctttttaaaaagcttatgcttacataatatactcttttttatggacacgttatatgtttccaaatctgtgtattgtgatttttacatactaatgaatataaacaggtgattttaaaatattactgtgcttctttggttgaatgagctggtattgatgtaaaatactctgtcattgatggaccactacctgcagctaagcagtgagcagaatctccgggaaatgacttagtctggccacatgcatagcccatcttcataatgtcgcagcagaaggttctttgtggttaaaagttttaaagcctatttctttataggtaaccctctcaggtatatttacctggtagaaaaacatgtagattgtttctattacttaaatgttttaattggactgtagtttagaaattacaggaccagcttgttacagattatacactattctgttacttttatttctgaaacttaaaaacaataaattctttttctgtgtttctaggttagaacttttttattttattgcacactgaacagatactgttgcttattgaatattgtgtaaacccttctttggctttccttgcccattgcaatttgatttaagcctactagagccattgtatgtgacagctatattgtattacaaagtaaaaatatatgagtgtattgaaaac

SEQ ID NO: 8908 - DNA, 3978 bp, Homo sapiens
agggagcgggggagcgccggggaggcgggcggaggcgggcggaggcggggggcggggagcccgaggggtggaagccggcggcggccgagcggggtcagttctctgtagtgtttgccaatgttggagccgtctgcaaagtgtccccggcaagaagatgttctcagtgcagctgagtcttggtgagcagacatgggaatccgaaggcagcagtataaagaaggctcagcaggctgttgccaataaagctttgactgaatctacgcttcccaaaccagttcagaagccacccaaaagtaatgttaacaataacccaggcagtataactccaactgtggaactgaatgggcttgctatgaaaaggggagagcctgccatctacaggccattagatccaaagccattcccaaattatagagctaattacaactttcggggcatgtacaatcagaggtatcattgcccagtgcctaagatcttttatgttcagctcactgtaggaaataatgaattttttggggaaggaaagactcgacaagctgctagacacaatgctgcaatgaaagccctccaagcactgcagaatgaacctattccagaaagatctcctcagaatggtgaatcaggaaaggatatggatgatgacaaagatgcaaataagtctgagatcagcttagtgtttgaaattgctctgaagcgaaatatgcctgtcagttttgaggttattaaagaaagtggaccaccacatatgaaaagctttgttactcgagtgtcagtaggagagttctctgcagaaggagaaggaaatagcaaaaaactctccaagaagcgcgctgcgaccaccgtcttacaggagcttaaaaaacttccacctcttcctgtggtggaaaagccaaaactattttttaaaaaacgccctaaaacaatagtaaaggccggaccagaatatggccaagggatgaaccctattagccgcctggcgcaaattcaacaggccaaaaaggaaaaggagccggattatgttttgctttcagaaagaggaatgcctcgacgtcgagaatttgtgatgcaggtgaaggtaggcaatgaagttgctacaggaacaggacctaataaaaagatagccaaaaaaaatgctgcagaagcaatgctgttacaacttggttataaagcatccactaatcttcaggatcaacttgagaagacaggggaaaacaaaggatggagtggtccaaagcctgggtttcctgaaccaacaaataatactccaaaaggaattcttcatttgtctcctgatgtttatcaagagatggaagccagccgccacaaagtaatctctggcactactctaggctatttgtcacccaaagatatgaaccaaccttcaagctctttcttcagtatatctcccacatcgaatagttcagctacaattgccagggaactccttatgaatggaacatcttctacagctgaagccataggtttaaaaggaagttctcctactcccccttgttctccagtacaaccttcaaaacaactggaatatttagcaaggattcaaggctttcaggtatgaattaaaagcaaaaacaaaaaacaaaacaattcattagcctcagattcttcatctgtatacatcacaaggctcattcttgcctgctagtatggcctacatgccacttacgttttaagttatttaggaacacaaaggacagacaaaaaagccatatgcacatgcctcattttctcttatttttgatctatctagtaattcttttgctgcctgtctcttctccattttccttcttcttttttaagcatttttcatattcttcactgtcttctatttggtcttgattaggtgcatctatctcttcgctctgtcttccacaaacaaaaattctgccttcagacatttggtgttagtatttcacactcagttctccctttttttacataaggattgagtttctttttatgatgattttacctttatagcaattttgaattttgcattctgttgctagtattgattcaggtacaccattaagatacaacattctagaagtctattaccttaggagttaattaaacatgatatttgaagaataatgaaatgctttatagttgtttgaggcataacaatgtgtatttgttttactggatcatgttttgaactgactagggagggtagcacctgcctcagatagtaccaacaattctgtttcactgggtagtctaaaactagcttatagtttaacttaacttgttgtgtatgtgaatttagggatggaaactttttttcccctatttattctttgtttccttctgggaaaaaaccccacaaaaatcagcactcctttatggatacattggagcttttgaaagaattgtaaactctaggaaggggaaatatctgtgtcttgatttcttagttgccttgaaaatcatgtactgaactgtaaccgctaacttgactggatgaactagtttgcttgtgtgtagagagtgtattgcttcctcagatttcactgttttcatctccttttccatcttagtctttattccttaagaccaaaaactgtaatatcctttagaaatgctctagaagatctgtattgtgtagaatgatcatgtatttataaatattttacaagtttagattataaaatgaaaaagaaggtcatgtgttttggggggtattttgcatgttcggatttttttttcccttcaccgaacccttctgattctttcaaactattgccaggtagttgttagtgtttctaattggactcttaatatgaacttcaagaagctgttaccagttatcggctctgtcatctgaaattttaaccacttaatttaaagttacaattttagaatttgtttttgttgttttaccttaagaaacacaataaatcactgtttaaaaaagatctcaatttatataaagtactggaaaaaagctaagtaatttttagttctatctataatctccgtaggatgaattagaaataaattgtgatgaaaagaaattaactgcttatttatgaatctaatcatttagaaatgtctgagagtaacactgcattcttatagaaacaaagcacaaattgcattcaagctctgaattgattttttgcttggagctgttgttacagtagctgtaattttgctaccagaatgtcttaattttttaaatttgtttttatttctaagctcttggcaatgacaataattataattttaacatatcttcactgtagtcaacatgtagagtctgcttccctcattattgcattgctaaggcctttttaaaaagcttatgcttacataatatactcttttttatggacacgttatatgtttccaaatctgtgtattgtgatttttacatactaatgaatataaacaggtgattttaaaatattactgtgcttctttggttgaatgagctggtattgatgtaaaatactctgtcattgatggaccactacctgcagctaagcagtgagcagaatctccgggaaatgacttagtctggccacatgcatagcccatcttcataatgtcgcagcagaaggttctttgtggttaaaagttttaaagcctatttctttataggtaaccctctcaggtatatttacctggtagaaaaacatgtagattgtttctattacttaaatgttttaattggactgtagtttagaaattacaggaccagcttgttacagattatacactattctgttacttttatttctgaaacttaaaaacaataaattctttttctgtgtttctaggttagaacttttttattttattgcacactgaacagatactgttgcttattgaatattgtgtaaacccttctttggctttccttgcccattgcaatttgatttaagcctactagagccattgtatgtgacagctatattgtattacaaagtaaaaatatatgagtgtattgaaaac

SEQ ID NO: 8909 - DNA, 4175 bp, Homo sapiens
agggagcgggggagcgccggggaggcgggcggaggcgggcggaggcggggggcggggagcccgaggggtggaagccggcggcggccgagcggggtcagttctctgtagtgtttgccaatgttggagccgtctgcaaagtgtccccggcaagaagtttttggagccgtgagggatacagcagtttggtcaatattgtcttaacatgcttcaaataaatcagcttctctccaagataaaatggcaaacccaaaagagaaaactgcaatgtgtctggtaaatgagttagcccgtttcaatagagtccaaccccagtataaacttctgaatgaaagagggcctgctcattcaaagatgttctcagtgcagctgagtcttggtgagcagacatgggaatccgaaggcagcagtataaagaaggctcagcaggctgttgccaataaagctttgactgaatctacgcttcccaaaccagttcagaagccacccaaaagtaatgttaacaataacccaggcagtataactccaactgtggaactgaatgggcttgctatgaaaaggggagagcctgccatctacaggccattagatccaaagccattcccaaattatagagctaattacaactttcggggcatgtacaatcagaggtatcattgcccagtgcctaagatcttttatgttcagctcactgtaggaaataatgaattttttggggaaggaaagactcgacaagctgctagacacaatgctgcaatgaaagccctccaagcactgcagaatgaacctattccagaaagatctcctcagaatggtgaatcaggaaaggatatggatgatgacaaagatgcaaataagtctgagatcagcttagtgtttgaaattgctctgaagcgaaatatgcctgtcagttttgaggttattaaagaaagtggaccaccacatatgaaaagctttgttactcgagtgtcagtaggagagttctctgcagaaggagaaggaaatagcaaaaaactctccaagaagcgcgctgcgaccaccgtcttacaggagcttaaaaaacttccacctcttcctgtggtggaaaagccaaaactattttttaaaaaacgccctaaaacaatagtaaaggccggaccagaatatggccaagggatgaaccctattagccgcctggcgcaaattcaacaggccaaaaaggaaaaggagccggattatgttttgctttcagaaagaggaatgcctcgacgtcgagaatttgtgatgcaggtgaaggtaggcaatgaagttgctacaggaacaggacctaataaaaagatagccaaaaaaaatgctgcagaagcaatgctgttacaacttggttataaagcatccactaatcttcaggatcaacttgagaagacaggggaaaacaaaggatggagtggtccaaagcctgggtttcctgaaccaacaaataatactccaaaaggaattcttcatttgtctcctgatgtttatcaagagatggaagccagccgccacaaagtaatctctggcactactctaggctatttgtcacccaaagatatgaaccaaccttcaagctctttcttcagtatatctcccacatcgaatagttcagctacaattgccagggaactccttatgaatggaacatcttctacagctgaagccataggtttaaaaggaagttctcctactcccccttgttctccagtacaaccttcaaaacaactggaatatttagcaaggattcaaggctttcaggtatgaattaaaagcaaaaacaaaaaacaaaacaattcattagcctcagattcttcatctgtatacatcacaaggctcattcttgcctgctagtatggcctacatgccacttacgttttaagttatttaggaacacaaaggacagacaaaaaagccatatgcacatgcctcattttctcttatttttgatctatctagtaattcttttgctgcctgtctcttctccattttccttcttcttttttaagcatttttcatattcttcactgtcttctatttggtcttgattaggtgcatctatctcttcgctctgtcttccacaaacaaaaattctgccttcagacatttggtgttagtatttcacactcagttctccctttttttacataaggattgagtttctttttatgatgattttacctttatagcaattttgaattttgcattctgttgctagtattgattcaggtacaccattaagatacaacattctagaagtctattaccttaggagttaattaaacatgatatttgaagaataatgaaatgctttatagttgtttgaggcataacaatgtgtatttgttttactggatcatgttttgaactgactagggagggtagcacctgcctcagatagtaccaacaattctgtttcactgggtagtctaaaactagcttatagtttaacttaacttgttgtgtatgtgaatttagggatggaaactttttttcccctatttattctttgtttccttctgggaaaaaaccccacaaaaatcagcactcctttatggatacattggagcttttgaaagaattgtaaactctaggaaggggaaatatctgtgtcttgatttcttagttgccttgaaaatcatgtactgaactgtaaccgctaacttgactggatgaactagtttgcttgtgtgtagagagtgtattgcttcctcagatttcactgttttcatctccttttccatcttagtctttattccttaagaccaaaaactgtaatatcctttagaaatgctctagaagatctgtattgtgtagaatgatcatgtatttataaatattttacaagtttagattataaaatgaaaaagaaggtcatgtgttttggggggtattttgcatgttcggatttttttttcccttcaccgaacccttctgattctttcaaactattgccaggtagttgttagtgtttctaattggactcttaatatgaacttcaagaagctgttaccagttatcggctctgtcatctgaaattttaaccacttaatttaaagttacaattttagaatttgtttttgttgttttaccttaagaaacacaataaatcactgtttaaaaaagatctcaatttatataaagtactggaaaaaagctaagtaatttttagttctatctataatctccgtaggatgaattagaaataaattgtgatgaaaagaaattaactgcttatttatgaatctaatcatttagaaatgtctgagagtaacactgcattcttatagaaacaaagcacaaattgcattcaagctctgaattgattttttgcttggagctgttgttacagtagctgtaattttgctaccagaatgtcttaattttttaaatttgtttttatttctaagctcttggcaatgacaataattataattttaacatatcttcactgtagtcaacatgtagagtctgcttccctcattattgcattgctaaggcctttttaaaaagcttatgcttacataatatactcttttttatggacacgttatatgtttccaaatctgtgtattgtgatttttacatactaatgaatataaacaggtgattttaaaatattactgtgcttctttggttgaatgagctggtattgatgtaaaatactctgtcattgatggaccactacctgcagctaagcagtgagcagaatctccgggaaatgacttagtctggccacatgcatagcccatcttcataatgtcgcagcagaaggttctttgtggttaaaagttttaaagcctatttctttataggtaaccctctcaggtatatttacctggtagaaaaacatgtagattgtttctattacttaaatgttttaattggactgtagtttagaaattacaggaccagcttgttacagattatacactattctgttacttttatttctgaaacttaaaaacaataaattctttttctgtgtttctaggttagaacttttttattttattgcacactgaacagatactgttgcttattgaatattgtgtaaacccttctttggctttccttgcccattgcaatttgatttaagcctactagagccattgtatgtgacagctatattgtattacaaagtaaaaatatatgagtgtattgaaaac

SEQ ID NO: 8910 - DNA, 4380 bp, Homo sapiens
  misc_feature (3)..(3): n is a, c, g, or t
  misc_feature (196)..(196): n is a, c, g, or t
  misc_feature (222)..(222): n is a, c, g, or t
  misc_feature (244)..(244): n is a, c, g, or t
  misc_feature (302)..(302): n is a, c, g, or t
gantcaggaaaggatatggatgatgacaaagatgcaaataagtctgagatcagcttagtgtttgaaattgctctgaagcgaaatatgcctgtcagttttgaggttattaaagaaagtggaccaccacatatgaaaagctttgttactcgagtgtcagtaggagagttctctgcagaaggagaaggaaatagcaaanactctccaagaagcgcgctgcgaccnccgtcttacaggagcttaaaanacttccacctcttcctgtggtggaaaagccaaaactattttttaaaaaacgccctaanacataatccggctccttttcctttttggcctgttgaatttgcgggagccgtctgcaaagtgtccccggcaagaagaggctgcctaccacaaggactttagcttactttttaaagattgaagaaaaaaaagaagacagaaaaagaagaactcaaagatacacaaagtaatttgaaccaaggctcagaagtttttggagccgtgagggatacagcagtttggtcaatattgtcttaacatgcttcaaataaatcagatgttctcagtgcagctgagtcttggtgagcagacatgggaatccgaaggcagcagtataaagaaggctcagcaggctgttgccaataaagctttgactgaatctacgcttcccaaaccagttcagaagccacccaaaagtaatgttaacaataacccaggcagtataactccaactgtggaactgaatgggcttgctatgaaaaggggagagcctgccatctacaggccattagatccaaagccattcccaaattatagagctaattacaactttcggggcatgtacaatcagaggtatcattgcccagtgcctaagatcttttatgttcagctcactgtaggaaataatgaattttttggggaaggaaagactcgacaagctgctagacacaatgctgcaatgaaagccctccaagcactgcagaatgaacctattccagaaagatctcctcagaatggtgaatcaggaaaggatatggatgatgacaaagatgcaaataagtctgagatcagcttagtgtttgaaattgctctgaagcgaaatatgcctgtcagttttgaggttattaaagaaagtggaccaccacatatgaaaagctttgttactcgagtgtcagtaggagagttctctgcagaaggagaaggaaatagcaaaaaactctccaagaagcgcgctgcgaccaccgtcttacaggagcttaaaaaacttccacctcttcctgtggtggaaaagccaaaactattttttaaaaaacgccctaaaacaatagtaaaggccggaccagaatatggccaagggatgaaccctattagccgcctggcgcaaattcaacaggccaaaaaggaaaaggagccggattatgttttgctttcagaaagaggaatgcctcgacgtcgagaatttgtgatgcaggtgaaggtaggcaatgaagttgctacaggaacaggacctaataaaaagatagccaaaaaaaatgctgcagaagcaatgctgttacaacttggttataaagcatccactaatcttcaggatcaacttgagaagacaggggaaaacaaaggatggagtggtccaaagcctgggtttcctgaaccaacaaataatactccaaaaggaattcttcatttgtctcctgatgtttatcaagagatggaagccagccgccacaaagtaatctctggcactactctaggctatttgtcacccaaagatatgaaccaaccttcaagctctttcttcagtatatctcccacatcgaatagttcagctacaattgccagggaactccttatgaatggaacatcttctacagctgaagccataggtttaaaaggaagttctcctactcccccttgttctccagtacaaccttcaaaacaactggaatatttagcaaggattcaaggctttcaggtatgaattaaaagcaaaaacaaaaaacaaaacaattcattagcctcagattcttcatctgtatacatcacaaggctcattcttgcctgctagtatggcctacatgccacttacgttttaagttatttaggaacacaaaggacagacaaaaaagccatatgcacatgcctcattttctcttatttttgatctatctagtaattcttttgctgcctgtctcttctccattttccttcttcttttttaagcatttttcatattcttcactgtcttctatttggtcttgattaggtgcatctatctcttcgctctgtcttccacaaacaaaaattctgccttcagacatttggtgttagtatttcacactcagttctccctttttttacataaggattgagtttctttttatgatgattttacctttatagcaattttgaattttgcattctgttgctagtattgattcaggtacaccattaagatacaacattctagaagtctattaccttaggagttaattaaacatgatatttgaagaataatgaaatgctttatagttgtttgaggcataacaatgtgtatttgttttactggatcatgttttgaactgactagggagggtagcacctgcctcagatagtaccaacaattctgtttcactgggtagtctaaaactagcttatagtttaacttaacttgttgtgtatgtgaatttagggatggaaactttttttcccctatttattctttgtttccttctgggaaaaaaccccacaaaaatcagcactcctttatggatacattggagcttttgaaagaattgtaaactctaggaaggggaaatatctgtgtcttgatttcttagttgccttgaaaatcatgtactgaactgtaaccgctaacttgactggatgaactagtttgcttgtgtgtagagagtgtattgcttcctcagatttcactgttttcatctccttttccatcttagtctttattccttaagaccaaaaactgtaatatcctttagaaatgctctagaagatctgtattgtgtagaatgatcatgtatttataaatattttacaagtttagattataaaatgaaaaagaaggtcatgtgttttggggggtattttgcatgttcggatttttttttcccttcaccgaacccttctgattctttcaaactattgccaggtagttgttagtgtttctaattggactcttaatatgaacttcaagaagctgttaccagttatcggctctgtcatctgaaattttaaccacttaatttaaagttacaattttagaatttgtttttgttgttttaccttaagaaacacaataaatcactgtttaaaaaagatctcaatttatataaagtactggaaaaaagctaagtaatttttagttctatctataatctccgtaggatgaattagaaataaattgtgatgaaaagaaattaactgcttatttatgaatctaatcatttagaaatgtctgagagtaacactgcattcttatagaaacaaagcacaaattgcattcaagctctgaattgattttttgcttggagctgttgttacagtagctgtaattttgctaccagaatgtcttaattttttaaatttgtttttatttctaagctcttggcaatgacaataattataattttaacatatcttcactgtagtcaacatgtagagtctgcttccctcattattgcattgctaaggcctttttaaaaagcttatgcttacataatatactcttttttatggacacgttatatgtttccaaatctgtgtattgtgatttttacatactaatgaatataaacaggtgattttaaaatattactgtgcttctttggttgaatgagctggtattgatgtaaaatactctgtcattgatggaccactacctgcagctaagcagtgagcagaatctccgggaaatgacttagtctggccacatgcatagcccatcttcataatgtcgcagcagaaggttctttgtggttaaaagttttaaagcctatttctttataggtaaccctctcaggtatatttacctggtagaaaaacatgtagattgtttctattacttaaatgttttaattggactgtagtttagaaattacaggaccagcttgttacagattatacactattctgttacttttatttctgaaacttaaaaacaataaattctttttctgtgtttctaggttagaacttttttattttattgcacactgaacagatactgttgcttattgaatattgtgtaaacccttctttggctttccttgcccattgcaatttgatttaagcctactagagccattgtatgtgacagctatattgtattacaaagtaaaaatatatgagtgtattgaaaac

SEQ ID NO: 8911 - DNA, 4044 bp, Homo sapiens
agggagcgggggagcgccggggaggcgggcggaggcgggcggaggcggggggcggggagcccgaggggtggaagccggcggcggccgagcggggtcagttctctgtagtgtttgccaatgttggagccgtctgcaaagtgtccccggcaagaagtttttggagccgtgagggatacagcagtttggtcaatattgtcttaacatgcttcaaataaatcagatgttctcagtgcagctgagtcttggtgagcagacatgggaatccgaaggcagcagtataaagaaggctcagcaggctgttgccaataaagctttgactgaatctacgcttcccaaaccagttcagaagccacccaaaagtaatgttaacaataacccaggcagtataactccaactgtggaactgaatgggcttgctatgaaaaggggagagcctgccatctacaggccattagatccaaagccattcccaaattatagagctaattacaactttcggggcatgtacaatcagaggtatcattgcccagtgcctaagatcttttatgttcagctcactgtaggaaataatgaattttttggggaaggaaagactcgacaagctgctagacacaatgctgcaatgaaagccctccaagcactgcagaatgaacctattccagaaagatctcctcagaatggtgaatcaggaaaggatatggatgatgacaaagatgcaaataagtctgagatcagcttagtgtttgaaattgctctgaagcgaaatatgcctgtcagttttgaggttattaaagaaagtggaccaccacatatgaaaagctttgttactcgagtgtcagtaggagagttctctgcagaaggagaaggaaatagcaaaaaactctccaagaagcgcgctgcgaccaccgtcttacaggagcttaaaaaacttccacctcttcctgtggtggaaaagccaaaactattttttaaaaaacgccctaaaacaatagtaaaggccggaccagaatatggccaagggatgaaccctattagccgcctggcgcaaattcaacaggccaaaaaggaaaaggagccggattatgttttgctttcagaaagaggaatgcctcgacgtcgagaatttgtgatgcaggtgaaggtaggcaatgaagttgctacaggaacaggacctaataaaaagatagccaaaaaaaatgctgcagaagcaatgctgttacaacttggttataaagcatccactaatcttcaggatcaacttgagaagacaggggaaaacaaaggatggagtggtccaaagcctgggtttcctgaaccaacaaataatactccaaaaggaattcttcatttgtctcctgatgtttatcaagagatggaagccagccgccacaaagtaatctctggcactactctaggctatttgtcacccaaagatatgaaccaaccttcaagctctttcttcagtatatctcccacatcgaatagttcagctacaattgccagggaactccttatgaatggaacatcttctacagctgaagccataggtttaaaaggaagttctcctactcccccttgttctccagtacaaccttcaaaacaactggaatatttagcaaggattcaaggctttcaggtatgaattaaaagcaaaaacaaaaaacaaaacaattcattagcctcagattcttcatctgtatacatcacaaggctcattcttgcctgctagtatggcctacatgccacttacgttttaagttatttaggaacacaaaggacagacaaaaaagccatatgcacatgcctcattttctcttatttttgatctatctagtaattcttttgctgcctgtctcttctccattttccttcttcttttttaagcatttttcatattcttcactgtcttctatttggtcttgattaggtgcatctatctcttcgctctgtcttccacaaacaaaaattctgccttcagacatttggtgttagtatttcacactcagttctccctttttttacataaggattgagtttctttttatgatgattttacctttatagcaattttgaattttgcattctgttgctagtattgattcaggtacaccattaagatacaacattctagaagtctattaccttaggagttaattaaacatgatatttgaagaataatgaaatgctttatagttgtttgaggcataacaatgtgtatttgttttactggatcatgttttgaactgactagggagggtagcacctgcctcagatagtaccaacaattctgtttcactgggtagtctaaaactagcttatagtttaacttaacttgttgtgtatgtgaatttagggatggaaactttttttcccctatttattctttgtttccttctgggaaaaaaccccacaaaaatcagcactcctttatggatacattggagcttttgaaagaattgtaaactctaggaaggggaaatatctgtgtcttgatttcttagttgccttgaaaatcatgtactgaactgtaaccgctaacttgactggatgaactagtttgcttgtgtgtagagagtgtattgcttcctcagatttcactgttttcatctccttttccatcttagtctttattccttaagaccaaaaactgtaatatcctttagaaatgctctagaagatctgtattgtgtagaatgatcatgtatttataaatattttacaagtttagattataaaatgaaaaagaaggtcatgtgttttggggggtattttgcatgttcggatttttttttcccttcaccgaacccttctgattctttcaaactattgccaggtagttgttagtgtttctaattggactcttaatatgaacttcaagaagctgttaccagttatcggctctgtcatctgaaattttaaccacttaatttaaagttacaattttagaatttgtttttgttgttttaccttaagaaacacaataaatcactgtttaaaaaagatctcaatttatataaagtactggaaaaaagctaagtaatttttagttctatctataatctccgtaggatgaattagaaataaattgtgatgaaaagaaattaactgcttatttatgaatctaatcatttagaaatgtctgagagtaacactgcattcttatagaaacaaagcacaaattgcattcaagctctgaattgattttttgcttggagctgttgttacagtagctgtaattttgctaccagaatgtcttaattttttaaatttgtttttatttctaagctcttggcaatgacaataattataattttaacatatcttcactgtagtcaacatgtagagtctgcttccctcattattgcattgctaaggcctttttaaaaagcttatgcttacataatatactcttttttatggacacgttatatgtttccaaatctgtgtattgtgatttttacatactaatgaatataaacaggtgattttaaaatattactgtgcttctttggttgaatgagctggtattgatgtaaaatactctgtcattgatggaccactacctgcagctaagcagtgagcagaatctccgggaaatgacttagtctggccacatgcatagcccatcttcataatgtcgcagcagaaggttctttgtggttaaaagttttaaagcctatttctttataggtaaccctctcaggtatatttacctggtagaaaaacatgtagattgtttctattacttaaatgttttaattggactgtagtttagaaattacaggaccagcttgttacagattatacactattctgttacttttatttctgaaacttaaaaacaataaattctttttctgtgtttctaggttagaacttttttattttattgcacactgaacagatactgttgcttattgaatattgtgtaaacccttctttggctttccttgcccattgcaatttgatttaagcctactagagccattgtatgtgacagctatattgtattacaaagtaaaaatatatgagtgtattgaaaac

SEQ ID NO: 8912 - DNA, 3963 bp, Homo sapiens
caaagtgtcattgtgtcataaacagcatgttttaaaattcagatttaataaactgatttaagacagtaaatttgaaagacaaaattaagtctcattcaggagtggtcaatattgtcttaacatgcttcaaataaatcagatgttctcagtgcagctgagtcttggtgagcagacatgggaatccgaaggcagcagtataaagaaggctcagcaggctgttgccaataaagctttgactgaatctacgcttcccaaaccagttcagaagccacccaaaagtaatgttaacaataacccaggcagtataactccaactgtggaactgaatgggcttgctatgaaaaggggagagcctgccatctacaggccattagatccaaagccattcccaaattatagagctaattacaactttcggggcatgtacaatcagaggtatcattgcccagtgcctaagatcttttatgttcagctcactgtaggaaataatgaattttttggggaaggaaagactcgacaagctgctagacacaatgctgcaatgaaagccctccaagcactgcagaatgaacctattccagaaagatctcctcagaatggtgaatcaggaaaggatatggatgatgacaaagatgcaaataagtctgagatcagcttagtgtttgaaattgctctgaagcgaaatatgcctgtcagttttgaggttattaaagaaagtggaccaccacatatgaaaagctttgttactcgagtgtcagtaggagagttctctgcagaaggagaaggaaatagcaaaaaactctccaagaagcgcgctgcgaccaccgtcttacaggagcttaaaaaacttccacctcttcctgtggtggaaaagccaaaactattttttaaaaaacgccctaaaacaatagtaaaggccggaccagaatatggccaagggatgaaccctattagccgcctggcgcaaattcaacaggccaaaaaggaaaaggagccggattatgttttgctttcagaaagaggaatgcctcgacgtcgagaatttgtgatgcaggtgaaggtaggcaatgaagttgctacaggaacaggacctaataaaaagatagccaaaaaaaatgctgcagaagcaatgctgttacaacttggttataaagcatccactaatcttcaggatcaacttgagaagacaggggaaaacaaaggatggagtggtccaaagcctgggtttcctgaaccaacaaataatactccaaaaggaattcttcatttgtctcctgatgtttatcaagagatggaagccagccgccacaaagtaatctctggcactactctaggctatttgtcacccaaagatatgaaccaaccttcaagctctttcttcagtatatctcccacatcgaatagttcagctacaattgccagggaactccttatgaatggaacatcttctacagctgaagccataggtttaaaaggaagttctcctactcccccttgttctccagtacaaccttcaaaacaactggaatatttagcaaggattcaaggctttcaggtatgaattaaaagcaaaaacaaaaaacaaaacaattcattagcctcagattcttcatctgtatacatcacaaggctcattcttgcctgctagtatggcctacatgccacttacgttttaagttatttaggaacacaaaggacagacaaaaaagccatatgcacatgcctcattttctcttatttttgatctatctagtaattcttttgctgcctgtctcttctccattttccttcttcttttttaagcatttttcatattcttcactgtcttctatttggtcttgattaggtgcatctatctcttcgctctgtcttccacaaacaaaaattctgccttcagacatttggtgttagtatttcacactcagttctccctttttttacataaggattgagtttctttttatgatgattttacctttatagcaattttgaattttgcattctgttgctagtattgattcaggtacaccattaagatacaacattctagaagtctattaccttaggagttaattaaacatgatatttgaagaataatgaaatgctttatagttgtttgaggcataacaatgtgtatttgttttactggatcatgttttgaactgactagggagggtagcacctgcctcagatagtaccaacaattctgtttcactgggtagtctaaaactagcttatagtttaacttaacttgttgtgtatgtgaatttagggatggaaactttttttcccctatttattctttgtttccttctgggaaaaaaccccacaaaaatcagcactcctttatggatacattggagcttttgaaagaattgtaaactctaggaaggggaaatatctgtgtcttgatttcttagttgccttgaaaatcatgtactgaactgtaaccgctaacttgactggatgaactagtttgcttgtgtgtagagagtgtattgcttcctcagatttcactgttttcatctccttttccatcttagtctttattccttaagaccaaaaactgtaatatcctttagaaatgctctagaagatctgtattgtgtagaatgatcatgtatttataaatattttacaagtttagattataaaatgaaaaagaaggtcatgtgttttggggggtattttgcatgttcggatttttttttcccttcaccgaacccttctgattctttcaaactattgccaggtagttgttagtgtttctaattggactcttaatatgaacttcaagaagctgttaccagttatcggctctgtcatctgaaattttaaccacttaatttaaagttacaattttagaatttgtttttgttgttttaccttaagaaacacaataaatcactgtttaaaaaagatctcaatttatataaagtactggaaaaaagctaagtaatttttagttctatctataatctccgtaggatgaattagaaataaattgtgatgaaaagaaattaactgcttatttatgaatctaatcatttagaaatgtctgagagtaacactgcattcttatagaaacaaagcacaaattgcattcaagctctgaattgattttttgcttggagctgttgttacagtagctgtaattttgctaccagaatgtcttaattttttaaatttgtttttatttctaagctcttggcaatgacaataattataattttaacatatcttcactgtagtcaacatgtagagtctgcttccctcattattgcattgctaaggcctttttaaaaagcttatgcttacataatatactcttttttatggacacgttatatgtttccaaatctgtgtattgtgatttttacatactaatgaatataaacaggtgattttaaaatattactgtgcttctttggttgaatgagctggtattgatgtaaaatactctgtcattgatggaccactacctgcagctaagcagtgagcagaatctccgggaaatgacttagtctggccacatgcatagcccatcttcataatgtcgcagcagaaggttctttgtggttaaaagttttaaagcctatttctttataggtaaccctctcaggtatatttacctggtagaaaaacatgtagattgtttctattacttaaatgttttaattggactgtagtttagaaattacaggaccagcttgttacagattatacactattctgttacttttatttctgaaacttaaaaacaataaattctttttctgtgtttctaggttagaacttttttattttattgcacactgaacagatactgttgcttattgaatattgtgtaaacccttctttggctttccttgcccattgcaatttgatttaagcctactagagccattgtatgtgacagctatattgtattacaaagtaaaaatatatgagtgtattgaaaac

SEQ ID NO: 8913 - DNA, 3315 bp, Homo sapiens
agggagcgggggagcgccggggaggcgggcggaggcgggcggaggcggggggcggggagcccgaggggtggaagccggcggcggccgagcggggtcagttctctgtagtgtttgccaatgttggagccgtctgcaaagtgtccccggcaagaagaggctgcctaccacaaggactttagcttactttttaaagattgaagaaaaaaaagaagacagaaaaagaagaactcaaagatacacaaagtaatttgaaccaaggctcagaagtttttggagccgtgagggatacagcagtttggtcaatattgtcttaacatgcttcaaataaatcagatgttctcagtgcagctgagtcttggtgagcagacatgggaatccgaaggcagcagtataaagaaggctcagcaggctgttgccaataaagctttgactgaatctacgcttcccaaaccagttcagaagccacccaaaagtaatgttaacaataacccaggcagtataactccaactgtggaactgaatgggcttgctatgaaaaggggagagcctgccatctacaggccattagatccaaagccattcccaaattatagagctaattacaactttcggggcatgtacaatcagaggtatcattgcccagtgcctaagatcttttatgttcagctcactgtaggaaataatgaattttttggggaaggaaagactcgacaagctgctagacacaatgctgcaatgaaagccctccaagcactgcagaatgaacctattccagaaagatctcctcagaatggtgaatcaggaaaggatatggatgatgacaaagatgcaaataagtctgagatcagcttagtgtttgaaattgctctgaagcgaaatatgcctgtcagttttgaggttattaaagaaagtggaccaccacatatgaaaagctttgttactcgagtgtcagtaggagagttctctgcagaaggagaaggaaatagcaaaaaactctccaagaagcgcgctgcgaccaccgtcttacaggagcttaaaaaacttccacctcttcctgtggtggaaaagccaaaactattttttaaaaaacgccctaaaacaatagtaaaggccggaccagaatatggccaagggatgaaccctattagccgcctggcgcaaattcaacaggccaaaaaggaaaaggagccggattatgttttgctttcagaaagaggaatgcctcgacgtcgagaatttgtgatgcaggtgaaggtaggcaatgaagttgctacaggaacaggacctaataaaaagatagccaaaaaaaatgctgcagaagcaatgctgttacaacttggttataaagcatccactaatcttcaggatcaacttgagaagacaggggaaaacaaaggatggagtggtccaaagcctgggtttcctgaaccaacaaataatactccaaaaggaattcttcatttgtctcctgatgtttatcaagagatggaagccagccgccacaaagtaatctctggcactactctaggctatttgtcacccaaagatatgaaccaaccttcaagctctttcttcagtatatctcccacatcgaatagttcagctacaattgccagggaactccttatgaatggaacatcttctacagctgaagccataggtttaaaaggaagttctcctactcccccttgttctccagtacaaccttcaaaacaactggaatatttagcaaggattcaaggctttcaggcagccttaagtgccttgaaacaattttctgaacaaggactggatccaatcgatggagcaatgaatatcgaaaaaggttctcttgaaaaacaagccaagcatctgagagagaaagcggacaataaccaggcacccccgggctccatcgctcaggactgcaagaaatcaaactcggccgtctagcagctcccagaacccgcggctgccaccgcatccttataaacctgtcagcacgcatgagggtgtctgtgttcagggaaatgaatgactaataccattatttgagtcttatgtgaagacaacactattctaacacgagagataatatacatggtactgtttattcaactggggaaaaataaaactttgagcatttcccttggaactcgagatcagatcataactcatttgcctagaggcagcagaaatctgatcctgctactggagcttaaaataacaagtaaagaaaagtgttagaaacaaagctaaaattttaacatgattaataatagagaagttgggtttggttctgttgttatgattgttttgtcgtggtgcttgtgttcagttatattctctctctctctcatttcaaatactgcttgacaattcgaaaatgaaccaatgatgtgctgtggaatgtgatggttgtcttcatatagagtcacatggtttctctttttatgcagatatttataatcttcatcctatatcagtaggaataactataaggtgcactacaaaaagatgtatgcaaacaaacatgttttaaatcaggtcagatatctgatgaaaaatacgaactaatgttaagagcaagtagtttcaacatactccaggaactgagaaacaaaacaaagcaattgtgggttttgagctccatatactcttagcaagtaagggggcgtcttgcccctatatatcatcttcccggattccactccctgttgtgggaatcgcgcccacccccatccgtgtgttgtagccactcacggtttgcatcaagagtgttttttgtaactgcctctggacttgggacagtgagtaggatcaaaaataaataatgtacatgacggggaagggaaaaacctgttggagttgcttccagccagccacgctccgggccagcatgttggaatccagcgtggagcagatgcagtaaaaatgtggttggtttctgtgtgaagcgctgttgttgttcttttgttctctcactctcatcttttaaatatcacctccgtgaaacccatccgaaaggccaccacccggcctagtcactgcccagcagtgggattagagaatggataggctgtacctgagaaactgcagagccgcctcctgggtgactcgggccgggttcctggccaacgtcatcgcattgttcaggctttctccttattgatttgcaaacattgtgcaatgagaaaacactacatggtctaactgctcgacccaacatgacaataggaatataattatgtaagatttcacaagcaaaaccaccacaaatcatgatctggctgactcacacgcgactggagaataaacaaacagcaacataaggaa

SEQ ID NO: 8914 - DNA, 2019 bp, Homo sapiens
agggagcgggggagcgccggggaggcgggcggaggcgggcggaggcggggggcggggagcccgaggggtggaagccggcggcggccgagcggggtcagttctctgtagtgtttgccaatgttggagccgtctgcaaagtgtccccggcaagaagaggctgcctaccacaaggactttagcttactttttaaagattgaagaaaaaaaagaagacagaaaaagaagaactcaaagatacacaaagtaatttgaaccaaggctcagaagtttttggagccgtgagggatacagcagtttggtcaatattgtcttaacatgcttcaaataaatcaggtgaaggtaggcaatgaagttgctacaggaacaggacctaataaaaagatagccaaaaaaaatgctgcagaagcaatgctgttacaacttggttataaagcatccactaatcttcaggatcaacttgagaagacaggggaaaacaaaggatggagtggtccaaagcctgggtttcctgaaccaacaaataatactccaaaaggaattcttcatttgtctcctgatgtttatcaagagatggaagccagccgccacaaagtaatctctggcactactctaggctatttgtcacccaaagatatgaaccaaccttcaagctctttcttcagtatatctcccacatcgaatagttcagctacaattgccagggaactccttatgaatggaacatcttctacagctgaagccataggtttaaaaggaagttctcctactcccccttgttctccagtacaaccttcaaaacaactggaatatttagcaaggattcaaggctttcaggcagccttaagtgccttgaaacaattttctgaacaaggactggatccaatcgatggagcaatgaatatcgaaaaaggttctcttgaaaaacaagccaagcatctgagagagaaagcggacaataaccaggcacccccgggctccatcgctcaggactgcaagaaatcaaactcggccgtctagcagctcccagaacccgcggctgccaccgcatccttataaacctgtcagcacgcatgagggtgtctgtgttcagggaaatgaatgactaataccattatttgagtcttatgtgaagacaacactattctaacacgagagataatatacatggtactgtttattcaactggggaaaaataaaactttgagcatttcccttggaactcgagatcagatcataactcatttgcctagaggcagcagaaatctgatcctgctactggagcttaaaataacaagtaaagaaaagtgttagaaacaaagctaaaattttaacatgattaataatagagaagttgggtttggttctgttgttatgattgttttgtcgtggtgcttgtgttcagttatattctctctctctctcatttcaaatactgcttgacaattcgaaaatgaaccaatgatgtgctgtggaatgtgatggttgtcttcatatagagtcacatggtttctctttttatgcagatatttataatcttcatcctatatcagtaggaataactataaggtgcactacaaaaagatgtatgcaaacaaacatgttttaaatcaggtcagatatctgatgaaaaatacgaactaatgttaagagcaagtagtttcaacatactccaggaactgagaaacaaaacaaagcaattgtgggttttgagctccatatactcttagcaagtaagggggcgtcttgcccctatatatcatcttcccggattccactccctgttgtgggaatcgcgcccacccccatccgtgtgttgtagccactcacggtttgcatcaagagtgttttttgtaactgcctctggacttgggacagtgagtaggatcaaaaataaataatgtacatgacggggaagggaaaaacctgttggagttgcttccagccagccacgctccgggccagcatgttggaatccagcgtggagcagatgcagtaaaaatgtggttggtttctgtgtga

SEQ ID NO: 8915 - DNA, 1297 bp, Homo sapiens
tctgtattcagagcttggtttataccactttggttccaaatatatctggataaaatgctgatttcctcttttgagaatatacctgacaaggatcagattcatgtaacaagaggcagccttaagtgccttgaaacaattttctgaacaaggactggatccaatcgatggagcaatgaatatcgaaaaaggttctcttgaaaaacaagccaagcatctgagagagaaagcggacaataaccaggcacccccgggctccatcgctcaggactgcaagaaatcaaactcggccgtctagcagctcccagaacccgcggctgccaccgcatccttataaacctgtcagcacgcatgagggtgtctgtgttcagggaaatgaatgactaataccattatttgagtcttatgtgaagacaacactattctaacacgagagataatatacatggtactgtttattcaactggggaaaaataaaactttgagcatttcccttggaactcgagatcagatcataactcatttgcctagaggcagcagaaatctgatcctgctactggagcttaaaataacaagtaaagaaaagtgttagaaacaaagctaaaattttaacatgattaataatagagaagttgggtttggttctgttgttatgattgttttgtcgtggtgcttgtgttcagttatattctctctctctctcatttcaaatactgcttgacaattcgaaaatgaaccaatgatgtgctgtggaatgtgatggttgtcttcatatagagtcacatggtttctctttttatgcagatatttataatcttcatcctatatcagtaggaataactataaggtgcactacaaaaagatgtatgcaaacaaacatgttttaaatcaggtcagatatctgatgaaaaatacgaactaatgttaagagcaagtagtttcaacatactccaggaactgagaaacaaaacaaagcaattgtgggttttgagctccatatactcttagcaagtaagggggcgtcttgcccctatatatcatcttcccggattccactccctgttgtgggaatcgcgcccacccccatccgtgtgttgtagccactcacggtttgcatcaagagtgttttttgtaactgcctctggacttgggacagtgagtaggatcaaaaataaataatgtacatgacggggaagggaaaaacctgttggagttgcttccagccagccacgctccgggccagcatgttggaatccagcgtggagcagatgcagtaaaaatgtggttggtttctgtgtga

SEQ ID NO: 8916 - DNA, 1255 bp, Homo sapiens
tctgacattagcccctgtgcagatgactttccatgctattggaagctccattgaagccagccatgatcaggcagccttaagtgccttgaaacaattttctgaacaaggactggatccaatcgatggagcaatgaatatcgaaaaaggttctcttgaaaaacaagccaagcatctgagagagaaagcggacaataaccaggcacccccgggctccatcgctcaggactgcaagaaatcaaactcggccgtctagcagctcccagaacccgcggctgccaccgcatccttataaacctgtcagcacgcatgagggtgtctgtgttcagggaaatgaatgactaataccattatttgagtcttatgtgaagacaacactattctaacacgagagataatatacatggtactgtttattcaactggggaaaaataaaactttgagcatttcccttggaactcgagatcagatcataactcatttgcctagaggcagcagaaatctgatcctgctactggagcttaaaataacaagtaaagaaaagtgttagaaacaaagctaaaattttaacatgattaataatagagaagttgggtttggttctgttgttatgattgttttgtcgtggtgcttgtgttcagttatattctctctctctctcatttcaaatactgcttgacaattcgaaaatgaaccaatgatgtgctgtggaatgtgatggttgtcttcatatagagtcacatggtttctctttttatgcagatatttataatcttcatcctatatcagtaggaataactataaggtgcactacaaaaagatgtatgcaaacaaacatgttttaaatcaggtcagatatctgatgaaaaatacgaactaatgttaagagcaagtagtttcaacatactccaggaactgagaaacaaaacaaagcaattgtgggttttgagctccatatactcttagcaagtaagggggcgtcttgcccctatatatcatcttcccggattccactccctgttgtgggaatcgcgcccacccccatccgtgtgttgtagccactcacggtttgcatcaagagtgttttttgtaactgcctctggacttgggacagtgagtaggatcaaaaataaataatgtacatgacggggaagggaaaaacctgttggagttgcttccagccagccacgctccgggccagcatgttggaatccagcgtggagcagatgcagtaaaaatgtggttggtttctgtgtga

SEQ ID NO: 8917 - DNA, 2718 bp, Homo sapiens
  misc_feature (1942)..(1942): n is a, c, g, or t
  misc_feature (1951)..(1951): n is a, c, g, or t
ccatgggaatattgaattatagagttggacaggatagtcttatttattgttgcatagcacattgcaccagaatttaaggacttaagacaacaaacattatcttacagtttctgtgggttagaaatctgggtgcagcttagctgggtgcctgtggctcataaaagaggtggtagtcaagctgtcagttggggttgcagtcacatctggaagctctactggtggaagatctgtttctgaactcattcatgtggctcttgcagggttcagtttcctggggctcttggactgaagaaatcaattgttgctggctgttggccagaggcttttctcagttctttgccatatgggcctctccaaagggcaccacagtttggcatctgcctccctctgagcaaatgagtgagagaaggtgacacctaagaatttttataacctaatcttggaagtggtatctcattatttctgctatattctatttgttagaggctgcctaccacaaggactttagcttactttttaaagattgaagaaaaaaaagaagacagaaaaagaagaactcaaagatacacaaagtaatttgaaccaaggctcagaagtttttggagccgtgagggatacagcagtttggtcaatattgtcttaacatgcttcaaataaatcagatgttctcagtgcagctgagtcttggtgagcagacatgggaatccgaaggcagcagtataaagaaggctcagcaggctgttgccaataaagctttgactgaatctacgcttcccaaaccagttcagaagccacccaaaagtaatgttaacaataacccaggcagtataactccaactgtggaactgaatgggcttgctatgaaaaggggagagcctgccatctacaggccattagatccaaagccattcccaaattatagagctaattacaactttcggggcatgtacaatcagagatggcaacacttgaatggattacagggactctggagccaaagatccaaggagatgctcttttccttgtcagaacccagattaatcattagcttcttaaggcagggaatgaaaggtgaagtccaagaaacagatgaagagttacctaagtcagtgttataagatgttccatggtaaaagggatttgaagacaaattttggaaatgctgcatactgtatctctcttgaagactcctaaaggtgtcatgaagaaaactgtttacctaagtggttcctaacactgactgaacatcaggctttcctgggcagctttaaaaattctgatgcccagactttatgtggactaattaaatcagaatttctggttgcagaagcttgaaccgcactgttttttaaaacttccccaagtaattctatgtccagtcatttaaatactggtccccacaacccaaaacacattaccctctattaacatcaaagattatgagatggtttgaatagtcatagaacttttgaaagaagtaaagaagaagggaagaattacagttaaccacactccttaaggataattgttctggacagctagcttccccacattgctgagggttcacttttttttggaacctaaaactttacttagttcagtaattttggatagaaatatttctaaaagttatggcatatattttttatatccttaaatagaaaatgccacaattcttagcatgaagaatccttgctgttgactcattatcaaccttataaacaataagtattacaagcctcatgagatatgtacatggtttgtccttataccagataatcctagacatctgtttctagagtacccaagtgtgcttttagttactttccaaatcattgttgtcagtcagattgtcatcttatttcttgtttttgtcagtgcacctttgcatattgcttgctcctttctttgatgcttttcaattgctattatcttgaaaacngatattatngtttgaatttggggcaaagtaagagtagcagggctttaattacgccctaagatgtccccttaactgtggaaaacatcgagttttatctagttggtgaatttttttacttcagaatttatttttttctgtcataaattttgctaaggatctgcattttgagtagaatgaagtggccagatagttgaataatggtttggtgaatatctatatgtatatatgtatgtgtatgtgtgttacacatacatatttaatgacatgaagtactttggttgcttggaattggacagaaataacagtttttttttttttttgggacagagtcttgctctgtcacctaggctggagtgcaatggcgcgatctctgctcactgcaacttccacctcccaggttcaagtgattctcctgccgcagcctcccgagtagctgggattgcaggcgcctgccagcatgcccgccagcacgcctggctaatttttttttttgtatttttagtagagatggggtttcactatgttggccaggctggtcttggaactcctgatctcgtgatctgtgtgccttggcctcccaaagtgctgggattacaggcgtgagccaccgcgcctggccagaaataacagttttaataaatttcatgaaatcactttcttgtatgttaaaggaaacagaaagggttcatttgtgcatggtttagtctttcttttgaatgtggaagtttttcttcttatttgtgtgtctaaaaaaattaaaaagtgaaacattttcc

SEQ ID NO: 8918 - DNA, 1560 bp, Homo sapiens
ccatgggaatattgaattatagagttggacaggatagtcttatttattgttgcatagcacattgcaccagaatttaaggacttaagacaacaaacattatcttacagtttctgtgggttagaaatctgggtgcagcttagctgggtgcctgtggctcataaaagaggtggtagtcaagctgtcagttggggttgcagtcacatctggaagctctactggtggaagatctgtttctgaactcattcatgtggctcttgcagggttcagtttcctggggctcttggactgaagaaatcaattgttgctggctgttggccagaggcttttctcagttctttgccatatgggcctctccaaagggcaccacagtttggcatctgcctccctctgagcaaatgagtgagagaaggtgacacctaagaatttttataacctaatcttggaagtggtatctcattatttctgctatattctatttgttagaggctgcctaccacaaggactttagcttactttttaaagattgaagaaaaaaaagaagacagaaaaagaagaactcaaagatacacaaagtaatttgaaccaaggctcagaagtttttggagccgtgagggatacagcagtttggtcaatattgtcttaacatgcttcaaataaatcagatgttctcagtgcagctgagtcttggtgagcagacatgggaatccgaaggcagcagtataaagaaggctcagcaggctgttgccaataaagctttgactgaatctacgcttcccaaaccagttcagaagccacccaaaagtaatgttaacaataacccaggcagtataactccaactgtggaactgaatgggcttgctatgaaaaggggagagcctgccatctacaggccattagatccaaagccattcccaaattatagagctaattacaactttcggggcatgtacaatcagaggtttgtatgtcttttttggttttgttcttaattattattttatccatgttataaaagtttctcacactcaaaagagtattttcattgtaaatctaattgaccttgggcattgtgcatggaatttagataaagcaggttcacaaggaatatttaaattaataacttaaagaaacccagttttcaggaactagttttttttttttttcccctaccccacaaacgtaaaagatctgaaggaactagtttttattgtgtcatgagggccctgtatttgttgcagggaagaccaagtcttaaagtcatttcacagtttatagtgttgactttctcattcatttaccaagcagagctcagtttttttcttgatttgtctaaatacattagtgaacatgaatgtttgtaatttatagggaaaaaagaaaaaatgtaaataatgtaatcccagaatttgccaccttttatattttcatgtactttacattctttttttctttgcatttaaatatatttaaccaagttgaagttgtcctttatatgcagtttttgtagtactttatgaaggtatgatagacatacagtaaaatgtacaaatcttaagtata

SEQ ID NO: 8919 - DNA, 1194 bp, Homo sapiens
ccatgggaatattgaattatagagttggacaggatagtcttatttattgttgcatagcacattgcaccagaatttaaggacttaagacaacaaacattatcttacagtttctgtgggttagaaatctgggtgcagcttagctgggtgcctgtggctcataaaagaggtggtagtcaagctgtcagttggggttgcagtcacatctggaagctctactggtggaagatctgtttctgaactcattcatgtggctcttgcagggttcagtttcctggggctcttggactgaagaaatcaattgttgctggctgttggccagaggcttttctcagttctttgccatatgggcctctccaaagggcaccacagtttggcatctgcctccctctgagcaaatgagtgagagaaggtgacacctaagaatttttataacctaatcttggaagtggtatctcattatttctgctatattctatttgttagaggctgcctaccacaaggactttagcttactttttaaagattgaagaaaaaaaagaagacagaaaaagaagaactcaaagatacacaaagtaatttgaaccaaggctcagaagtttttggagccgtgagggatacagcagtttggtcaatattgtcttaacatgcttcaaataaatcagatgttctcagtgcagctgagtcttggtgagcagacatgggaatccgaaggcagcagtataaagaaggctcagcaggctgttgccaataaagctttgactgaatctacgcttcccaaaccagttcagaagccacccaaaagtaatgttaacaataacccaggcagtataactccaactgtggaactgaatgggcttgctatgaaaaggggagagcctgccatctacaggccattagatccaaagccattcccaaattatagagctaattacaactttcggggcatgtacaatcagagatgaagagttacctaagtcagtgttataagatgttccatggtaaaagggatttgaagacaaattttggaaatgctgcatactgtatctctcttgaagactcctaaaggtgtcatgaagaaaactgtttacctaagtggttcctaacactgactgaacatcaggctttcctgggcagctttaaaaattctgatgcccagactttatgtggactaattaaatcagaatttctggttgc

SEQ ID NO: 8920 - DNA, 2389 bp, Homo sapiens
  misc_feature (1613)..(1613): n is a, c, g, or t
  misc_feature (1622)..(1622): n is a, c, g, or t
agggagcgggggagcgccggggaggcgggcggaggcgggcggaggcggggggcggggagcccgaggggtggaagccggcggcggccgagcggggtcagttctctgtagtgtttgccaatgttggagccgtctgcaaagtgtccccggcaagaagaggctgcctaccacaaggactttagcttactttttaaagattgaagaaaaaaaagaagacagaaaaagaagaactcaaagatacacaaagtaatttgaaccaaggctcagaagtttttggagccgtgagggatacagcagtttggtcaatattgtcttaacatgcttcaaataaatcagcttctctccaagataaaatggcaaacccaaaagagaaaactgcaatgtgtctggtaaatgagttagcccgtttcaatagagtccaaccccagtataaacttctgaatgaaagagggcctgctcattcaaagatgttctcagtgcagctgagtcttggtgagcagacatgggaatccgaaggcagcagtataaagaaggctcagcaggctgttgccaataaagctttgactgaatctacgcttcccaaaccagttcagaagccacccaaaagtaatgttaacaataacccaggcagtataactccaactgtggaactgaatgggcttgctatgaaaaggggagagcctgccatctacaggccattagatccaaagccattcccaaattatagagctaattacaactttcggggcatgtacaatcagagatgaagagttacctaagtcagtgttataagatgttccatggtaaaagggatttgaagacaaattttggaaatgctgcatactgtatctctcttgaagactcctaaaggtgtcatgaagaaaactgtttacctaagtggttcctaacactgactgaacatcaggctttcctgggcagctttaaaaattctgatgcccagactttatgtggactaattaaatcagaatttctggttgcagaagcttgaaccgcactgttttttaaaacttccccaagtaattctatgtccagtcatttaaatactggtccccacaacccaaaacacattaccctctattaacatcaaagattatgagatggtttgaatagtcatagaacttttgaaagaagtaaagaagaagggaagaattacagttaaccacactccttaaggataattgttctggacagctagcttccccacattgctgagggttcacttttttttggaacctaaaactttacttagttcagtaattttggatagaaatatttctaaaagttatggcatatattttttatatccttaaatagaaaatgccacaattcttagcatgaagaatccttgctgttgactcattatcaaccttataaacaataagtattacaagcctcatgagatatgtacatggtttgtccttataccagataatcctagacatctgtttctagagtacccaagtgtgcttttagttactttccaaatcattgttgtcagtcagattgtcatcttatttcttgtttttgtcagtgcacctttgcatattgcttgctcctttctttgatgcttttcaattgctattatcttgaaaacngatattatngtttgaatttggggcaaagtaagagtagcagggctttaattacgccctaagatgtccccttaactgtggaaaacatcgagttttatctagttggtgaatttttttacttcagaatttatttttttctgtcataaattttgctaaggatctgcattttgagtagaatgaagtggccagatagttgaataatggtttggtgaatatctatatgtatatatgtatgtgtatgtgtgttacacatacatatttaatgacatgaagtactttggttgcttggaattggacagaaataacagtttttttttttttttgggacagagtcttgctctgtcacctaggctggagtgcaatggcgcgatctctgctcactgcaacttccacctcccaggttcaagtgattctcctgccgcagcctcccgagtagctgggattgcaggcgcctgccagcatgcccgccagcacgcctggctaatttttttttttgtatttttagtagagatggggtttcactatgttggccaggctggtcttggaactcctgatctcgtgatctgtgtgccttggcctcccaaagtgctgggattacaggcgtgagccaccgcgcctggccagaaataacagttttaataaatttcatgaaatcactttcttgtatgttaaaggaaacagaaagggttcatttgtgcatggtttagtctttcttttgaatgtggaagtttttcttcttatttgtgtgtctaaaaaaattaaaaagtgaaacattttcc

SEQ ID NO: 8921 - DNA, 176 bp, Homo sapiens
tttttttttttagaaagagagagggtttagattcctaaaggagtccgtatcccaaaagtcaagtctgaggtccaggtcctctctgaggctggtgaagataaaggaagaggtggaagaggaggaggaaaaggaggaggagaaatcttgaccagtccattacaaagataactggaaaa

SEQ ID NO: 8922 - DNA, 428 bp, Homo sapiens
acctcgtgatctgcccacctcggcctcccaaagtgctgggattacaggcgtgagccactgcaccaggctaattttttgtatttttagtagggatggggtttcaccgtgttagccaggatgggcttgaattagttttatctgtcataacacaaagcaaagtgttaggaagaagtcagtttttcagtagtataattgagctagagactttgcaaaaataaagggtttaggaaagggaactccatttatgaagcaactcaagccaggaattgtagcaagtattttccatgctatatattttatcagagaaatttcctggagaaatggcttgctgagtgtctgtagccagaaaatggcagagctgagatttgaaactaggtctttctgctagtgtctgttcctcgttaacattgtttccaagtacagacgcg

SEQ ID NO: 8923 - DNA, 3569 bp, Homo sapiens
agagaacaggtcccagataccgagtccgcaactccaaacatcgcgattaataggaggcctctggtctctgcctgccctgggtgctcatggaaccagctgctgctctgcacttctccctgccagcctccctcctcctcctcctgctcctcctccttctcagcctgtgtgcactggtctcagcccagtttactgtcgtggggccagctaatcccatcctggccatggtgggagaaaacactacattacgctgccatctgtcacccgagaaaaatgctgaggacatggaggtgcggtggttccggtctcagttctcccccgcagtgtttgtgtataagggtgggagagagagaacagaggagcagatggaggagtaccggggaagaatcacctttgtgagcaaagacatcaacaggggcagcgtggccctggtcatacataacgtcacagcccaggagaatgggatctaccgctgttacttccaagaaggcaggtcctacgatgaggccatcctacgcctcgtggtggcaggccttgggtctaagcccctcattgaaatcaaggcccaagaggatgggagcatctggctggagtgcatatctggagggtggtacccagagcccctcacagtgtggagggacccctacggtgaggttgtgcccgccctgaaggaggtttccatcgctgatgctgacggcctcttcatggtcaccacagctgtgatcatcagagacaagtatgtgaggaatgtgtcctgctctgtcaacaacaccctgctcggccaggagaaggaaactgtcatttttattccagaatcctttatgcccagcgcatctccctggatggtggccctagctgtcatcctgaccgcatctccctggatggtgtccatgactgtcatcctggctgttttcatcatcttcatggctgtcagcatctgttgcatcaagaaacttcaaagggaaaaaaagattctgtcaggggaaaagaaagttgaacaagaggaaaaagaaattgcacagcaacttcaagaagaattgcgatggagaagaacattcttacatgctgctgatgtggtcctggatccagacaccgctcatcccgagctcttcctgtcagaggaccggagaagtgtgaggcggggcccctacaggcagagagtgcctgacaacccagagagattcgacagtcagccttgtgtcctgggatgggagagcttcgcctcagggaaacattactgggaggtggaggtggaaaacgtgatggtgtggactgtgggggtctgcagacacagtgttgagaggaaaggggaggtcctgctgattcctcagaatggcttctggaccctggagatgtttggaaaccaataccgggccctgtcctcccctgagaggattctccctttgaaggagtccctttgccgggtgggcgtcttcctggactatgaagctggagatgtctccttctacaacatgagggacagatcacacatctacacatgtccccgttcagcctttactgtgcctgtgaggcccttcttcaggttagggtctgatgacagccccatcttcatctgccctgcactcacaggagccagtggggtcatggtgcctgaagagggcctgaaacttcacagagtggggacccaccagagcctatagaatcaattccttggactcacagccatgcagataagccctggccatctcagcagccaccgcacaacccccctaatgaaagacacgccctcctcccctctggtcacgtaagagaacatcttccagctgcctttttcacacccactccagccctctgccccagttttctcctcctcactagtctgtggctttagtagttcctttgcttgtaattatgggatgggatccaggcatagggaactagttgtttcatagctcccagtcaaaaagaaagtgagagaagctgttgggcagcgaacctactgtttaaaatcaggataaccacattaagcccaatatgccagttggcaccagatgctgtggacttggaatgaggccaacagggttcaccaggatgagagaggagagaggaatccacaggaccaccagaagggagagggaaccagatatgcagatcagagatagaggaagtggaaccagagagctgggagggaccaaggttgtaaggatggctaagtcccaccataagagctaaagggtcctgggagatgatggctcatttccacccaaccccaggatttccacagcacacacccacaggcctggacctgggatgaagatgaatgaagaacatggactcatgtggatgtggtttggctcagatgtccctgcaataaacaaggggtcagtacttagtccctgagtgtggttgaggtttgaggtcctggtcgagcagggcagtactggaccaggtctacgtcagcattcaggttcaatggggacaccagtggcttcaaacttcctgatctaattatgtttttagacacttagaagttattgaggactttaaagagcttttgtttatttgggttaatatttatgacatttgacattgaaacaaaaatttaaaatgttatcttttaatttatgttaaaatagcattaataaatcagttataggttaatgtagataggatgttttgtgaaaaagcaatctattgtgtccaaataaaaaaacaaaaagtgtgacactggttaactttttccagatctcatgtctggcttaataagagatatttgtattatcatatctgcctttgtattaaacctattggtatatcataggtcatgttagctcaaaaaaactttactgcacactactgagagaatgagatgaaaaacgattaatgtttcattattattattgtgaaaatattattaacactggggactccttaagagtacatcagagttctctctaggaatcccaaaaccacattttgaaactagaatagtggatcctggaagttaatccatgtgctggttaattttagatgtcaacctgactggattaaggaatacctagacagctggtacaacattatttctgggtgtgtctgtgagtgtgtttccagaagagattggcaagtgagtcagtgggaaattctctccttctgttggctgggtgcccaatacaacaaaaaggcagaggaaaggcaaattcttctctcctctggagctgagacactcttcttcttctgcccttggacatcagaactcctggctctccggcctttgaacttcaggacttgtaccaggaggccctgggttctcaggcctttggctttggactgagagttacacaatcagcttccctggttctgaggctttcagacttaaactgagccatgctaccagcatcccagggtctccagcctacagatgagctgttgtgcgatttcttagcctccataatcacatgagccaatctccttaataaatgcctgctcatagatctgtatctacatctatatctgtatgtgcatctatatctatgcctatatctatatctatatcatattgattttgtctctctggagaaccctgactaataaaatgaggcatctaaaattct

SEQ ID NO: 8924 - DNA, 3221 bp, Homo sapiens
agagaacaggtcccagataccgagtccgcaactccaaacatcgcgattaataggaggcctctggtctctgcctgccctgggtgctcatggaaccagctgctgctctgcacttctccctgccagcctccctcctcctcctcctgctcctcctccttctcagcctgtgtgcactggtctcaggccttgggtctaagcccctcattgaaatcaaggcccaagaggatgggagcatctggctggagtgcatatctggagggtggtacccagagcccctcacagtgtggagggacccctacggtgaggttgtgcccgccctgaaggaggtttccatcgctgatgctgacggcctcttcatggtcaccacagctgtgatcatcagagacaagtatgtgaggaatgtgtcctgctctgtcaacaacaccctgctcggccaggagaaggaaactgtcatttttattccagaatcctttatgcccagcgcatctccctggatggtggccctagctgtcatcctgaccgcatctccctggatggtgtccatgactgtcatcctggctgttttcatcatcttcatggctgtcagcatctgttgcatcaagaaacttcaaagggaaaaaaagattctgtcaggggaaaagaaagttgaacaagaggaaaaagaaattgcacagcaacttcaagaagaattgcgatggagaagaacattcttacatgctgctgatgtggtcctggatccagacaccgctcatcccgagctcttcctgtcagaggaccggagaagtgtgaggcggggcccctacaggcagagagtgcctgacaacccagagagattcgacagtcagccttgtgtcctgggatgggagagcttcgcctcagggaaacattactgggaggtggaggtggaaaacgtgatggtgtggactgtgggggtctgcagacacagtgttgagaggaaaggggaggtcctgctgattcctcagaatggcttctggaccctggagatgtttggaaaccaataccgggccctgtcctcccctgagaggattctccctttgaaggagtccctttgccgggtgggcgtcttcctggactatgaagctggagatgtctccttctacaacatgagggacagatcacacatctacacatgtccccgttcagcctttactgtgcctgtgaggcccttcttcaggttagggtctgatgacagccccatcttcatctgccctgcactcacaggagccagtggggtcatggtgcctgaagagggcctgaaacttcacagagtggggacccaccagagcctatagaatcaattccttggactcacagccatgcagataagccctggccatctcagcagccaccgcacaacccccctaatgaaagacacgccctcctcccctctggtcacgtaagagaacatcttccagctgcctttttcacacccactccagccctctgccccagttttctcctcctcactagtctgtggctttagtagttcctttgcttgtaattatgggatgggatccaggcatagggaactagttgtttcatagctcccagtcaaaaagaaagtgagagaagctgttgggcagcgaacctactgtttaaaatcaggataaccacattaagcccaatatgccagttggcaccagatgctgtggacttggaatgaggccaacagggttcaccaggatgagagaggagagaggaatccacaggaccaccagaagggagagggaaccagatatgcagatcagagatagaggaagtggaaccagagagctgggagggaccaaggttgtaaggatggctaagtcccaccataagagctaaagggtcctgggagatgatggctcatttccacccaaccccaggatttccacagcacacacccacaggcctggacctgggatgaagatgaatgaagaacatggactcatgtggatgtggtttggctcagatgtccctgcaataaacaaggggtcagtacttagtccctgagtgtggttgaggtttgaggtcctggtcgagcagggcagtactggaccaggtctacgtcagcattcaggttcaatggggacaccagtggcttcaaacttcctgatctaattatgtttttagacacttagaagttattgaggactttaaagagcttttgtttatttgggttaatatttatgacatttgacattgaaacaaaaatttaaaatgttatcttttaatttatgttaaaatagcattaataaatcagttataggttaatgtagataggatgttttgtgaaaaagcaatctattgtgtccaaataaaaaaacaaaaagtgtgacactggttaactttttccagatctcatgtctggcttaataagagatatttgtattatcatatctgcctttgtattaaacctattggtatatcataggtcatgttagctcaaaaaaactttactgcacactactgagagaatgagatgaaaaacgattaatgtttcattattattattgtgaaaatattattaacactggggactccttaagagtacatcagagttctctctaggaatcccaaaaccacattttgaaactagaatagtggatcctggaagttaatccatgtgctggttaattttagatgtcaacctgactggattaaggaatacctagacagctggtacaacattatttctgggtgtgtctgtgagtgtgtttccagaagagattggcaagtgagtcagtgggaaattctctccttctgttggctgggtgcccaatacaacaaaaaggcagaggaaaggcaaattcttctctcctctggagctgagacactcttcttcttctgcccttggacatcagaactcctggctctccggcctttgaacttcaggacttgtaccaggaggccctgggttctcaggcctttggctttggactgagagttacacaatcagcttccctggttctgaggctttcagacttaaactgagccatgctaccagcatcccagggtctccagcctacagatgagctgttgtgcgatttcttagcctccataatcacatgagccaatctccttaataaatgcctgctcatagatctgtatctacatctatatctgtatgtgcatctatatctatgcctatatctatatctatatcatattgattttgtctctctggagaaccctgactaataaaatgaggcatctaaaattct

SEQ ID NO: 8925 - DNA, 2785 bp, Homo sapiens
  misc_feature (1167)..(1167): n is a, c, g, or t
agagaacaggtcccagataccgagtccgcaactccaaacatcgcgattaataggaggtgaacacagcttttctcttctctttgggatgctttgttgtctggtggtgactgtgcccatgggtgagttgtatcggaaaatcgtcatgtgaggatcagaggggaaaagaaaacagaaggcctctggtctctgcctgccctgggtgctcatggaaccagctgctgctctgcacttctccctgccagcctccctcctcctcctcctgctcctcctccttctcagcctgtgtgcactggtctcagcccagtttactgtcgtggggccagctaatcccatcctggccatggtgggagaaaacactacattacgctgccatctgtcacccgagaaaaatgctgaggacatggaggtgcggtggttccggtctcagttctcccccgcagtgtttgtgtataagggtgggagagagagaacagaggagcagatggaggagtaccggggaagaatcacctttgtgagcaaagacatcaacaggggcagcgtggccctggtcatacataacgtcacagcccaggagaatgggatctaccgctgttacttccaagaaggcaggtcctacgatgaggccatcctacgcctcgtggtggcaggccttgggtctaagcccctcattgaaatcaaggcccaagaggatgggagcatctggctggagtgcatatctggagggtggtacccagagcccctcacagtgtggagggacccctacggtgaggttgtgcccgccctgaaggaggtttccatcgctgatgctgacggcctcttcatggtcaccacagctgtgatcatcagagacaagtatgtgaggaatgtgtcctgctctgtcaacaacaccctgctcggccaggagaaggaaactgtcatttttattccagaatcctttatgcccagcgcatctccctggatggtggccctagctgtcatcctgaccgcatctccctggatggtgtccatgactgtcatcctggctgttttcatcatcttcatggctgtcagcatctgttgcatcaagaaacttcaaagggaaaaaaagattctgtcaggggaaaagaaagttgaacaagaggaaaaagaaattgcacagcaacttcaagaagaattgcgatggagaanactgatgtggtcctggatccagacaccgctcatcccgagctcttcctgtcagaggaccggagaagtgtgaggcggggcccctacaggcagagagtgcctgacaacccagagagattcgacagtcagccttgtgtcctgggatgggagagcttcgcctcagggaaacattactgggaggtggaggtggaaaacgtgatggtgtggactgtgggggtctgcagacacagtgttgagaggaaaggggaggtcctgctgattcctcagaatggcttctggaccctggagatgtttggaaaccaataccgggccctgtcctcccctgagaggattctccctttgaaggagtccctttgccgggtgggcgtcttcctggactatgaagctggagatgtctccttctacaacatgagggacagatcacacatctacacatgtccccgttcagcctttactgtgcctgtgaggcccttcttcaggttagggtctgatgacagccccatcttcatctgccctgcactcacaggagccagtggggtcatggtgcctgaagagggcctgaaacttcacagagtggggacccaccagagcctatagaatcaattccttggactcacagccatgcagataagccctggccatctcagcagccaccgcacaacccccctaatgaaagacacgccctcctcccctctggtcacgtaagagaacatcttccagctgcctttttcacacccactccagccctctgccccagttttctcctcctcactagtctgtggctttagtagttcctttgcttgtaattatgggatgggatccaggcatagggaactagttgtttcatagctcccagtcaaaaagaaagtgagagaagctgttgggcagcgaacctactgtttaaaatcaggataaccacattaagcccaatatgccagttggcaccagatgctgtggacttggaatgaggccaacagggttcaccaggatgagagaggagagaggaatccacaggaccaccagaagggagagggaaccagatatgcagatcagagatagaggaagtggaaccagagagctgggagggaccaaggttgtaaggatggctaagtcccaccataagagctaaagggtcctgggagatgatggctcatttccacccaaccccaggatttccacagcacacacccacaggcctggacctgggatgaagatgaatgaagaacatggactcatgtggatgtggtttggctcagatgtccctgcaataaacaaggggtcagtacttagtccctgagtgtggttgaggtttgaggtcctggtcgagcagggcagtactggaccaggtctacgtcagcattcaggttcaatggggacaccagtggcttcaaacttcctgatctaattatgtttttagacacttagaagttattgaggactttaaagagcttttgtttatttgggttaatatttatgacatttgacattgaaacaaaaatttaaaatgttatcttttaatttatgttaaaatagcattaataaatcagttataggttaatgtagataggatgttttgtgaaaaagcaatctattgtgtccaaataaaaaaacaaaaagtgtg

SEQ ID NO: 8926 - DNA, 3508 bp, Homo sapiens
gcctcgcctggctttacctcgagtgtcccgacctgggtctcggggagggggaagtggagggacgagggtgtgaaagaatccagggacaactgaagaaaccggactgtggcccgagaagtgggaagaggaaggaggaaaacggcccccttgatctctgcattgatggcttacttatggaatgtttacggaatccctctttcggagatacctgagccttgagatgcaagcgactcccagaagttggggcaccgatgagacctacttgagtgacaggagaggttgggcccgaccagcactgaggtgccaagactcctaggctgattctcctcctctgtaaccctaggcctctggtctctgcctgccctgggtgctcatggaaccagctgctgctctgcacttctccctgccagcctccctcctcctcctcctgctcctcctccttctcagcctgtgtgcactggtctcaggccttgggtctaagcccctcattgaaatcaaggcccaagaggatgggagcatctggctggagtgcatatctggagggtggtacccagagcccctcacagtgtggagggacccctacggtgaggttgtgcccgccctgaaggaggtttccatcgctgatgctgacggcctcttcatggtcaccacagctgtgatcatcagagacaagtatgtgaggaatgtgtcctgctctgtcaacaacaccctgctcggccaggagaaggaaactgtcatttttattccagaatcctttatgcccagcgcatctccctggatggtggccctagctgtcatcctgaccgcatctccctggatggtgtccatgactgtcatcctggctgttttcatcatcttcatggctgtcagcatctgttgcatcaagaaacttcaaagggaaaaaaagattctgtcaggggaaaagaaagttgaacaagaggaaaaagaaattgcacagcaacttcaagaagaattgcgatggagaagaacattcttacatgctgctgatgtggtcctggatccagacaccgctcatcccgagctcttcctgtcagaggaccggagaagtgtgaggcggggcccctacaggcagagagtgcctgacaacccagagagattcgacagtcagccttgtgtcctgggatgggagagcttcgcctcagggaaacattactgggaggtggaggtggaaaacgtgatggtgtggactgtgggggtctgcagacacagtgttgagaggaaaggggaggtcctgctgattcctcagaatggcttctggaccctggagatgtttggaaaccaataccgggccctgtcctcccctgagaggattctccctttgaaggagtccctttgccgggtgggcgtcttcctggactatgaagctggagatgtctccttctacaacatgagggacagatcacacatctacacatgtccccgttcagcctttactgtgcctgtgaggcccttcttcaggttagggtctgatgacagccccatcttcatctgccctgcactcacaggagccagtggggtcatggtgcctgaagagggcctgaaacttcacagagtggggacccaccagagcctatagaatcaattccttggactcacagccatgcagataagccctggccatctcagcagccaccgcacaacccccctaatgaaagacacgccctcctcccctctggtcacgtaagagaacatcttccagctgcctttttcacacccactccagccctctgccccagttttctcctcctcactagtctgtggctttagtagttcctttgcttgtaattatgggatgggatccaggcatagggaactagttgtttcatagctcccagtcaaaaagaaagtgagagaagctgttgggcagcgaacctactgtttaaaatcaggataaccacattaagcccaatatgccagttggcaccagatgctgtggacttggaatgaggccaacagggttcaccaggatgagagaggagagaggaatccacaggaccaccagaagggagagggaaccagatatgcagatcagagatagaggaagtggaaccagagagctgggagggaccaaggttgtaaggatggctaagtcccaccataagagctaaagggtcctgggagatgatggctcatttccacccaaccccaggatttccacagcacacacccacaggcctggacctgggatgaagatgaatgaagaacatggactcatgtggatgtggtttggctcagatgtccctgcaataaacaaggggtcagtacttagtccctgagtgtggttgaggtttgaggtcctggtcgagcagggcagtactggaccaggtctacgtcagcattcaggttcaatggggacaccagtggcttcaaacttcctgatctaattatgtttttagacacttagaagttattgaggactttaaagagcttttgtttatttgggttaatatttatgacatttgacattgaaacaaaaatttaaaatgttatcttttaatttatgttaaaatagcattaataaatcagttataggttaatgtagataggatgttttgtgaaaaagcaatctattgtgtccaaataaaaaaacaaaaagtgtgacactggttaactttttccagatctcatgtctggcttaataagagatatttgtattatcatatctgcctttgtattaaacctattggtatatcataggtcatgttagctcaaaaaaactttactgcacactactgagagaatgagatgaaaaacgattaatgtttcattattattattgtgaaaatattattaacactggggactccttaagagtacatcagagttctctctaggaatcccaaaaccacattttgaaactagaatagtggatcctggaagttaatccatgtgctggttaattttagatgtcaacctgactggattaaggaatacctagacagctggtacaacattatttctgggtgtgtctgtgagtgtgtttccagaagagattggcaagtgagtcagtgggaaattctctccttctgttggctgggtgcccaatacaacaaaaaggcagaggaaaggcaaattcttctctcctctggagctgagacactcttcttcttctgcccttggacatcagaactcctggctctccggcctttgaacttcaggacttgtaccaggaggccctgggttctcaggcctttggctttggactgagagttacacaatcagcttccctggttctgaggctttcagacttaaactgagccatgctaccagcatcccagggtctccagcctacagatgagctgttgtgcgatttcttagcctccataatcacatgagccaatctccttaataaatgcctgctcatagatctgtatctacatctatatctgtatgtgcatctatatctatgcctatatctatatctatatcatattgattttgtctctctggagaaccctgactaataaaatgaggcatctaaaattct

SEQ ID NO: 8927 - DNA, 3632 bp, Homo sapiens
agagaacaggtcccagataccgagtccgcaactccaaacatcgcgattaataggaggtgaacacagcttttctcttctctttgggatgctttgttgtctggtggtgactgtgcccatgggcctctggtctctgcctgccctgggtgctcatggaaccagctgctgctctgcacttctccctgccagcctccctcctcctcctcctgctcctcctccttctcagcctgtgtgcactggtctcagcccagtttactgtcgtggggccagctaatcccatcctggccatggtgggagaaaacactacattacgctgccatctgtcacccgagaaaaatgctgaggacatggaggtgcggtggttccggtctcagttctcccccgcagtgtttgtgtataagggtgggagagagagaacagaggagcagatggaggagtaccggggaagaatcacctttgtgagcaaagacatcaacaggggcagcgtggccctggtcatacataacgtcacagcccaggagaatgggatctaccgctgttacttccaagaaggcaggtcctacgatgaggccatcctacgcctcgtggtggcaggccttgggtctaagcccctcattgaaatcaaggcccaagaggatgggagcatctggctggagtgcatatctggagggtggtacccagagcccctcacagtgtggagggacccctacggtgaggttgtgcccgccctgaaggaggtttccatcgctgatgctgacggcctcttcatggtcaccacagctgtgatcatcagagacaagtatgtgaggaatgtgtcctgctctgtcaacaacaccctgctcggccaggagaaggaaactgtcatttttattccagaatcctttatgcccagcgcatctccctggatggtggccctagctgtcatcctgaccgcatctccctggatggtgtccatgactgtcatcctggctgttttcatcatcttcatggctgtcagcatctgttgcatcaagaaacttcaaagggaaaaaaagattctgtcaggggaaaagaaagttgaacaagaggaaaaagaaattgcacagcaacttcaagaagaattgcgatggagaagaacattcttacatgctgctgatgtggtcctggatccagacaccgctcatcccgagctcttcctgtcagaggaccggagaagtgtgaggcggggcccctacaggcagagagtgcctgacaacccagagagattcgacagtcagccttgtgtcctgggatgggagagcttcgcctcagggaaacattactgggaggtggaggtggaaaacgtgatggtgtggactgtgggggtctgcagacacagtgttgagaggaaaggggaggtcctgctgattcctcagaatggcttctggaccctggagatgtttggaaaccaataccgggccctgtcctcccctgagaggattctccctttgaaggagtccctttgccgggtgggcgtcttcctggactatgaagctggagatgtctccttctacaacatgagggacagatcacacatctacacatgtccccgttcagcctttactgtgcctgtgaggcccttcttcaggttagggtctgatgacagccccatcttcatctgccctgcactcacaggagccagtggggtcatggtgcctgaagagggcctgaaacttcacagagtggggacccaccagagcctatagaatcaattccttggactcacagccatgcagataagccctggccatctcagcagccaccgcacaacccccctaatgaaagacacgccctcctcccctctggtcacgtaagagaacatcttccagctgcctttttcacacccactccagccctctgccccagttttctcctcctcactagtctgtggctttagtagttcctttgcttgtaattatgggatgggatccaggcatagggaactagttgtttcatagctcccagtcaaaaagaaagtgagagaagctgttgggcagcgaacctactgtttaaaatcaggataaccacattaagcccaatatgccagttggcaccagatgctgtggacttggaatgaggccaacagggttcaccaggatgagagaggagagaggaatccacaggaccaccagaagggagagggaaccagatatgcagatcagagatagaggaagtggaaccagagagctgggagggaccaaggttgtaaggatggctaagtcccaccataagagctaaagggtcctgggagatgatggctcatttccacccaaccccaggatttccacagcacacacccacaggcctggacctgggatgaagatgaatgaagaacatggactcatgtggatgtggtttggctcagatgtccctgcaataaacaaggggtcagtacttagtccctgagtgtggttgaggtttgaggtcctggtcgagcagggcagtactggaccaggtctacgtcagcattcaggttcaatggggacaccagtggcttcaaacttcctgatctaattatgtttttagacacttagaagttattgaggactttaaagagcttttgtttatttgggttaatatttatgacatttgacattgaaacaaaaatttaaaatgttatcttttaatttatgttaaaatagcattaataaatcagttataggttaatgtagataggatgttttgtgaaaaagcaatctattgtgtccaaataaaaaaacaaaaagtgtgacactggttaactttttccagatctcatgtctggcttaataagagatatttgtattatcatatctgcctttgtattaaacctattggtatatcataggtcatgttagctcaaaaaaactttactgcacactactgagagaatgagatgaaaaacgattaatgtttcattattattattgtgaaaatattattaacactggggactccttaagagtacatcagagttctctctaggaatcccaaaaccacattttgaaactagaatagtggatcctggaagttaatccatgtgctggttaattttagatgtcaacctgactggattaaggaatacctagacagctggtacaacattatttctgggtgtgtctgtgagtgtgtttccagaagagattggcaagtgagtcagtgggaaattctctccttctgttggctgggtgcccaatacaacaaaaaggcagaggaaaggcaaattcttctctcctctggagctgagacactcttcttcttctgcccttggacatcagaactcctggctctccggcctttgaacttcaggacttgtaccaggaggccctgggttctcaggcctttggctttggactgagagttacacaatcagcttccctggttctgaggctttcagacttaaactgagccatgctaccagcatcccagggtctccagcctacagatgagctgttgtgcgatttcttagcctccataatcacatgagccaatctccttaataaatgcctgctcatagatctgtatctacatctatatctgtatgtgcatctatatctatgcctatatctatatctatatcatattgattttgtctctctggagaaccctgactaataaaatgaggcatctaaaattct

SEQ ID NO: 8928 - DNA, 2923 bp, Homo sapiens
  misc_feature (418)..(418): n is a, c, g, or t
agagaacaggtcccagataccgagtccgcaactccaaacatcgcgattaataggaggcctctggtctctgcctgccctgggtgctcatggaaccagctgctgctctgcacttctccctgccagcctccctcctcctcctcctgctcctcctccttctcagcctgtgtgcactggtctcagaatcctttatgcccagcgcatctccctggatggtggccctagctgtcatcctgaccgcatctccctggatggtgtccatgactgtcatcctggctgttttcatcatcttcatggctgtcagcatctgttgcatcaagaaacttcaaagggaaaaaaagattctgtcaggggaaaagaaagttgaacaagaggaaaaagaaattgcacagcaacttcaagaagaattgcgatggagaanactgatgtggtcctggatccagacaccgctcatcccgagctcttcctgtcagaggaccggagaagtgtgaggcggggcccctacaggcagagagtgcctgacaacccagagagattcgacagtcagccttgtgtcctgggatgggagagcttcgcctcagggaaacattactgggaggtggaggtggaaaacgtgatggtgtggactgtgggggtctgcagacacagtgttgagaggaaaggggaggtcctgctgattcctcagaatggcttctggaccctggagatgtttggaaaccaataccgggccctgtcctcccctgagaggattctccctttgaaggagtccctttgccgggtgggcgtcttcctggactatgaagctggagatgtctccttctacaacatgagggacagatcacacatctacacatgtccccgttcagcctttactgtgcctgtgaggcccttcttcaggttagggtctgatgacagccccatcttcatctgccctgcactcacaggagccagtggggtcatggtgcctgaagagggcctgaaacttcacagagtggggacccaccagagcctatagaatcaattccttggactcacagccatgcagataagccctggccatctcagcagccaccgcacaacccccctaatgaaagacacgccctcctcccctctggtcacgtaagagaacatcttccagctgcctttttcacacccactccagccctctgccccagttttctcctcctcactagtctgtggctttagtagttcctttgcttgtaattatgggatgggatccaggcatagggaactagttgtttcatagctcccagtcaaaaagaaagtgagagaagctgttgggcagcgaacctactgtttaaaatcaggataaccacattaagcccaatatgccagttggcaccagatgctgtggacttggaatgaggccaacagggttcaccaggatgagagaggagagaggaatccacaggaccaccagaagggagagggaaccagatatgcagatcagagatagaggaagtggaaccagagagctgggagggaccaaggttgtaaggatggctaagtcccaccataagagctaaagggtcctgggagatgatggctcatttccacccaaccccaggatttccacagcacacacccacaggcctggacctgggatgaagatgaatgaagaacatggactcatgtggatgtggtttggctcagatgtccctgcaataaacaaggggtcagtacttagtccctgagtgtggttgaggtttgaggtcctggtcgagcagggcagtactggaccaggtctacgtcagcattcaggttcaatggggacaccagtggcttcaaacttcctgatctaattatgtttttagacacttagaagttattgaggactttaaagagcttttgtttatttgggttaatatttatgacatttgacattgaaacaaaaatttaaaatgttatcttttaatttatgttaaaatagcattaataaatcagttataggttaatgtagataggatgttttgtgaaaaagcaatctattgtgtccaaataaaaaaacaaaaagtgtgacactggttaactttttccagatctcatgtctggcttaataagagatatttgtattatcatatctgcctttgtattaaacctattggtatatcataggtcatgttagctcaaaaaaactttactgcacactactgagagaatgagatgaaaaacgattaatgtttcattattattattgtgaaaatattattaacactggggactccttaagagtacatcagagttctctctaggaatcccaaaaccacattttgaaactagaatagtggatcctggaagttaatccatgtgctggttaattttagatgtcaacctgactggattaaggaatacctagacagctggtacaacattatttctgggtgtgtctgtgagtgtgtttccagaagagattggcaagtgagtcagtgggaaattctctccttctgttggctgggtgcccaatacaacaaaaaggcagaggaaaggcaaattcttctctcctctggagctgagacactcttcttcttctgcccttggacatcagaactcctggctctccggcctttgaacttcaggacttgtaccaggaggccctgggttctcaggcctttggctttggactgagagttacacaatcagcttccctggttctgaggctttcagacttaaactgagccatgctaccagcatcccagggtctccagcctacagatgagctgttgtgcgatttcttagcctccataatcacatgagccaatctccttaataaatgcctgctcatagatctgtatctacatctatatctgtatgtgcatctatatctatgcctatatctatatctatatcatattgattttgtctctctggagaaccctgactaataaaatgaggcatctaaaattct

SEQ ID NO: 8929 - DNA, 1443 bp, Homo sapiens
  misc_feature (1167)..(1167): n is a, c, g, or t
agagaacaggtcccagataccgagtccgcaactccaaacatcgcgattaataggaggtgaacacagcttttctcttctctttgggatgctttgttgtctggtggtgactgtgcccatgggtgagttgtatcggaaaatcgtcatgtgaggatcagaggggaaaagaaaacagaaggcctctggtctctgcctgccctgggtgctcatggaaccagctgctgctctgcacttctccctgccagcctccctcctcctcctcctgctcctcctccttctcagcctgtgtgcactggtctcagcccagtttactgtcgtggggccagctaatcccatcctggccatggtgggagaaaacactacattacgctgccatctgtcacccgagaaaaatgctgaggacatggaggtgcggtggttccggtctcagttctcccccgcagtgtttgtgtataagggtgggagagagagaacagaggagcagatggaggagtaccggggaagaatcacctttgtgagcaaagacatcaacaggggcagcgtggccctggtcatacataacgtcacagcccaggagaatgggatctaccgctgttacttccaagaaggcaggtcctacgatgaggccatcctacgcctcgtggtggcaggccttgggtctaagcccctcattgaaatcaaggcccaagaggatgggagcatctggctggagtgcatatctggagggtggtacccagagcccctcacagtgtggagggacccctacggtgaggttgtgcccgccctgaaggaggtttccatcgctgatgctgacggcctcttcatggtcaccacagctgtgatcatcagagacaagtatgtgaggaatgtgtcctgctctgtcaacaacaccctgctcggccaggagaaggaaactgtcatttttattccagaatcctttatgcccagcgcatctccctggatggtggccctagctgtcatcctgaccgcatctccctggatggtgtccatgactgtcatcctggctgttttcatcatcttcatggctgtcagcatctgttgcatcaagaaacttcaaagggaaaaaaagattctgtcaggggaaaagaaagttgaacaagaggaaaaagaaattgcacagcaacttcaagaagaattgcgatggagaanagtctacgtcagcattcaggttcaatggggacaccagtggcttcaaacttcctgatctaattatgtttttagacacttagaagttattgaggactttaaagagcttttgtttatttgggttaatatttatgacatttgacattgaaacaaaaatttaaaatgttatcttttaatttatgttaaaatagcattaataaatcagttataggttaatgtagataggatgttttgtgaaaaagcaatctattgtgtccaaataaaaaaacaaaaagtgtg

SEQ ID NO: 8930 - DNA, 791 bp, Homo sapiens
gaagagaggtggcatggtgggagggtacatttgagttgtcaacagtctctgcagtgtcaggtcaattacatcagcacttggactggaccagggaaaggaatgattctgcttcctgggaatgtcagaaggacctgatgattatatttggcaaagccaggaggagtggctttgaatgtcattgctaagaattacactttgagtagcatttctggatgtctgagcttttcaaatgatacttcttttctgctgtggctttcctttctgttggactggttcccagagggtcctcttgtttgtccttgccctcgcttttatatcagttcatgttttctcttctgtcatcttccttcccagcgctgtttctccaccccctcctgctgcactcacaacagcttcccctctcctgtttagaggtggaagcatgtaagaatgcgtttgagggggatgcttgccaaaggacagcatattcaacatctggtatcaacaaggtaatgtttaaccttagactagccaaactagtgatgacctgcttccatgctgcatctgctgctttttgtgttgatgggactcagaaatcatgagaaaggtcttcagtgatccatgactgcaacaaattcttttcctaattgtgccgtatattatgcccctcaatacaacttactaatctctgcctcagtttctccatctgtgaaagtggtgtaatacttatctacctcccttgaatgttgtgaagattagtatatgttggtaaagcacttttaaaataaagaatgatataaagcaaaaaaaag

SEQ ID NO: 8931 - DNA, 438 bp, Homo sapiens
gaagagaggtggcatggtgggagggtacatttgagttgtcaacagtctctgcagtgtcaggtcaattacatcagcacttggactggaccagggaaaggaatgattctgcttcctgggaatgtcagaaggacctgatgattatatttggcaaagccaggaggagtggctttgaatgtcattgctaagaattacactttgagtagcatttctggatgtctgagcttttcaaatgatacttcttttctgctgtggctttcctttctgttggactggttcccagagggtcctcttgtttgtccttgccctcgcttttatatcagttcatgttttctcttctcttgtttttttgttttttcttctgggggggggtctagaacagtgcctggcacatagtaggcgctcaataaaacttgtttgttgacatctcgtctcttctga

SEQ ID NO: 8932 - DNA, 408 bp, Homo sapiens
gcaggaagaaattgagaggcaacacagatttctattcctggaaatatggcagttaggttatttgaacaatcttcttgctgaaaaataattgaaactgttgagtatgtataagaaaacatcctcagagcagcaaagggctgaaaagagaaggaattaaaggctaaagtctgaaggcaagtgaaaattcagaaagaagtggagaactgaaactttttgcgcttaacgtagaattcagcacaatgatttggaggtggtgaggtcagggagtttctagggtgctcagaagtttctagttatagacctggtggtagctgtacgggataattattttctaaatttaaagtatgtattttgtgcacttttctatgtacatgttataatttacaacaaaggattaaatgtaaaagg

SEQ ID NO: 8933 - DNA, 447 bp, Homo sapiens
tctttcattcactcactcactctttcacaacacaaatgtctgtccagcacctactctgtgtcaggcaggaagtgcagggtgtggccctgaccttgatcaactcacaatctgggctcccacagctgcacacatgtgacaggccgaagttctgaagaggcacagggagcaaaatgtgtgaggctgagtagcgctgattccagctctgccacttggtagcaatgtggccttggactctgatcattggacaagccacctaggcaggacttggtgccactgtcttgctgccataagggcattccccactcaattcctggctcttcacactaaacaaagatactaccatcttaagtatcaattgcttcaactgcaaaatggagataaaatgcctaaaagtgactcctatgaaaactgaggctgtccgtgtgaagatcctggcacacagcaaat

SEQ ID NO: 8934 - DNA, 532 bp, Homo sapiens
agccaaggaatgtcaaagacggccagcacaccaccagaagctagcagagaggtatggaacagattcttcttcacaacctcagagggaaaaccctgctgatacctggatttcaaactcctggcctccagaacgaagtccctggagagaggacgtgatgtctgaagctatggcagccatcttgtaactatgaggccacaaacaagaaaagcaaaaaccagagtgaagcatggcagagcagaaagatggaaagaacctggatacataagagtgtcactgtgcagctgtacccaccctagactgcatatacctggactttaagtaaatgacaaatatcctttattctatctcaagccattgcttcttcatcttttttgtgtcatgacaatcacagtgggcggtaatatttgtactgccctctggggaacacagaggagactgctggcacctgaggtgaactatgctgggggcttcagctgccccaggactcctccctaccttgaagcctgaggggatacatatctctctgcacatc

SEQ ID NO: 8935 - DNA, 2769 bp, Homo sapiens
gtcaagatgagaagtctgtcaatgatgcttcctcagtttcagcatcccaaagaatttcttgtattcctaaaacccatatttctaataagtatgggaataatttcctccaggaagcacacatgagagaaaaatctttccaatgtaatgagagtggcaaagcctttaattgtagctcactgttaaaaaaatgtcagataatccatttaggagagaaaaaatataaatgtgatatatgtggcaaggtctttaatcagaagcgataccttgcataccatcatagatgtcacactggtgagaaaccttacaagtgtaatcagtgtggcaagaccttcagttacaagtcatcccttgtaattcacaaggcaattcatactggagagaaacctcacaagtgtaatgaatgtggcaaggtttttaatcaaaaagcatatcttgcaagtcatcatagacttcatactggagagaaaccttacaaatgtgaagaatgtgacaaagtttttagtcgctaatcacaccttgaaagacataggagaattcatactggagagaaaccgtacaaatgtaaggtttgtgacaaggctttcagacgtgattcacacctggcacaacatattgtaattcacactggagagaaaccttacaagtgtaatgagtgtggcaagacctttgttcaaaattcatctcttgtaatgcataaggtcattcatactggagagaaatgttacaagtgtaatgaatgtggcaaggtttttaatcacaaatcaaaccttgcatgtcatcatagacttcatactggagagaaaccttacaagtgtaatgaatgtggcaaggtttttaattgaaaatcaaaccttgaacatcatcatagagttcatatcggagaaaaaccttacaaatgtgaagaatgtgacaaagttttcaatttcaattcacgccttgaaatacataggagagttcatactggagagaaaccatagaaatgtaaggtttgtgacaaggcattcgggtgtgattcacacctggcacaacatactagaattcacactggagagaaaccgtgcaagtgtgatgagtgtgacagagccttcagtggtcagtcaacacttattcaccatcaagcaatccatgtcatagggaaactttactaatgtaatgattgtcacaaagtcctcagtaatgctacaaccattgcaaattattggagaatgcataatgaagtgagaacttacaagtgttataaatgtggcaaatttttcagacttcgttcataccttgcagtttatcagcgaactcatactggagagaaaccttacaaatgtgatgattgtggcaaggtcttcagtcaagcttcatcttatgcaaaacacaggtgaattcatacaagaaagaaacctcacaagggtgatgattgtgtcaaagcctttatttcaggttcatgcctcattacacatcagagaatccatactagacagagatcttacaaaagtcatatgtgtggcaagatctttagtctgaggtcactccttgcaggacatcaggaaattcatttttgaggtaataatttcaaatgcaatgagtatagcaaaccatcaagcacaattgatgttagattcaaatcagcattgagttcagtttgagttgacttaacattgagttcaagtatttgttgagattaaagtgtttatgttaagaggattaggccaggtgcggtggctcacacctgtaatcccagcactttgggaggccaagacaggtagatcacttgagatcaggagtttgagagcagcctggccaacagaggtgagcacctttcccagtctgttttttgtttcttcaacaaaaactgatagagatttttatgggtattgtgttgaatcaaaatcacattgggttatgtaatcatttaacagtattaatttttccaaaacatcaatatgggttatatctttatatatgtttttaatcattttgatcaatgtttgtagatttcaatgtatgaatttctcacttctttccatttattcctatttcttactttaagttctctagcaaatggaagtgtttttaaattttcatttaaaattgtttattgttaatgtatgaaaattcaacgaatttttggtgctgatattgtattgtgcaaatctactgatgtgtttattagtcacagtagtattttggttgactctttgtgattttctacacagaagatcatgtcatctacaaaaaatataattttactttttctgattttgaggcatttcatttcttttgctagttcattgctctggctaggacttccagtatttattgaatagaaaaagtgagaacgttcttgcatcatgtgagatcctacgggaaaaggattctattttccctgcttggttatctccacattggtcatttcatcaatggtctttctattggtgaggtaaatttccttctccatctattttgtttaagatttctatgatgatcagatgctgaattttgtgaaatgatttttctccatctgttgagatgatgtggttttcatctttcattctgttcaagtggtatatcacattgatttgcttgaatatgttgaaccatccttgcatgccagaagtaaatggcacttgcatatctacaatccttttatatatcctcttgaatacagttttctagtacaagtggtcttcaagaagctcatggaaaaatacatattatggaaaaattgtgcatgaatttcacagtttttgcaccaaaataaactgatacaaatctgtt

SEQ ID NO: 8936 - DNA, 540 bp, Homo sapiens
caggagtttgtgattacagtgagttatgatcgcagaactgcgctccagccttggtgacaaagagagaccctgtctctaaaaaaacgaaaaaaggaaaaacaatggccattgttttttgtaactttggcatcaaaaaccaaataccacatgttctcatttataagtggaagctaagctataggtatgtaaaggcataaagagtgctataatggacattggagactcagaagttgggaaagtgagaggggagtgagggatgaaaaactccctattgaatacaatatacactactcaggtaatgagtgcactaaaaccccagacatcaccactacataattcatccatgtaaccaaaaaccacttgtatctctaaaggtattggaataaaaaaatttaaataaccctgaggtatgttttctacggggaaagcaagataagtgattttctccccttatttattagatttcagaataatgaattggtggtttttcatctaccaaagactggccatgaagtgttttctcactccaccagatttaaa

SEQ ID NO: 8937 - DNA, 453 bp, Homo sapiens
tgtgtgtacgtattgttgtggactgaatatttgtgtcctctcaaaattcatatcttgaaatcctaactcctaaagtgatagtgtaggaaatgaaggctttgagaggcacttatgtaaggaaggtagcactaccatgaatggggttagtgccctaataaaaaaaagaccccagagagcactttagctgtctttctcccatggaaggacaaaacaagaagttgacattctgcaatatgaaagagggtcctcaccagagcccagccaagctggaaccctgatctcagacccccagcctctagaactatgaaaaattaatttctgtttttcatgaaccacccagtctatggtacctgtgatagcagcacaaactaagatacataatattcatatcatgtatacacatcttcaaaatacttcatgtcatgaaagttacttctatgttttaaacaaatt

SEQ ID NO: 8938 - DNA, 437 bp, Homo sapiens
taaatatagagttatttgacctagttctatgacccagcagttccactcctagttatatatccaaaagaattgaaaatatgttcacataaaaatgtgtacttgtgtgttcttagtagtattatggataatagccaaaaagtagaaataatcgggccaggcgcagtggctcacgcctgtaatcccagcactttgggaggccgaggcaggtggatcatgaggtcaggagatcgagaccatcctggctaacacggtgaaaccccgtctctactaaaaaaatacaaaaaaatttagctgggtgcggtgacgggtgcctgtagtcccagctactcaggaggctgaggcaggagaatggcgtgaaccctggaggcggagtttgcagtgagccgagatcatgccactgcagtccagcctgggagacagagtaagactccatctca

SEQ ID NO: 8939 - DNA, 552 bp, Homo sapiens
aatctctaggcaaaagtggcactggccactaaagagagcccacaggagctcaaactctaagggaggaaaacctttctccccactctggagctatagggccaagagggtgcatccaaacccagttatttttcctttctctctgtcctcccagagtttaccttgggatgaaggggcaattggagaagtccacaccaaagtgaagtaacaaaagacccacctttctagccagaggacaaaaaagaaaagcagcaggaaactgaaaatcaatggcacataaagattacgaagaaaaaaaactaaattgtccgtactcacagataacgtaattatccatgctgaatataccaaggaatctcaaaaaaaaaaaaaaaaacctacaacaaataagtgagtttgacaagcttgtacaatatagggtcaatatcaatatcataaatatcaacaatacttctataaactggaaataaacaatttaaaaccaaaaaattctaaaatcatttataacagctcaaaaaatatgaaataattgatatgaatctaacaaaacataca

SEQ ID NO: 8940 - DNA, 696 bp, Homo sapiens
ttcatttgacaaatgtaatttatatgcaccattattttatctcaagtagaaccctagacaagatgtttaaaaaaagaaccagtaaaggtattctaccacttaacagatgttgccctggctagattccctcactctaaaatggaagtgctaagaagtagctttcttcatttgtaatatctccttcagatttcataggctaagtgcattgtcttaaattagctacatagccaaaacagaagacaaattaaggctgatttcaggatgctaatcagaattaaactaggatatttgtgtaaacaggaaataggcttgaaatagacctatttcattttttactgaacctgcatttgtcttcaactagtagatgaggaaccagtatctagtttacagttaatggcatgctgctatcagttttgttttttaatacaaataagttacatgaaaagtaactacagcatgatccaaagatctatcttgacttggccttaagctttgagaatgcaatgcattccctccacattttccctgtatttcctaaatttttaaaaaggtaacagctttagacccagcttttagttgttactatcttgctttataaatgtaaacaaagactactgctgtcattggcctactgaatagcctccatagtcaacaagacactagatagttcaatggacttgtgcatactctgttttc

SEQ ID NO: 8941 - DNA, 1225 bp, Homo sapiens
catggtggcaggcacctgtagccccagctactcggaaggctgaggcaggagaatggcgtgaacccaggaggcagagcttgcagtgagccgagatcacacaactgcactccggcctgggcaacagagtgagactccatctcaaaacaaaaaaaagaaaaaagaaaaaacatacaatttatgaaaatgaaatgaaattacagtctttatgaaccacaaatacagtttttcagatatatcatggtttatatgttatatataaaactcttaactaaatctcaaacaagggaaaagtcacattaattactccaagagaaagaactggttactaactactttaatgcaggagctcgtggataaaaaagatgagtggataaaaaagcaagtgagtattcacaacagcatgacaaacaacacaggtatactcacatatatggcatttgataatcagagacagcactttagctgcctttcttcactgcctagagaaatgggcagcaatcaaggcattcaaaggtctacctcctttccttcttccaaccataaaaccaacctaactcaaaagaaaggtattttaaatctttatagataaaaatgaatagagtgacaaaatacatcatttgttttttctttattcattatcaagatggtggctatgaagaactaaatgaatcaggtttgtaaagttaacagatgctaataatgtcatattgtgatgcaaagatgagtgcttttatcctcagttcccttgataattgtgttatcaaacacatattgtgttcaatgttttagtgtgcttaagtacacttaagagcaacgttaatatctaatatcagccaccaagataaaaggctaaaactcctgtcaaaactactacacatactgaaaattcttttccctcctgttttcatctatttgaatataatttgtaataaaaatccatggccaggcacaatggttcacaactgtaatcccagcactttggaaggccaaggcaagaggattgcttgaactcaggagttcaagaacagcctgggcaacatggcaaaaccctgtctctacaaaaatatacaaaaattagctgggcatggtggcgtgtgactgtagttccagctactcagggggatgaggcgggattgctttgcacccaggaggtcaaggcttcagtgagccatgatggcaccactgcactccagcgtgggcaacagagagagagactgcctcattc

SEQ ID NO: 8942 - DNA, 837 bp, Homo sapiens
catggtggcaggcacctgtagccccagctactcggaaggctgaggcaggagaatggcgtgaacccaggaggcagagcttgcagtgagccgagatcacacaactgcactccggcctgggcaacagagtgagactccatctcaaaacaaaaaaaagaaaaaagaaaaaacatacaatttatgaaaatgaaatgaaattacagtctttatgaaccacaaatacagtttttcagatatatcatggtttatatgttatatataaaactcttaactaaatctcaaacaagggaaaagtcacattaattactccaagagaaagaactggttactaactactttaatgcaggagctcgtggataaaaaagatgagtggataaaaaagcaagtgagtattcacaacagcatgacaaacaacacaggtatactcacatatatggcatttgataatcagagacagcactttagctgcctttcttcactgcctagagaaatgggcagcaatcaaggcattcaaaggtctacctcctttccttcttccaaccataaaaccaacctaactcaaaagaaaggtattttaaatctttatagataaaaatgaatagagtgacaaaatacatcatttgttttttctttattcattatcaagatggtggctatgaagaactaaatgaatcaggtttgtaaagttaacagatgctaataatgtcatattgtgatgcaaagatgagtgcttttatcctcagttcccttgataattgtgttatcaaaccctttgggtccctgtttcggggttagtcattaaaccacgtaatttatatgccccagaaaggaaacgtgcat

SEQ ID NO: 8943 - DNA, 397 bp, Homo sapiens
gtaggttctcatatgcatacttatgatctcatggttacgaggcatttgatgttcctcctccagctcacattcctatcccaggcaggcaggaagagcaaaggggtctatatctggaaaacataagctctcccagaagccctctgcctgtgtcacatgactttccttagctacacaggagtccaggaaaatttttttttttggcttttctaaacactcctcctctgaacaaaattacacttctgttactgaggaagctgggagaattgatatcagagaagcaactagcagtacctgttatgtgggatttccagcactcacaaatggttgctgaccttttaccttcctgggaaaaaacagaaaaactaaaacagcaacccagagttctttaaaaaaaaaa

SEQ ID NO: 8944 - DNA, 373 bp, Homo sapiens
acaggcatttatgtgaccagcaatagctctgtgctatggagaaaagagaaaaggaattttgctgggacagctttcggtctctgctaaatttattgattgattttcaaattttttttagatatgaggtcttgctttgttgcccaggtaggtcttgaactcctgggctcaagcgattcccccaccttggcctcccaaagtgggattacaggcatgagctaccatgcccagctgctactaaatttattacccgtaaaataaaaataaaaataaatttaaaaaggaagttgagttttgattcgatgtcttcagagggcatttccttttggaattaatcatacagaagatgtatactctgaagcaatttgaagattta

SEQ ID NO: 8945 - DNA, 1279 bp, Homo sapiens
aacattaatttcatttttgtaccttatttttcccacttgatcaaaatggcactacagtaacacctatccttctgtgctgaggcagagaggtattgccacgtaagttgctctgcctaccagggctgtaagaaccatcccgggccaaaagcagagtgtcttccttcactggctatggtcagcactgagtggggcaagctggggccacatgcactattatccctcagcccgtgcctctcccaggtagtatgaatggaaagaagatccagaaggaagctcagcatacagccatgccttcctgctctgtctcggcccacccagtcaaagatgcaagcttgtcccttgctttctcctttctctcctcttggtgaggtgtggcccaatccttggagcttcgctgttgtctccaccggtgcacatctctccactggctccacatctctctccaaagaatgcagagccactaatcctacctggaacttcccagccagacaagaaaggctgcttcctggtctggtgtttggcctttcccaaacacccccttccttgggatcctgaccatgaaaacccaccatggacaaggacacaccctattctctccccagaaggtcacctgctgaacatcactaccacggatctgcctcatcaggagaaaggggactttggccatgtggcctcgccactcatgttaggacttctacagcaagccccatgccatgcataagtgtcttacagatggacttttagcacaacccacctatgcatggggaacgcagtaaaagaggcagcgaagagccagcctgtgcaaagctttgaatgactgtagggtcacaccaagacaacaacagaacaaagaatccaacgtttataacaaacttgcttaactcttactgacgctgaatgttacattattaaggataatttcagactcataactaggcaatcatcactctttttgtaaatcccatatttagatggcaaataaacagccaaaagttaaggcattcaaagggcacttgaaaaccattcctttatgtgaaaactggggtgctgtgataaaaggtaactaggatcttagcagtgcaatctgcagaatcatttataccaccaaggctacgtaaggcacaccgctaagatatatcttcggtttattctttttcttatgagtactagagttaaataaaacactatctaaatactcggggcaatggtgttaacattattcttgttgaaactagttaccagaataaagaaaaaatatcaaaaaaactgacatgatttg

SEQ ID NO: 8946 - DNA, 308 bp, Homo sapiens
atcacagctggtggcccaagaaatcctttctatcccccaaaacctgcaggtttgtaacccctagacaacagtaacattttgttgttctgtctctcaggtgcaggggaaaggctttagtctgacttttaatctttactataggtgaaaaaaaaataggcctttcgactactcttctcaaaaggcaaatttatttactaagctgtatgtcttataacagggataggaaaaaattgatagacatataaggacaagattctgtttataaacggagttttttatattttcaataggttttccacctgtaacca

SEQ ID NO: 8947 - DNA, 513 bp, Homo sapiens
ctatcgtcccaggagaccgggcgatgagccaaggctgctgtgtatccaacctgacatctgcaggaaacccccccggaacctgcccatgcaccacaccacagagaaaccaggacacaggggctcagggccagtgggggcgcaaaggctgcagaccgggagcggggcaccctgacaggtgggcacagcgcagagggcctgagggcccctggagttccaggggaggcgggtttgcgccaagaggccatgctggccactcctcctcaggggatctggaaacccagaggcagcagtgaggcgtggccccaaatctgggctcttcttcttacaaacgtggggctttgggcaaacgccttcatcactttcattctttgagcgcctcgtgtggaaaggagagttactaacgcctgactcacagccacgtgaggattccaacgagcaaagtgcgtagcgcagtacctgacccacaggaagtgaggcacccaataaatattagctgacattagaccttacttt

SEQ ID NO: 8948 - DNA, 330 bp, Homo sapiens
ctatcgtcccaggagaccgggcgatgagccaaggctgctgtgtatccaacctgacatctgcaggaaacccccccggaacctgcccatgcaccacaccacagagaaaccaggacacaggggctcagggccagtgggggcgcaaaggctgcagaccgggagcggggcaccctgacagatgtaagtgctctgggcaacacttcaccacagccatctgccagccttgagtccagtgacaagagggaacaagatggtttacaagtcacccctattctctgcaaatccagtttattaaacttggagttcacaaagaataaacggttaattcctagc

SEQ ID NO: 8949 - DNA, 393 bp, Homo sapiens
gataagattcagtgtgatttaacctgaagtctatgtacctgttaatgcacattcatgaaatacaccccatgctttggagaatgccgtctaccagagctgcagccttggcatccagagtaactcaaggctaggagttgtgtctggaaccatccatatccttcagtctcttcctgaagctcgctcttccttcatgtccaaggaggatgtaatctcctttgtgtcctcccactcagcccagtgaaggaagtagagtttgggttctgctgcttcggttttgagcacaccctagcagacaggcctgggctgcccttccgggcactggactttgaatgtggaacacagggaggcagagctgagacggcacaggcagaagtggtctcagctcgtctctgc

SEQ ID NO: 8950 - DNA, 476 bp, Homo sapiens
ttttttttttgagacagagtctcgctctgtcacccaggctggagtacagtggcgtgatcccagctcactgaaacctccgcctcccgggttcaattgattctcccgcctgagcttcccaagtagttgggactacaggcgctcaccaccatgcctagctaatttttgtatttttagcagagacagggtttagccattgttggccaagctggtctcaaactcacgacctcaagtgatctgcctgcctgcctcggcttcccaaagtgttgggattacaggcgtgacccaccgcacccggccaataaataaatttctaagtggtaatatgactaaaactcaagccatcaaaagaatttagaaagcttcttggagttctttgtaatgcagcaaactgcagttatgcatgactacttcataaaaggtcatgtcctcagtttagtgtatctctgacattgatcatgaaagctcaagaggagcca

SEQ ID NO: 8951 - DNA, 1291 bp, Homo sapiens
caaaaataaaaatatgtcttgaaaaatgaaatagattttaactcttcatccagtgctatggcaagtttaactgcactggaggtggtattccttttctacttttattcctatttatgtatttatttttaatcatattctcactgtgctaaatacagtcttcccactaattgttgaatgaaaattaagggtgaaagtctgtgttgggaagtgtagctccggatggtggagaaccagtgcttcttaggagcccttccctttatggatagggccaggggtccctatcttacgtggcagtcctaagctactcttgagtgatagcagtcacaacattgggatttcccattcctctgaaagtacccacagctaaacactactcatttcccaatttcagtatttactgaaatcacttacctacaattctgttagaatattatgttgagttcggaagacatttctctgtttgcaaggacagttagttgctctctgtcatagcccgcagaagcttggctacagtgtaattcctctccttgttctcctacactctttgtatctcagtgactgggtgtaagatttcatgccaaatgcaaggaatagtggaaatacataccaactgcaaagaatagaaaaactttatcccaatatattatagaaagatcttcagttcaattatgtccagagtaatataatttggcaatgttaatgcttttaagatttgaacttgtcctcaaaccaaggagacaacaatagtgtaatactattggacttacaggattagttttaaagcaactttgaatagaagtgtttcagacataggacttctgccttgttgactagagtggatagttttctgtttaaatgcattggtcttttggctgtttgtaattcacttcagcttatagagaagttgatgaccttggatcatgctgggtatgattggtctttaaaaagcagtaatataccaccagcccaaggagaaaacattgttaaaatgaagagtggtggaaatagtgtgttgggaagaataaaaaatttagattggcacttattctaaagtgagctgtttttttcaagaatttactagcatttgctcgtagtatgatttctgacgccagtcatatatactgatgaggggaaggagttactgtgttattctgagttcttataaatgcatattattgaatttcattgcatgactatttgtcaagacttacctggttaggtctccaattaaaagatgtaccacctgtcatcttctaaattgtgttcctttcatttattgggaacagaatct

SEQ ID NO: 8952 - DNA, 434 bp, Homo sapiens
cacgagacatgcacagtcaagcccctcccggagcctgtgttcggaggtatgagatgaggcgaccacactgccctcgctaccagctgcaaagatggcctgtacaggtgacagacggtctgacggcctccacagactctgaaccagcaccaccaagtctcactgctgccctctctccctccacaccagccagcttagaatttctggctctttctcccctgggcctggcaaggccatcttggttggccttgcggcagttttctgcagctgcggggaggcagggtggggcaaggacccacatccaaggacctcaggcaagcatcttctcccccaaatctacgtcatcagtcacaaaacactaacctgaaaagaccttgcaacaacccagtttcatcagctcattctacagatgagggagtgaagctcagagagggaaa

SEQ ID NO: 8953 - DNA, 453 bp, Homo sapiens
catttgcctcgtgatattctattaccttgtgaagcacgtgatctctgtgacccacaccctattcgtacactccctccccttttgaaagtccctaataaaaacttgctggttttgcggcttgtggggcatcatggaaactaccgacatgtgatgtctccccccggatgcccagctttagaatttctctcttttgtactcagtccctttatttctcaaaccagccaacgcttagggaaaatagaaaagaacctatgtgaaatatcgggtgaattttgcccgatatctggctgaatttcccctgatatatcctggagcttaaatattgaaatatcaagttaattactattaaacattttataatagtatggaaatggggtatggaaatttaaaatatcagttaatgtagacacaaatatgttcatgtctcaataataaatattcataccaccatag

SEQ ID NO: 8954 - DNA, 406 bp, Homo sapiens
aaaaggaaaaccctcctatccgaaagtcagaaacacgttttccttttatttttttttccaaaaatgttaaaagtttctccttaatttaagtccataatcctacctagaagtatgtgtgtggtgtgaggtagggatcttctttgtacccaaattctaaaacttgtgaatggtcttttgtgagtttatttttattcttagtgattcctttcacactgaaagcatattcctcctagctctccagctgtttgtataccttaggatgttagtgtgtgctgccttggggtctgtccaataactttttcttttttttttcctaatagaaataggctctttctctgtcacccaggctagagtgcagtgatggcgccactgtccatgcaagatctgcccccagcacacacacttg

SEQ ID NO: 8955 - DNA, 316 bp, Homo sapiens
caaaagaacattatgccaagatcatgggatgtgataaatattaatttactgtgaaaagcataatttatgtaaaatatgtatttttataagtctgcatcaagcagagtactctgtgttaacagtcctaaacgcattgccacccagggtatcacattgtcaggagactcttgtttagtgatatatgttttcaatttatttgtcatatgtgccatctatttaaaatgttagtgatcttgaacttcatatttgaatttaaggtgacatttaaacctctgtaatctaaggactaaagctcaagtacatgaatgataacttt

SEQ ID NO: 8956 - DNA, 1151 bp, Homo sapiens
cttagtgtggttcacatatcaggagcttctccaatagccaggctatgaggcactaaaatgaggaaatatggtttccaaacttcgcaaatacttatagtccagccacaggggatatactgataaactcagctcaaatgtcacctcctcagagatgctttctcaaccacccttagttccatgaggactgcatcattgtttaggccactcctgtatccccagagcacagaacattgtctggctcatagtaggtgctcaaaagttttgttgaatgaatgaacaaataaacgtgtaaggaagtcaggcacagcacttgcccacaggaagcttataagatgagcggcatgccattgggagtttgaatgatatatggagatccaaacagggcatcagaggactgctcagaggagtcagggaattaagaaaaaattgggagccagtgagccaagatgtgttaaaagcaagtgatcaagcttagattgcagtgttagttaatagagcatatgtgtccctgcctgatgcattaccttccctgcagtagttagccttctgggaccctgaaaagcatgcagaaaggttgacagcttacaatcaataccatgttcactgatgcaggaagcaacattatcacatccaagatattgcccccacacccaggctgcagcactaaatattccccataacaaggcaaagggaagtgacaagagctattattctcaaccctcccacttggaaacaagaggtgagacaaaccttcccctagatgttcttagggaaaggcaagacccccaaagaaatctttcagagctgagcacatgcctaatacagcaagacagggatgggagaagattggcattttcatttgcctgggtgtccacaatattgcaggggaagctctgtgggcagctgggaaatacaacaataaattggagggggatgaacaatagggtcagtggggctgtgtgctgagtgaatgctggattttattctacatgcccaattcactccaataagataaacttgacttcctccagtgtggctttcttatttcagcttctctgactgtggcataattgaaagtcatatttcatctagaccattggttttcaactccaaatgcaggtggcttatgaagactcagcctgaatatataa

SEQ ID NO: 8957 - DNA, 603 bp, Homo sapiens
  misc_feature (534)..(534): n is a, c, g, or t
  misc_feature (539)..(539): n is a, c, g, or t
  misc_feature (547)..(547): n is a, c, g, or t
  misc_feature (549)..(549): n is a, c, g, or t
cttagtgtggttcacatatcaggagcttctccaatagccaggctatgaggcactaaaatgaggaaatatggtttccaaacttcgcaaatacttatagtccagccacaggggatatactgataaactcagctcaaatgtcacctcctcagagatgctttctcaaccacccttagttccatgaggactgcatcattgtttaggccactcctgtatccccagagcacagaacattgtctggctcatagtaggtgctcaaaagttttgttgaatgaatgaacaaataaacgtgtaaggaagtcaggcacagcacttgcccacaggaagcttataagatgagcggcatgccattgggagtttgaatgatatatggagatccaaacagggcatcagaggactgctcagaggagtcagggaattaagaaaaaattgggagccagtgagccaagatgtgttaaaagcaagtgatcaagcttagattgcagtgttagttaatagagcatatgtgtccctgcctgatgcattaccttccctganctgantttatcantntatccctgtggctggactataagtatttgcgaagtttggaaaccatatcctcat

SEQ ID NO: 8958 - DNA, 584 bp, Homo sapiens
acagcttctacaagaaatcatctagttattcacgacttgttttttgaatgaaaaacttcaacatgctgattttttttccaagtatttgaatcatatacacatattcttttaaaacttcaacagataatatggagggttttaaaaattttttatgttatcttttgaatactaaataactgcagcctttgccaagagatatgtgaaaggtgtctgtatttaaaccatttattcatctgaatgttttattttttttcatcaaaatgatttgtagggtttgagaggaagagaaaatagtagatcatccacctgtagattcttcttccctttccattctgcttctgattggctttgtgcttcttacgttcttggcctttgccagcatgtatgaaataaagatgttgtcataattgatactagtaggttttaaaaggccttctgaggagtgatacttttgtattttattaggaacacatctctattggggaggagtgttctctttccccttttcaaatctagaccaaataggatttatgactttaaccttctgcttttcttactgtataaatttatattttcagctgaaa

SEQ ID NO: 8959 - DNA, 399 bp, Homo sapiens
tgctgtttctcttgccctccccccagcccggatctttacgcaactgtggtgaagatgccataaattccataaataactgggccaaaagcagagggagatttgctgaaggaagggtactttttcagagaaatagttaccttaaatacagagcagtgaaatcttacaaataaatgtcgagtccaagagaaatgctaagagatagaaaaggtccgagagcttcaatatctgtcaaataggagagaaagaaaaagaaagaaagaaagaagtaactcctattatatttcagctctgagacaaagtttagattgaaagtgttccagatattgagcagagtggatgaagaaagctcaaatgtagacaccaagtggtaaaatttcagagcagcaaaaatgaagaaaa

SEQ ID NO: 8960 - DNA, 382 bp, Homo sapiens
taaaaataaaaaatttaatcatagtaaatttaaccgatgagattaaatatgtatacactaaatacaataagatgttaatgacagaaatttcagtagacacaaataaatggaaaaatattccattagaataactaatactgtcaaagtaccgtattatcataagtgatctatatattcaaagtgaaaattttagtgtcatttttcacagtaatagaaaacacaattttgaaacttaagtgtaaccttaaacaactttaacactgattggctgggcacggtggctcacgcctgtaatccccagcactttgggaggccgaggtgggcagatcacgaggtcagatagagaccatcctggccaacatggcgaaaccccatctctact

SEQ ID NO: 8961 - DNA, 907 bp, Homo sapiens
ggcacctctgcctgtcagcaccaaagaatccaaactttaccagataccagggcccatggacctttcctctttggcgagtttcaaaattgccactgtcattttgggacacaatcacaacttgtcacaatcagacatatcaacttgtggaaaagagaaaatcattttaatgcaatagaaaggtagactgaataagtaagaatacatgcagaaggtagaggtttgcagaatgctcagctcctggggcttttcctgtatgggagaagtaatcctggtagatgtcagactcatattgttaaagcaaaactggattgaagtatttcttccctaactttgcccacacatccctcaggcaccaggttttcttttgcacacatttattctccttctttatcctttgaagtgtgcccttgtcagccacttaaatcagttgtcacctattaaaacaacctataggaccaacgaagaggtccttcaccacctaggacagtgtgtaatgatagactcacttaattgatccattgagaggtatgtgggggaacaataggagataaagcttctgtgatggtttaagccaagttggaaagtttctaactaaagaaagtcccagagatcatatatcttgaatagaaaagggatcagatcttagaatgctgagaaaaactgggaaccattaattttggctcatttcctaaactctctggatttcatagagccacaattcttctcaacctgggggcactgcttctgtctctggagagatagaagtgcagcttccgtaattctcagggtatgagctgcctgggatcaggggaccttcatggaaacggccactacatggggaacccccttcagctttctgagacttctctggggaccaggaaccacacaatccccagggttcctgaga

SEQ ID NO: 8962 - DNA, 219 bp, Homo sapiens
ctcccgagtacctgggactacaggctaatttttgtattttcagtagagacggggtttcgccatgttggccagactagtcttgaactactgacctcaagtgatccacccacctcagcctcccaaagtgctaggattacaagcatgggccactgcatcctgcctgaactgttcattttaaaatggttaattgcatggtttgtgaatctcacctgaatttct

SEQ ID NO: 8963 - DNA, 514 bp, Homo sapiens
cctttttactcttggactcatttcgcttaatgagtactttgcattctcaaagataatttaggaaattttaagataagaaatgaatctattaagtagttattgccacagaattgctattctgccatattagtcacttctcaggcaaataaagggcgtgtacatattctgtacgtactgaataaaacctattatgtaagaaaataaataatgctgaaaatgtgatcttggggaattcatattttacctcaggtttgtttctgggtttaagatttgtgactctcaatatttgctagtgtaagtaacgtagtcaaattaggaaatcggattttcgtattttccctcgagtgaataggtataatgcatggatttggttatgagtcctgaattctctgttcaatctgttgaaattttaaatgcaaataaatacagataaaatctgacatacattggccactgtacctagcccttaactttttttgacagggtctcactttgtcacccactgcatgccagc

SEQ ID NO: 8964 - DNA, 449 bp, Homo sapiens
cataagggtgtgattgtatattcagccaagacactgtatctcccttatgccttttattttcctgacatagcatgctgctggatcaatgtgtgtattgttgctactctgcctatgccagaggtggtgactcactcacacatataaataattttagttgaatgtttttataggttgtgtattccttacttgaaaggcttgggaccagaagtgttgcagatttcagatatttttagattttggaatatttgcattatacttaccagttgagcatcccacaaacctgtttaatcatgggacagcataaaatattgcccagtggagaacaatgcacatatatacttagatacaatgtttgcgtgaattttttattgttgtttttgagaaaaaaaatcatggtaaatattactacttctgtgtttctgcatacataaactttgagttaaagcatt

SEQ ID NO: 8965 - DNA, 447 bp, Homo sapiens
gttatctgggtaacagatgataaaacccctacttaaggccaacagcagtagaagcaaaaaatatttgaaaaacttgagataggaaaaacaagtcttgattgaaagtgggcaatgaagaaattggaataaaaaagagtataaagagcagccagaagcttaagtgggtcaaacagagcaaagaaacactgacataaaataagtctggtttgggtatcagtgaaagtggtagaataaaggcctctgaaagtcctctcctccataaaagcaataagaacaagggcaacaattttcagaattaacttttttaaaaaactgtagacattaataaaagatttggggaaaattcagggaacatttaagaaaagcagctgaattttggtataaaaacctgatatgaacagtgcagtattaatttttcctattctcatcccttcatttccagctcca

SEQ ID NO: 8966 - DNA, 433 bp, Homo sapiens
aagcaaaaacatttgtcctatttttttaacctctttgttttagacttctttttttcatccattctttaaatttcacagtttctatttgtctgcagagagacaaacgaaacagcatgaagcacgtttttaccgtaggcctcactggcgattggaacagcctcaatagaaatccaaattctaaaacactggctgacttggaggatatgtgaatttttcagctcgggggctctgaagtcagattagcacagatttttgaacccaaatgccctaaaatgaaaagataggaaaataggattctagaattatttgggggaaagcgtgaaaaaggtcatcttttgtctatcttcctgccttgtgccccatccttagaagcttaataggggagaactgcaaacctcaatgaattcttcattaaaaaaaaaaaataaactcc

SEQ ID NO: 8967 - DNA, 3642 bp, Homo sapiens
agggaggtggggagcggcaagccccgcctcagcccctctggcaggctcccgccagcgtcgctgcggctccggcccgggagcgagcgcccggagctcggaaagatgcggcgcccgcggcggcctgggggtctcgggggatccgggggtctccggctgctcctctgcctcctgctgctgagcagccgcccggggggctgcagcgccgttagtgcccacggctgtctatttgaccgcaggctctgctctcacctggaagtctgtattcaggatggcttgtttgggcagtgccaggtgggagtggggcaggcccggccccttttgcaagtcacctccccagttctccaacgcttacaaggtgtgctccgacaactcatgtcccaaggattgtcctggcacgatgacctcacccagtatgtgatctctcaggagatggagcgcatccccaggcttcgccccccagagccccgtccaagggacaggtctggcttggcacccaagagacctggtcctgctggagagctgcttttacaggacatccccactggctccgcccctgctgcccagcatcggcttccacaaccaccagtgggcaaaggtggagctggggccagctcctctctgtcccctctgcaggctgagctgctcccgcctctcttggagcacctgctgctgcccccacagcctccccacccttcactgagttacgaacctgccttgctgcagccctacctgttccaccagtttggctcccgtgatggctccagggtctcagagggctccccagggatggtcagtgtcggccccctgcccaaggctgaagcccctgccctcttcagcagaactgcctccaagggcatatttggggaccaccctggccactcctacggggaccttccagggccttcacctgcccagctttttcaagactctgggctgctctatctggcccaggagttgccagcacccagcagggccagggtgccaaggctgccagagcaagggagcagcagccgggcagaggactccccagagggctatgagaaggaaggactaggggatcgtggagagaagcctgcttccccagctgtgcagccagatgcggctctgcagaggctggccgctgtgctggcgggctatggggtagagctgcgtcagctgacccctgagcagctctccacactcctgaccctgctgcagctactgcccaagggtgcaggaagaaatccgggaggggttgtaaatgttggagctgatatcaagaaaacaatggaggggccggtggagggcagagacacagcagagcttccagcccgcacatcccccatgcctggacaccccactgccagccctacctccagtgaagtccagcaggtgccaagccctgtctcctctgagcctcccaaagctgccagaccccctgtgacacctgtcctgctagagaagaaaagcccactgggccagagccagcccacggtggcaggacagccctcagcccgcccagcagcagaggaatatggctacatcgtcactgatcagaagcccctgagcctggctgcaggagtgaagctgctggagatcctggctgagcatgtgcacatgtcctcaggcagcttcatcaacatcagtgtggtgggaccagccctcaccttccgcatccggcacaatgagcagaacctgtctttggctgatgtgacccaacaagcagggctggtgaagtctgaactggaagcacagacagggctccaaatcttgcagacaggagtgggacagagggaggaggcagctgcagtccttccccaaactgcgcacagcacctcacccatgcgctcagtgctgctcactctggtggccctggcaggtgtggctgggctgctggtggctctggctgtggctctgtgtgtgcggcagcatgcgcggcagcaagacaaggagcgcctggcagccctggggcctgagggggcccatggtgacactacctttgagtaccaggacctgtgccgccagcacatggccacgaagtccttgttcaaccgggcagagggtccaccggagccttcacgggtgagcagtgtgtcctcccagttcagcgacgcagcccaggccagccccagctcccacagcagcaccccgtcctggtgcgaggagccggcccaagccaacatggacatctccacgggacacatgattctggcatacatggaggatcacctgcggaaccgggaccgccttgccaaggagtggcaggccctctgtgcctaccaagcagagccaaacacctgtgccaccgcgcagggggagggcaacatcaaaaagaaccggcatcctgacttcctgccctatgaccatgcccgcataaaactgaaggtggagagcagcccttctcggagcgattacatcaacgccagccccattattgagcatgaccctcggatgccagcctacatagccacgcagggcccgctgtcccataccatcgcagacttctggcagatggtgtgggagagcggctgcaccgtcatcgtcatgctgaccccgctggtggaggatggtgtcaagcagtgtgaccgctactggccagatgagggtgcctccctctaccacgtatatgaggtgaacctggtgtcggagcacatctggtgcgaggactttctggtgcggagcttctacctgaagaacgtgcagacccaggagacgcgcacgctcacgcagttccacttcctcagctggccggcagagggcacaccggcctccacgcggcccctgctggacttccgcaggaaggtgaacaagtgctaccggggccgctcctgccccatcatcgtgcactgcagtgatggtgcggggaggaccggcacctacatcctcatcgacatggtcctgaaccgcatggcaaaaggagtgaaggagattgacatcgctgccaccctggagcatgtccgtgaccagcggcctggccttgtccgctctaaggaccagtttgaatttgccctgacagccgtggcggaggaagtgaatgccatcctcaaggccctgccccagtgagaccctggggccccttggcgggcagcccagcctctgtccctctttgcctgtgtgagcatctctgtgtacccactcctcactgccccaccagccacctcttgggcatgctcagcccttcctagaagagtcaggaagggaaagccagaaggggcacgcctgcccagcctcgcatgccagagcctggggcatcccagagcccagggcatcccatgggggtgctgcagccaggaggagaggaaaggacatgggtagcaattctacccagagcttctcctgcctacattccctggcctggctctcctgtagctctcctggggttctgggagttccctgaacatctgtgtgtgtccccctatgctccagtatggaagaatggggtggagggtcgccacacccggctccccctgcttctcagccccgggcctgcctctgactcacacttgggcgctctgccctccctggcctcacgcccagcctcctcccaccaccctcccaccatgcgctgctcaacctctctccttctggcgcaagagaacatttctagaaaaaactacttttgtaccagtgtgaataaagttagtgtgttgtctgtgcagctgc

SEQ ID NO: 8968 - DNA, 3960 bp, Homo sapiens
agggaggtggggagcggcaagccccgcctcagcccctctggcaggctcccgccagcgtcgctgcggctccggcccgggagcgagcgcccggagctcggaaagatgcggcgcccgcggcggcctgggggtctcgggggatccgggggtctccggctgctcctctgcctcctgctgctgagcagccgcccggggggctgcagcgccgttagtgcccacggctgtctatttgaccgcaggctctgctctcacctggaagtctgtattcaggatggcttgtttgggcagtgccaggtgggagtggggcaggcccggccccttttgcaagtcacctccccagttctccaacgcttacaaggtgtgctccgacaactcatgtcccaaggattgtcctggcacgatgacctcacccagtatgtgatctctcaggagatggagcgcatccccaggcttcgccccccagagccccgtccaagggacaggtctggcttggcacccaagagacctggtcctgctggagagctgcttttacaggacatccccactggctccgcccctgctgcccagcatcggcttccacaaccaccagtgggcaaaggtggagctggggccagctcctctctgtcccctctgcaggctgagctgctcccgcctctcttggagcacctgctgctgcccccacagcctccccacccttcactgagttacgaacctgccttgctgcagccctacctgttccaccagtttggctcccgtgatggctccagggtctcagagggctccccagggatggtcagtgtcggccccctgcccaaggctgaagcccctgccctcttcagcagaactgcctccaagggcatatttggggaccaccctggccactcctacggggaccttccagggccttcacctgcccagctttttcaagactctgggctgctctatctggcccaggagttgccagcacccagcagggccagggtgccaaggctgccagagcaagggagcagcagccgggcagaggactccccagagggctatgagaaggaaggactaggggatcgtggagagaagcctgcttccccagctgtgcagccagatgcggctctgcagaggctggccgctgtgctggcgggctatggggtagagctgcgtcagctgacccctgagcagctctccacactcctgaccctgctgcagctactgcccaagggtgcaggaagaaatccgggaggggttgtaaatgttggagctgatatcaagaaaacaatggaggggccggtggagggcagagacacagcagagcttccagcccgcacatcccccatgcctggacaccccactgccagccctacctccagtgaagtccagcaggtgccaagccctgtctcctctgagcctcccaaagctgccagaccccctgtgacacctgtcctgctagagaagaaaagcccactgggccagagccagcccacggtggcaggacagccctcagcccgcccagcagcagaggaatatggctacatcgtcactgatcagaagcccctgagcctggctgcaggagtgaagctgctggagatcctggctgagcatgtgcacatgtcctcaggcagcttcatcaacatcagtgtggtgggaccagccctcaccttccgcatccggcacaatgagcagaacctgtctttggctgatgtgacccaacaagcagggctggtgaagtctgaactggaagcacagacagggctccaaatcttgcagacaggagtgggacagagggaggaggcagctgcagtccttccccaaactgcgcacagcacctcacccatgcgctcagtgctgctcactctggtggccctggcaggtgtggctgggctgctggtggctctggctgtggctctgtgtgtgcggcagcatgcgcggcagcaagacaaggagcgcctggcagccctggggcctgagggggcccatggtgacactacctttgagtaccaggacctgtgccgccagcacatggccacgaagtccttgttcaaccgggcagagggtccaccggagccttcacgggtgagcagtgtgtcctcccagttcagcgacgcagcccaggccagccccagctcccacagcagcaccccgtcctggtgcgaggagccggcccaagccaacatggacatctccacgggacacatgattctggcatacatggaggatcacctgcggaaccgggaccgccttgccaaggagtggcaggccctctgtgcctaccaagcagagccaaacacctgtgccaccgcgcagggggagggcaacatcaaaaagaaccggcatcctgacttcctgccctatgaccatgcccgcataaaactgaaggtggagagcagcccttctcggagcgattacatcaacgccagccccattattgagcatgaccctcggatgccagcctacatagccacgcagggcccgctgtcccataccatcgcagacttctggcagatggtgtgggagagcggctgcaccgtcatcgtcatgctgaccccgctggtggaggatggtgtcaagcagtgtgaccgctactggccagatgagggtgcctccctctaccacgtatatgaggtgaacctggtgtcggagcacatctggtgcgaggactttctggtgcggagcttctacctgaagaacgtgcagacccaggagacgcgcacgctcacgcagttccacttcctcagctggccggcagagggcacaccggcctccacgcggcccctgctggacttccgcaggaaggtgaacaagtgctaccggggccgctcctgccccatcatcgtgcactgcagtgatggtgcggggaggaccggcacctacatcctcatcgacatggtcctgaaccgcatggcaaaaggagtgaaggagattgacatcgctgccaccctggagcatgtccgtgaccagcggcctggccttgtccgctctaaggaccagtttgaatttgccctgacagccgtggcggaggaagtgaatgccatcctcaaggccctgccccagtgagaccctggggccccttggcgggcagcccagcctctgtccctctttgcctgtgtgagcatctctgtgtacccactcctcactgccccaccagccacctcttgggcatgctcagcccttcctagaagagtcaggaagggaaagccagaaggggcacgcctgcccagcctcgcatgccagagcctggggcatcccagagcccagggcatcccatgggggtgctgcagccaggaggagaggaaaggacatgggtagcaattctacccagagcttctcctgcctacattccctggcctggctctcctgtagctctcctggggttctgggagttccctgaacatctgtgtgtgtccccctatgctccagtatggaagaatggggtggagggtcgccacacccggctccccctgcttctcagccccgggcctgcctctgactcacacttgggcgctctgccctccctggcctcacgcccagcctcctcccaccaccctcccaccatgcgctgctcaacctctctccttctggcgcaagagaacatttctagaaaaaactacttttgtaccagtgtgaataaagttagtgtgttgtctgtgcagctgcaaaaaaaaaaaaaaaaaaaaagaaagaaaaaaaaagagtaaaaagaagggaagaaaaacaatagaaaaaaaaaaagaggggggggggcgacaatattagtactggggggaggaaccattaagctgcaacagcatttttgaaagagagcgccacatagggggactaaataaaagaggggcggtttaaaacatgacggtgacaaacttgttggtatttggaaacacattttgctgggtatgggcacccaagaagtgagccgggaaaaaacaggggtttgggacccattgtgacttttttttaaattgtgtgtagtatggc

SEQ ID NO: 8969 - DNA, 3873 bp, Homo sapiens
agggaggtggggagcggcaagccccgcctcagcccctctggcaggctcccgccagcgtcgctgcggctccggcccgggagcgagcgcccggagctcggaaagatgcggcgcccgcggcggcctgggggtctcgggggatccgggggtctccggctgctcctctgcctcctgctgctgagcagccgcccggggggctgcagcgccgttagtgcccacggctgtctatttgaccgcaggctctgctctcacctggaagtctgtattcaggatggcttgtttgggcagtgccaggtgggagtggggcaggcccggccccttttgcaagtcacctccccagttctccaacgcttacaaggtgtgctccgacaactcatgtcccaaggattgtcctggcacgatgacctcacccagtatgtgatctctcaggagatggagcgcatccccaggcttcgccccccagagccccgtccaagggacaggtctggcttggcacccaagagacctggtcctgctggagagctgcttttacaggacatccccactggctccgcccctgctgcccagcatcggcttccacaaccaccagtgggcaaaggtggagctggggccagctcctctctgtcccctctgcaggctgagctgctcccgcctctcttggagcacctgctgctgcccccacagcctccccacccttcactgagttacgaacctgccttgctgcagccctacctgttccaccagtttggctcccgtgatggctccagggtctcagagggctccccagggatggtcagtgtcggccccctgcccaaggctgaagcccctgccctcttcagcagaactgcctccaagggcatatttggggaccaccctggccactcctacggggaccttccagggccttcacctgcccagctttttcaagactctgggctgctctatctggcccaggagttgccagcacccagcagggccagggtgccaaggctgccagagcaagggagcagcagccgggcagaggactccccagagggctatgagaaggaaggactaggggatcgtggagagaagcctgcttccccagctgtgcagccagatgcggctctgcagaggctggccgctgtgctggcgggctatggggtagagctgcgtcagctgacccctgagcagctctccacactcctgaccctgctgcagctactgcccaagggtgcaggaagaaatccgggaggggttgtaaatgttggagctgatatcaagaaaacaatggaggggccggtggagggcagagacacagcagagcttccagcccgcacatcccccatgcctggacaccccactgccagccctacctccagtgaagtccagcaggtgccaagccctgtctcctctgagcctcccaaagctgccagaccccctgtgacacctgtcctgctagagaagaaaagcccactgggccagagccagcccacggtggcaggacagccctcagcccgcccagcagcagaggaatatggctacatcgtcactgatcagaatgtggtgggaccagccctcaccttccgcatccggcacaatgagcagaacctgtctttggctgatgtgacccaacaagcagggctggtgaagtctgaactggaagcacagacagggctccaaatcttgcagacaggagtgggacagagggaggaggcagctgcagtccttccccaaactgcgcacagcacctcacccatgcgctcagtgctgctcactctggtggccctggcaggtgtggctgggctgctggtggctctggctgtggctctgtgtgtgcggcagcatgcgcggcagcaagacaaggagcgcctggcagccctggggcctgagggggcccatggtgacactacctttgagtaccaggacctgtgccgccagcacatggccacgaagtccttgttcaaccgggcagagggtccaccggagccttcacgggtgagcagtgtgtcctcccagttcagcgacgcagcccaggccagccccagctcccacagcagcaccccgtcctggtgcgaggagccggcccaagccaacatggacatctccacgggacacatgattctggcatacatggaggatcacctgcggaaccgggaccgccttgccaaggagtggcaggccctctgtgcctaccaagcagagccaaacacctgtgccaccgcgcagggggagggcaacatcaaaaagaaccggcatcctgacttcctgccctatgaccatgcccgcataaaactgaaggtggagagcagcccttctcggagcgattacatcaacgccagccccattattgagcatgaccctcggatgccagcctacatagccacgcagggcccgctgtcccataccatcgcagacttctggcagatggtgtgggagagcggctgcaccgtcatcgtcatgctgaccccgctggtggaggatggtgtcaagcagtgtgaccgctactggccagatgagggtgcctccctctaccacgtatatgaggtgaacctggtgtcggagcacatctggtgcgaggactttctggtgcggagcttctacctgaagaacgtgcagacccaggagacgcgcacgctcacgcagttccacttcctcagctggccggcagagggcacaccggcctccacgcggcccctgctggacttccgcaggaaggtgaacaagtgctaccggggccgctcctgccccatcatcgtgcactgcagtgatggtgcggggaggaccggcacctacatcctcatcgacatggtcctgaaccgcatggcaaaaggagtgaaggagattgacatcgctgccaccctggagcatgtccgtgaccagcggcctggccttgtccgctctaaggaccagtttgaatttgccctgacagccgtggcggaggaagtgaatgccatcctcaaggccctgccccagtgagaccctggggccccttggcgggcagcccagcctctgtccctctttgcctgtgtgagcatctctgtgtacccactcctcactgccccaccagccacctcttgggcatgctcagcccttcctagaagagtcaggaagggaaagccagaaggggcacgcctgcccagcctcgcatgccagagcctggggcatcccagagcccagggcatcccatgggggtgctgcagccaggaggagaggaaaggacatgggtagcaattctacccagagcttctcctgcctacattccctggcctggctctcctgtagctctcctggggttctgggagttccctgaacatctgtgtgtgtccccctatgctccagtatggaagaatggggtggagggtcgccacacccggctccccctgcttctcagccccgggcctgcctctgactcacacttgggcgctctgccctccctggcctcacgcccagcctcctcccaccaccctcccaccatgcgctgctcaacctctctccttctggcgcaagagaacatttctagaaaaaactacttttgtaccagtgtgaataaagttagtgtgttgtctgtgcagctgcaaaaaaaaaaaaaaaaaaaaagaaagaaaaaaaaagagtaaaaagaagggaagaaaaacaatagaaaaaaaaaaagaggggggggggcgacaatattagtactggggggaggaaccattaagctgcaacagcatttttgaaagagagcgccacatagggggactaaataaaagaggggcggtttaaaacatgacggtgacaaacttgttggtatttggaaacacattttgctgggtatgggcacccaagaagtgagccgggaaaaaacaggggtttgggacccattgtgacttttttttaaattgtgtgtagtatggc

SEQ ID NO: 8970 - DNA, 2930 bp, Homo sapiens
aaatcgtctaggtagcgaggcctgggtggtgcggagagaagcctgcttccccagctgtgcagccagatgcggctctgcagaggctggccgctgtgctggcgggctatggggtagagctgcgtcagctgacccctgagcagctctccacactcctgaccctgctgcagctactgcccaagggtgcaggaagaaatccgggaggggttgtaaatgttggagctgatatcaagaaaacaatggaggggccggtggagggcagagacacagcagagcttccagcccgcacatcccccatgcctggacaccccactgccagccctacctccagtgaagtccagcaggtgccaagccctgtctcctctgagcctcccaaagctgccagaccccctgtgacacctgtcctgctagagaagaaaagcccactgggccagagccagcccacggtggcaggacagccctcagcccgcccagcagcagaggaatatggctacatcgtcactgatcagaagcccctgagcctggctgcaggagtgaagctgctggagatcctggctgagcatgtgcacatgtcctcaggcagcttcatcaacatcagtgtggtgggaccagccctcaccttccgcatccggcacaatgagcagaacctgtctttggctgatgtgacccaacaagcagggctggtgaagtctgaactggaagcacagacagggctccaaatcttgcagacaggagtgggacagagggaggaggcagctgcagtccttccccaaactgcgcacagcacctcacccatgcgctcagtgctgctcactctggtggccctggcaggtgtggctgggctgctggtggctctggctgtggctctgtgtgtgcggcagcatgcgcggcagcaagacaaggagcgcctggcagccctggggcctgagggggcccatggtgacactacctttgagtaccaggacctgtgccgccagcacatggccacgaagtccttgttcaaccgggcagagggtccaccggagccttcacgggtgagcagtgtgtcctcccagttcagcgacgcagcccaggccagccccagctcccacagcagcaccccgtcctggtgcgaggagccggcccaagccaacatggacatctccacgggacacatgattctggcatacatggaggatcacctgcggaaccgggaccgccttgccaaggagtggcaggccctctgtgcctaccaagcagagccaaacacctgtgccaccgcgcagggggagggcaacatcaaaaagaaccggcatcctgacttcctgccctatgaccatgcccgcataaaactgaaggtggagagcagcccttctcggagcgattacatcaacgccagccccattattgagcatgaccctcggatgccagcctacatagccacgcagggcccgctgtcccataccatcgcagacttctggcagatggtgtgggagagcggctgcaccgtcatcgtcatgctgaccccgctggtggaggatggtgtcaagcagtgtgaccgctactggccagatgagggtgcctccctctaccacgtatatgaggtgaacctggtgtcggagcacatctggtgcgaggactttctggtgcggagcttctacctgaagaacgtgcagacccaggagacgcgcacgctcacgcagttccacttcctcagctggccggcagagggcacaccggcctccacgcggcccctgctggacttccgcaggaaggtgaacaagtgctaccggggccgctcctgccccatcatcgtgcactgcagtgatggtgcggggaggaccggcacctacatcctcatcgacatggtcctgaaccgcatggcaaaaggagtgaaggagattgacatcgctgccaccctggagcatgtccgtgaccagcggcctggccttgtccgctctaaggaccagtttgaatttgccctgacagccgtggcggaggaagtgaatgccatcctcaaggccctgccccagtgagaccctggggccccttggcgggcagcccagcctctgtccctctttgcctgtgtgagcatctctgtgtacccactcctcactgccccaccagccacctcttgggcatgctcagcccttcctagaagagtcaggaagggaaagccagaaggggcacgcctgcccagcctcgcatgccagagcctggggcatcccagagcccagggcatcccatgggggtgctgcagccaggaggagaggaaaggacatgggtagcaattctacccagagcttctcctgcctacattccctggcctggctctcctgtagctctcctggggttctgggagttccctgaacatctgtgtgtgtccccctatgctccagtatggaagaatggggtggagggtcgccacacccggctccccctgcttctcagccccgggcctgcctctgactcacacttgggcgctctgccctccctggcctcacgcccagcctcctcccaccaccctcccaccatgcgctgctcaacctctctccttctggcgcaagagaacatttctagaaaaaactacttttgtaccagtgtgaataaagttagtgtgttgtctgtgcagctgcaaaaaaaaaaaaaaaaaaaaagaaagaaaaaaaaagagtaaaaagaagggaagaaaaacaatagaaaaaaaaaaagaggggggggggcgacaatattagtactggggggaggaaccattaagctgcaacagcatttttgaaagagagcgccacatagggggactaaataaaagaggggcggtttaaaacatgacggtgacaaacttgttggtatttggaaacacattttgctgggtatgggcacccaagaagtgagccgggaaaaaacaggggtttgggacccattgtgacttttttttaaattgtgtgtagtatggc

SEQ ID NO: 8971 - DNA, 3654 bp, Homo sapiens
agggaggtggggagcggcaagccccgcctcagcccctctggcaggctcccgccagcgtcgctgcggctccggcccgggagcgagcgcccggagctcggaaagatgcggcgcccgcggcggcctgggggtctcgggggatccgggggtctccggctgctcctctgcctcctgctgctgagcagccgcccggggggctgcagcgccgttagtgcccacggctgtctatttgaccgcaggctctgctctcacctggaagtctgtattcaggatggcttgtttgggcagtgccaggtgggagtggggcaggcccggccccttttgcaagtcacctccccagttctccaacgcttacaaggtgtgctccgacaactcatgtcccaaggattgtcctggcacgatgacctcacccagtatgtgatctctcaggagatggagcgcatccccaggcttcgccccccagagccccgtccaagggacaggtctggcttggcacccaagagacctggtcctgctggagagctgcttttacaggacatccccactggctccgcccctgctgcccagcatcggcttccacaaccaccagtgggcaaaggtggagctggggccagctcctctctgtcccctctgcaggctgagctgctcccgcctctcttggagcacctgctgctgcccccacagcctccccacccttcactgagttacgaacctgccttgctgcagccctacctgttccaccagtttggctcccgtgatggctccagggtctcagagggctccccagggatggtcagtgtcggccccctgcccaaggctgaagcccctgccctcttcagcagaactgcctccaagggcatatttggggaccaccctggccactcctacggggaccttccagggccttcacctgcccagctttttcaagactctgggctgctctatctggcccaggagttgccagcacccagcagggccagggtgccaaggctgccagagcaagggagcagcagccgggcagaggactccccagagggctatgagaaggaaggactaggggatcgtggagagaagcctgcttccccagctgtgcagccagatgcggctctgcagaggctggccgctgtgctggcgggctatggggtagagctgcgtcagctgacccctgagcagctctccacactcctgaccctgctgcagctactgcccaagggtgcaggaagaaatccgggaggggttgtaaatgttggagctgatatcaagaaaacaatggaggggccggtggagggcagagacacagcagagcttccagcccgcacatcccccatgcctggacaccccactgccagccctacctccagtgaagtccagcaggtgccaagccctgtctcctctgagcctcccaaagctgccagaccccctgtgacacctgtcctgctagagaagaaaagcccactgggccagagccagcccacggtggcaggacagccctcagcccgcccagcagcagaggaatatggctacatcgtcactgatcagaatgtggtgggaccagccctcaccttccgcatccggcacaatgagcagaacctgtctttggctgatgtgacccaacaagcagggctggtgaagtctgaactggaagcacagacagggctccaaatcttgcagacaggagtgggacaggacctgtgccgccagcacatggccacgaagtccttgttcaaccgggcagagggtccaccggagccttcacgggtgagcagtgtgtcctcccagttcagcgacgcagcccaggccagccccagctcccacagcagcaccccgtcctggtgcgaggagccggcccaagccaacatggacatctccacgggacacatgattctggcatacatggaggatcacctgcggaaccgggaccgccttgccaaggagtggcaggccctctgtgcctaccaagcagagccaaacacctgtgccaccgcgcagggggagggcaacatcaaaaagaaccggcatcctgacttcctgccctatgaccatgcccgcataaaactgaaggtggagagcagcccttctcggagcgattacatcaacgccagccccattattgagcatgaccctcggatgccagcctacatagccacgcagggcccgctgtcccataccatcgcagacttctggcagatggtgtgggagagcggctgcaccgtcatcgtcatgctgaccccgctggtggaggatggtgtcaagcagtgtgaccgctactggccagatgagggtgcctccctctaccacgtatatgaggtgaacctggtgtcggagcacatctggtgcgaggactttctggtgcggagcttctacctgaagaacgtgcagacccaggagacgcgcacgctcacgcagttccacttcctcagctggccggcagagggcacaccggcctccacgcggcccctgctggacttccgcaggaaggtgaacaagtgctaccggggccgctcctgccccatcatcgtgcactgcagtgatggtgcggggaggaccggcacctacatcctcatcgacatggtcctgaaccgcatggcaaaaggagtgaaggagattgacatcgctgccaccctggagcatgtccgtgaccagcggcctggccttgtccgctctaaggaccagtttgaatttgccctgacagccgtggcggaggaagtgaatgccatcctcaaggccctgccccagtgagaccctggggccccttggcgggcagcccagcctctgtccctctttgcctgtgtgagcatctctgtgtacccactcctcactgccccaccagccacctcttgggcatgctcagcccttcctagaagagtcaggaagggaaagccagaaggggcacgcctgcccagcctcgcatgccagagcctggggcatcccagagcccagggcatcccatgggggtgctgcagccaggaggagaggaaaggacatgggtagcaattctacccagagcttctcctgcctacattccctggcctggctctcctgtagctctcctggggttctgggagttccctgaacatctgtgtgtgtccccctatgctccagtatggaagaatggggtggagggtcgccacacccggctccccctgcttctcagccccgggcctgcctctgactcacacttgggcgctctgccctccctggcctcacgcccagcctcctcccaccaccctcccaccatgcgctgctcaacctctctccttctggcgcaagagaacatttctagaaaaaactacttttgtaccagtgtgaataaagttagtgtgttgtctgtgcagctgcaaaaaaaaaaaaaaaaaaaaagaaagaaaaaaaaagagtaaaaagaagggaagaaaaacaatagaaaaaaaaaaagaggggggggggcgacaatattagtactggggggaggaaccattaagctgcaacagcatttttgaaagagagcgccacatagggggactaaataaaagaggggcggtttaaaacatgacggtgacaaacttgttggtatttggaaacacattttgctgggtatgggcacccaagaagtgagccgggaaaaaacaggggtttgggacccattgtgacttttttttaaattgtgtgtagtatggc

SEQ ID NO: 8972 - DNA, 1888 bp, Homo sapiens
agggaggtggggagcggcaagccccgcctcagcccctctggcaggctcccgccagcgtcgctgcggctccggcccgggagcgagcgcccggagctcggaaagatgcggcgcccgcggcggcctgggggtctcgggggatccgggggtctccggctgctcctctgcctcctgctgctgagcagccgcccggggggctgcagcgccgttagtgcccacggctgtctatttgaccgcaggctctgctctcacctggaagtctgtattcaggatggcttgtttgggcagtgccaggtgggagtggggcaggcccggccccttttgcaagtcacctccccagttctccaacgcttacaaggtgtgctccgacaactcatgtcccaaggattgtcctggcacgatgacctcacccagtatgtgatctctcaggagatggagcgcatccccaggcttcgccccccagagccccgtccaagggacaggtctggcttggcacccaagagacctggtcctgctggagagctgcttttacaggacatccccactggctccgcccctgctgcccagcatcggcttccacaaccaccagtgggcaaaggtggagctggggccagctcctctctgtcccctctgcaggctgagctgctcccgcctctcttggagcacctgctgctgcccccacagcctccccacccttcactgagttacgaacctgccttgctgcagccctacctgttccaccagtttggctcccgtgatggctccagggtctcagagggctccccagggatggtcagtgtcggccccctgcccaaggctgaagcccctgccctcttcagcagaactgcctccaagggcatatttggggaccaccctggccactcctacggggaccttccagggccttcacctgcccagctttttcaagactctgggctgctctatctggcccaggagttgccagcacccagcagggccagggtgccaaggctgccagagcaagggagcagcagccgggcagaggactccccagagggctatgagaaggaaggactaggggatcgtggagagaagcctgcttccccagctgtgcagccagatgcggctctgcagaggctggccgctgtgctggcgggctatggggtagagctgcgtcagctgacccctgagcagctctccacactcctgaccctgctgcagctactgcccaagggtgcaggaagaaatccgggaggggttgtaaatgttggagctgatatcaagaaaacaatggaggggccggtggagggcagagacacagcagagcttccagcccgcacatccccctatgctccagtatggaagaatggggtggagggtcgccacacccggctccccctgcttctcagccccgggcctgcctctgactcacacttgggcgctctgccctccctggcctcacgcccagcctcctcccaccaccctcccaccatgcgctgctcaacctctctccttctggcgcaagagaacatttctagaaaaaactacttttgtaccagtgtgaataaagttagtgtgttgtctgtgcagctgcaaaaaaaaaaaaaaaaaaaaagaaagaaaaaaaaagagtaaaaagaagggaagaaaaacaatagaaaaaaaaaaagaggggggggggcgacaatattagtactggggggaggaaccattaagctgcaacagcatttttgaaagagagcgccacatagggggactaaataaaagaggggcggtttaaaacatgacggtgacaaacttgttggtatttggaaacacattttgctgggtatgggcacccaagaagtgagccgggaaaaaacaggggtttgggacccattgtgacttttttttaaattgtgtgtagtatggc

SEQ ID NO: 8973 - DNA, 677 bp, Homo sapiens
agggaggtggggagcggcaagccccgcctcagcccctctggcaggctcccgccagcgtcgctgcggctccggcccgggagcgagcgcccggagctcggaaagatgcggcgcccgcggcggcctgggggtctcgggggatccgggggtctccggctgctcctctgcctcctgctgctgagcagccgcccggggggctgcagcgccgttagtgcccacggctgtctatttgaccgcaggctctgctctcacctggaagtctgtattcaggatggcttgtttgggcagtgccaggtgggagtggggcaggcccggccccttttgcaagtcacctccccagttctccaacgcttacaaggtgtgctccgacaactcatgtcccaagagtaagaggtggaaccctagagatgggctattcacatttggactctctggagaagcccagaggagccttctaagaagaagtcactggaaaaggccagcttccatcttcttaggaccagttcctctcactggcattgtctgagtgctacagagccaagaactctggaatcctcagccaggataatattccactcacccaattcctcattcaacaagtatttattgagtacttactatgtagcaggcatagttttaggtatttggaatgtatcgggaataaaacaaagatctctgct

SEQ ID NO: 8974 - DNA, 3760 bp, Homo sapiens
agggaggtggggagcggcaagccccgcctcagcccctctggcaggctcccgccagcgtcgctgcggctccggcccgggagcgagcgcccggagctcggaaagatgcggcgcccgcggcggcctgggggtctcgggggatccgggggtctccggctgctcctctgcctcctgctgctgagcagccgcccggggggctgcagcgccgttagtgcccacggctgtctatttgaccgcaggctctgctctcacctggaagtctgtattcaggatggcttgtttgggcagtgccaggtgggagtggggcaggcccggccccttttgcaagtcacctccccagttctccaacgcttacaaggtgtgctccgacaactcatgtcccaaggattgtcctggcacgatgacctcacccagtatgtgatctctcaggagatggagcgcatccccaggcttcgccccccagagccccgtccaagggacaggtctggcttggcacccaagagacctggtcctgctggagagctgcttttacaggacatccccactggctccgcccctgctgcccagcatcggcttccacaaccaccagtgggcaaaggtggagctggggccagctcctctctgtcccctctgcaggctgagctgctcccgcctctcttggagcacctgctgctgcccccacagcctccccacccttcactgagttacgaacctgccttgctgcagccctacctgttccaccagtttggctcccgtgatggctccagggtctcagagggctccccagggatggtcagtgtcggccccctgcccaaggctgaagcccctgccctcttcagcagaactgcctccaagggcatatttggggaccaccctggccactcctacggggaccttccagggccttcacctgcccagctttttcaagactctgggctgctctatctggcccaggagttgccagcacccagcagggccagggtgccaaggctgccagagcaagggagcagcagccgggcagaggactccccagagggctatgagaaggaaggactaggggatcgtggagagaagcctgcttccccagctgtgcagccagatgcggctctgcagaggctggccgctgtgctggcgggctatggggtagagctgcgtcagctgacccctgagcagctctccacactcctgaccctgctgcagctactgcccaagggtgcaggaagaaatccgggaggggttgtaaatgttggagctgatatcaagaaaacaatggaggggccggtggagggcagagacacagcagagcttccagcccgcacatcccccatgcctggacaccccactgccagccctacctccagtgaagtccagcaggtgccaagccctgtctcctctgagcctcccaaagctgccagaccccctgtgacacctgtcctgctagagaagaaaagcccactgggccagagccagcccacggtggcaggacagccctcagcccgcccagcagcagaggaatatggctacatcgtcactgatcagaatgtggtgggaccagccctcaccttccgcatccggcacaatgagcagaacctgtctttggctgatgtgacccaacaagcagggctggtgaagtctgaactggaagcacagacagggctccaaatcttgcagacaggagtgggacagagggaggaggcagctgcagtccttccccaaactgcgcacagcacctcacccatgcgctcagtgctgctcactctggtggccctggcaggtgtggctgggctgctggtggctctggctgtggctctgtgtgtgcggcagcatgcgcggcagcaagacaaggagcgcctggcagccctggggcctgagggggcccatggtgacactacctttgagtaccaggacctgtgccgccagcacatggccacgaagtccttgttcaaccgggcagagggtccaccggagccttcacgggtgagcagtgtgtcctcccagttcagcgacgcagcccaggccagccccagctcccacagcagcaccccgtcctggtgcgaggagccggcccaagccaacatggacatctccacgggacacatgattctggcatacatggaggatcacctgcggaaccgggaccgccttgccaaggagtggcaggccctctgtgcctaccaagcagagccaaacacctgtgccaccgcgcagggggagggcaacatcaaaaagaaccggcatcctgacttcctgccctatgaccatgcccgcataaaactgaaggtggagagcagcccttctcggagcgattacatcaacgccagccccattattgagcatgaccctcggatgccagcctacatagccacgcagggcccgctgtcccataccatcgcagacttctggcagatggtgtgggagagcggctgcaccgtcatcgtcatgctgaccccgctggtggaggatggtgtcaagcagtgtgaccgctactggccagatgagggtgcctccctctaccacgtatatgagctggccggcagagggcacaccggcctccacgcggcccctgctggacttccgcaggaaggtgaacaagtgctaccggggccgctcctgccccatcatcgtgcactgcagtgatggtgcggggaggaccggcacctacatcctcatcgacatggtcctgaaccgcatggcaaaaggagtgaaggagattgacatcgctgccaccctggagcatgtccgtgaccagcggcctggccttgtccgctctaaggaccagtttgaatttgccctgacagccgtggcggaggaagtgaatgccatcctcaaggccctgccccagtgagaccctggggccccttggcgggcagcccagcctctgtccctctttgcctgtgtgagcatctctgtgtacccactcctcactgccccaccagccacctcttgggcatgctcagcccttcctagaagagtcaggaagggaaagccagaaggggcacgcctgcccagcctcgcatgccagagcctggggcatcccagagcccagggcatcccatgggggtgctgcagccaggaggagaggaaaggacatgggtagcaattctacccagagcttctcctgcctacattccctggcctggctctcctgtagctctcctggggttctgggagttccctgaacatctgtgtgtgtccccctatgctccagtatggaagaatggggtggagggtcgccacacccggctccccctgcttctcagccccgggcctgcctctgactcacacttgggcgctctgccctccctggcctcacgcccagcctcctcccaccaccctcccaccatgcgctgctcaacctctctccttctggcgcaagagaacatttctagaaaaaactacttttgtaccagtgtgaataaagttagtgtgttgtctgtgcagctgcaaaaaaaaaaaaaaaaaaaaagaaagaaaaaaaaagagtaaaaagaagggaagaaaaacaatagaaaaaaaaaaagaggggggggggcgacaatattagtactggggggaggaaccattaagctgcaacagcatttttgaaagagagcgccacatagggggactaaataaaagaggggcggtttaaaacatgacggtgacaaacttgttggtatttggaaacacattttgctgggtatgggcacccaagaagtgagccgggaaaaaacaggggtttgggacccattgtgacttttttttaaattgtgtgtagtatggc

SEQ ID NO: 8975 - DNA, 542 bp, Homo sapiens
  misc_feature (125)..(125): n is a, c, g, or t
gcgcggtgccacgaagcactctggccttcgcgggcgccgctgtccagacgacgcaggcggggcgccgtggactctgtaaactctccgggccagaatcgtgtgccggtaaactagtcaggtcaggntcgtgtgattgtaaactagtcaggtcagggtcgtgtgattgtaaactagtcaggtcagggtcgtgtgattgtaaactagtcaggtcagggtcgtgtgattgtaaactagtcaggtcagggtcgtgtgattgtaaactagtcaggtcaggatcgtgtgattgtaaactagtcaggtcagggtcgtgtgattgtaaactagtcaggtcagggtcgtgtgattgtaaactagtcaggtcaggatcgtgtgattgtaaactagtcaggtcagggtcgtgtgattgtaaactagtcaggtcagggtcgtgtgattgtaaactagtcaggtcaggatcgtgtgattgtaaactagtcaggtcaggatcgtgtgattgtaaactagtcaggtcagggtcgtgtgattgtaaactagtaaggtca

SEQ ID NO: 8976 - DNA, 508 bp, Homo sapiens
tttggtaaagtgaatgtatgttttccgattctgtggtttgtatagtctcaaagaacatgtaaaagttacctagtcatttttgtttagttctactgggctggactgtgtcttccaaagttcatacgctgaagttctaacccctagtacctcagaataagactgtgtttaaagatagggtttttaaggaaataattaaattaaaattgggtaattcgggctggtcttgatagagtaggactggtgtccttttaagaagtcaaactttgaacaaagagtcaaacatagagggaaggccatgtgaagatgcggggagaagatggccacccacaggtctcagagaaaggcatagaaccagtgcttccttcatggccctcagaaggaacctaccctctgtcgccttgatcttagacttctagactttagaactatgaagaaatatatttgtgtcacttcagccaccctgtcagtggtgctttgtaatgacagccctagaaaacgaatacaccta

SEQ ID NO: 8977 - DNA, 433 bp, Homo sapiens
gaatcatgtagtaaatataattcattttttgaaaggttcagctatatcctcttccatttgtttattttaaatgatctaattgcaaacatgtcatcactcccttgatgtttacctccttgttatgcatttttagcaggctttattgtcacctgagattttttttttctttgacaggctggagtctagatgaaggaaaatgtgttagaagcaccttatccacagatggggacacttggtcattcagcacatgttgagcttaggcaggcatcagggtctggctgcttacctgcttttattcacacctgcctgtttaggtggcctgcactgaacttctagaatgagtccaacctgatcatttactgtctctgaaagaaattatgctaatagagaaaaacggccagttgggatcacttgctgagccaagtaacttctt

SEQ ID NO: 8978 - DNA, 379 bp, Homo sapiens
tcaaatgattctctaccctcagcatcccaagtagctggaactacaaacacacgccaccatgactggctagtttatttatttttctgtggagacaggctctcactatgttgcccaggctggtcctgaactcctggcctcaactgaccctcctgcctttgccttccaaagtgttagaattacaggcaaaagccagtgcacatggccattatttatcatctctctgcaggtcattccttgactatccttctgaggctggaatttccaattgctttttgaaattctcacaccattgccttttcattcatttattcatccactcaaaaatatttattgagtgctaccgaaacatgtttaaaactatctacttaaataaaataaa

SEQ ID NO: 8979 - DNA, 474 bp, Homo sapiens
gcattcaagcaagaaagcctgggccctttgcaccctgaagggcctaactgacagaaaatgaacaggagctccctggaaggggtcttcacttggacaagatgctgttacctaagaagcaactagtcaagtcatttctgcaggactcctggctgatgggtgctatcaagttccaacaggaaagcagacttttacaccacagacttttaagtgctattagaattaaacagaaggaggaggaagaaaggaacaagaaggagaagaaagacaaagagaaggagagcatatttcccagctatggcccttttcactactttaaaagcaaaaccatcaaagaatgggcacctttctatgggtatgacttttatccccttgtcctctagatttattgcttgcaccacgtagcttccaccataaaactcttctttccaatagactgctatctgaatatcaagagcaagactctccagtaacata

SEQ ID NO: 8980 - DNA, 482 bp, Homo sapiens
cagaatcaccagctcccttgctgttccttccccatccctgccatcaagacagagccatttgctgctgtccatccatgttatggctcaagggctcagacatggtatagggaagatgggagcagggaaagacatgaactgctgtgctgtgtgacaaggccaggggtgtcactgaggatgcaacaggaagcaggcaggcaggtgagagaagctggggaggcgggagatagagagttattctagcacagcagtgaatgaattcagtttgaatgaagcacagaagtaaatgtttggacagcggaaccaggtttcatgatctttgagttgtcctcataacatgttggaactaggtattgaaaagtctgaggtaatctgaagcttagaaaggcacaatctatcaagttaacttaaaggaaaggaaggtgttaacaaaattagaaagtgctgttttagaaacagccctagatattttccaaaaaagcctt

SEQ ID NO: 8981 - DNA, 2231 bp, Homo sapiens
cacgaggtctaactataaatcaaaacccagaagtaatcaagaaaacaactagcaattagactacatacaaaaattttaaaatcctttctgatgaaaatcaccgtaaacaaaagataaatgacaaacagggaaaacatttgcaactctgttccctcattcagctactatttattcaatgcctactatatgccagctactcttctaggtgtttgagacatcatagtgaacaaaacagagagttaattgccctaatatacaaagagtttctagaaatcagtttttagataatcaacagcaaatggtataaacagacagcttacagttaaggaaacaagaaacccaataccatgtgaaaaaattttcagccttgcttataaaaagtgacgaaacaagatgaaactacactgaaatacaaattttcacatatcagattagcagaaaccccaaaattgtattgctcacagtgctggtacaagtgtggagcatgggcagcctcatgtgttactggtaggtggtaatgacacatgaataaagatataataggctaaaaagtatgttgttttactaatagttaattacaatatcaaaggaagatacaatgctaagttggtactattgtagtagctatcagagtgcagtttaccaaacagcaatttatcctacacataaactgcagacctaaacaataatacatatacatagttattttttgcaccattgtttgcaaacaacctaaataccagtcacctctatggcattcctcctccaaaatttgtattccctcatctaaatcatgagaaaagacaaaaccaaactgaaaaaggacttctacaaaatacatcaccagccgtcttcaaaagcatcaaggtcatgaaaaacaaggcagaaaaactccagagtggaggagaccaaggaggagtaggttctggagaagacaaaggacacttgggcaatctaaagtctggagttcacttaacagtatcaacccaatgttaatttcttagtttgatgaatgcatcgtgattatataacattagaggaagctgggtgaaaggtctcaacctcagcaccactgacattgagggcagatcattcttggttgtggggactgtcctgtgcattgcaggatgtttaattgcatccctggcctcgactcactgagtgcctatagtaccacctccccaggtcatgacaaccaaaaatgtctccagacattctccactgtcaattgcaaactcaccccttgttgaacaccactgatagacactaatccctaatatcaactaaccaatgaaatgctgtacctcttgttgtatgagaagaagaaacagacatcttctcaagtctatgagaatggcttttaactaatcaacaccttgattaaccagtagaaggcatatttagtgatgattcgcttatgactgcctgtacctcaccgggacaaaattgtggtttgttagagagtctttagccacaaacagaataacaaccactggcttatattgcaaaaaggatatgggaaattctatagatattggaaagaaaaatatattataagaagtctaggccgggtgcggtggctcattcctgtaaccgcagcactttgggaggctgaggcaggcggatcacctgatgtcaggagttcaagaccagcctggccaacatggtgaaaccccgtctctactaaaaatacaaaaaattagctgggcgtggtggtgggcgcctgtaatcccagctacttgggaggctgaggcaggagaattgcttgaacccgggaggcggaggttgcagtgggccaagatcacgccattgcactacagcctgggcaacaagagcgaaactccatctcaaaaaaaaaaaaaaaaaaaaagtctatacctactctgatgccattatcttgagatgtcttagatatgaataaaaagtcattccactcattatgagaactgtctttagaagaaaattatactgaattataccataggaatatctctaggttttgaaaatcatatacccagagatgattccataaataaggaatcaggcaaaaaaccaaaggaattcattggtgagaggagagtgttagggatctcattcccctgcaactactggctgaccccaaccctgcattgcaaaacacttggccccctctgacctcaaaaagcatttggtgcttcctcattaagctctatttattgtctttactattcacccatctgcctcagtctggg

SEQ ID NO: 8982 - DNA, 1461 bp, Homo sapiens
cacgaggtctaactataaatcaaaacccagaagtaatcaagaaaacaactagcaattagactacatacaaaaattttaaaatcctttctgatgaaaatcaccgtaaacaaaagataaatgacaaacagggaaaacatttgcaactctgttccctcattcagctactatttattcaatgcctactatatgccagctactcttctaggtgtttgagacatcatagtgaacaaaacagagagttaattgccctaatatacaaagagtttctagaaatcagtttttagataatcaacagcaaatggtataaacagacagcttacagttaaggaaacaagaaacccaataccatgtgaaaaaattttcagccttgcttataaaaagtgacgaaacaagatgaaactacactgaaatacaaattttcacatatcagattagcagaaaccccaaaattgtattgctcacagtgctggtacaagtgtggagcatgggcagcctcatgtgttactggtaggtggtaatgacacatgaataaagatataataggctaaaaagtatgttgttttactaatagttaattacaatatcaaaggaagatacaatgctaagttggtactattgtagtagctatcagagtgcagtttaccaaacagcaatttatcctacacataaactgcagacctaaacaataatacatatacatagttattttttgcaccattgtttgcaaacaacctaaataccagtcacctctatggcattcctcctccaaaatttgtattccctcatctaaatcatgagaaaagacaaaaccaaactgaaaaaggacttctacaaaatacatcaccagccgtcttcaaaagcatcaaggtcatgaaaaacaaggcagaaaaactccagagtggaggagaccaaggaggagtaggttctggagaagacaaaggacacttgggcaatctaaagtctggagttcacttaacagtatcaacccaatgttaatttcttagtttgatgaatgcatcgtgattatataacattagaggaagctgggtgaaaggtctcaacctcagcaccactgacattgagggcagatcattcttggttgtggggactgtcctgtgcattgcaggatgtttaattgcatccctggcctcgactcactgagtgcctatagtaccacctccccaggtcatgacaaccaaaaatgtctccagacattctccactgtcaattgcaaactcaccccttgttgaacaccactgatagacactaatccctaatatcaactaaccaatgaaatgctgtacctcttgttgtatgagaagaagaaacagacatcttctcaagtctatgagaatggcttttaactaatcaacaccttgattaaccagtagaaggcatatttagtgatgattcgcttatgactgcctgtggttaaggcgggtatactctagagtcgccatc

SEQ ID NO: 8983 - DNA, 428 bp, Homo sapiens
tttcaatcccatctgaatagaatacagaacaagagaatggtacctaaacactaaagggtaaagtttacttccagcaaaaattgcatgaaataatgagagaagaaaattgtgcacataacaagcaagaatatgtacatcagccgggcacggtggctcacgcctgtaatcccagcactttgggaggccgaggtgggtggatcatgaggttaggagttcgagaccagcctggccaatatggtgaaacccccatctgtactaaaaatacaaaaattaggtgggcgtggtggcgcgcgccagtagtcccagctgctcaggaggctgaggcaggagaatcgtctgaacccaggaggaggaggttgcagtgagctgagatagcgccactgtactccagcctgggcgacagagtgagacttcgtctcaaaaaaaaa

SEQ ID NO: 8984 - DNA, 1270 bp, Homo sapiens
tatattagaaaaaatacttgtgaagaattctagatgaaataatattcaagagaaatcagatgttttttaatgtaccagaatttctattcaggaatatgaaaatattttaaggcaaggtgcggtggctcattcctgtaattccagcactttggtagaccaagacaggtggattgcttgagtctagaagagaccagcttgggcaacatggcaaaaccccatctctacaaaaaaaaccacataaattagccaagggtggtggttcacacccgtagtcccagctactgggcggcggcggaggggttgagggttaggggtcaggggagacctgaggcaggaggattgcatgaacctgggggaggtcgaggctgcagtgagctgagatcacaccactgcgctccagcttggggtgacagaatgagatcttgtctccaagattaaaaaaaaaagaggaaaagaaattatttttaaatactgcttagttgtgagttacactttgacatctgtgcttatgaaggcaggtagggatctgcaaaacaagtaatgtcagattgaaaatagcagcaccattttatatccagtgaaaagacttgtatgaaataagcctttattgatttgtttatagataaaattttttaaatattaagtatattataaaaatgcagtcattgttgtattttgcctgtattaatcctttcactcacattcactcattttttgcctcaacttattgtctaaaaagtaagattggtactctgattttttttatttttgcttttttaagtctgtttaatgtctaaggaacgtaactagttagaacagctacttatttggcaatctcaagttatgggaagcatagctgagaatcaagaaaaaagcaaaataataataaataaataattatataaaaggatagttgagtctcagcaaataactaaacctgtgctctaaaaccctaagcactttaagtagaaagtagcctctaagtccccactccatatctttttactctttacacacatacacgcacacacacgcacagacgtatacacacacacaaaactttgcctctcccccttctttagtgaaaataacatttgtacatggtggtagatgtagatagtacaaaagaatgttgagtgataaattcatgtgagacaattttaataaacatgtttccctgcctactccagatttgagtaacaagttaaaaggtggacaagcactttgataatagcaaatagggtcaactgaaacagcaacaacaacaaca

SEQ ID NO: 8985 - DNA, 452 bp, Homo sapiens
ggttaagtaacttactcaaaaccagagttggcaacaggtgataagagctaaaatttaaacaaaggtctgtctgatttcaagtgcaaattcctagccactgtatcatcctgcctgtggcctgctcctgagaggtagagatctgcataggtcttggccatacaaaaagacatctggttggttgtcttgggtgctttgatggttcatttgtttactgtctgtgtctgtcttctccctcagcacctaccatatgcatgacacatactcaacaaatatttattgaatgaggctggggacagtggctcatgcttataatcttaccgctttgggaggctgaggtgggtggatctcttgagcccaggaattcaagaccaacctgcgcaacatggtgaaacctcatctctacaaaaaaatgcaaaaatcagctgggcatggtagcttgtaccttagtcccc

SEQ ID NO: 8986 - DNA, 4070 bp, Homo sapiens
  misc_feature (52)..(52): n is a, c, g, or t
acggccattcagctggtgccaaaggcagagttagagtctgtgctgtgggccntggaagatgggaggaggggcttgaggtttgcaaaggactgggagttcctgaggaagggggaatctgcctcttgttgccatgggcagctgttgtaggagcaggagagaaaggagggtgggtggtctcgaaaagaatattgggcaaaacctagccaattggccttagctgggagaagtagtgactcctgcatccttttttaaggtttaggaacctgagttcagaaacacctctcatggaagctgtactagttgtgatttacttaattccttaagttccatgacctgaagttaaccccgttcttcctctgctctcaacccattgccccttgagataactgtacatgtcactctgatcatggtaacagcatccctattgcttctgccagctgtcatggcaatcgtgtttcccatcacctgggcggttcagagccagtcatgggctgctgaatttaatggagcatgtttccaggttcttcatggcaaactgtactcatgacttaggagtgagtgttacttccatgtgcctgtcagcttgtgagggggaatgtggaggaaggtgagaaatacagctcccacagttgtgctcttcctagaggaagctctcagaacgcagccctcacgggatttccttaggtcagaggagagcatcgcatctcacgtttttaggtttatcactgccatcccacttctgggatgggaggtagcaagggcttctgtattttcttgtgttcattctagcaacccagacatttccggatcagatcctgctggtctccactcactggaaagtctgccagatgccgatttgagagctgcctgtccctgctttcaggaggagcggggagaaaaactccaatggtctttaatggtttctgcagctggccatggccaattcatatgacattgtgagtttgctttcttatagagctgctctggggagaggtttgctattgagatgtaacagtggagctgttgggtcttcatgactcctttgcgtgtgttccatgggactctctttctgggttccccatgcttatagttgcctcgtgtcacaagacagatactaatgtcaggtttgtggcttcctgatggtttgggtggggccccagtgtcctggtaatttataggactgcctcatctgggagcattgccttcttccttagtcccacgtggagtgaccagtcttcctccttgtagctgaacagggaggaaacttgcaccattacctgactgtggaagggtggcccacaagatgagctgtgcaccataaacacagcccacctctgatttgtcatgtggtacctcttctttccttggcttccatggtagtattatcaactaagcaagattgtgatcccagaaattggcttagcatgtgagtgttgcctcgtgagagtacaagtaatataactcgccatcttgcaggaagtgccaccccaatatagagcctgaagttggaatctgttgagatccttgggtggctgatatacagcctgggatctttcttttttttgttccttttcaaccacccataattttaatattattttttagtgtgtgtgtgcctggctttgcgctagatattgtagaaaacaaaaaaggtaaaagacgtaatatgtggcctaagggagcttttaggtgactgctgcacatcaagcagaaaatcaaggactatctaaagacgtttatagtagataagatcagggtagaccagatggtctgggaaagttctgtgcctctgaggctttgggttgtagtcaatggcaggacagacagtgagatgaaaaacacatgagcaaaagcaaggaagcagaaatctgcatggcatgtactgaacagtgcacagccctgttagagcaacatggttaaagaatcctttccagtgcggttttctagatggaagcttcccagccaccaggcagacctgagtgccaaggggttatgatggtgaggtggagcccaaagcccaaaggagtcagcaaggctcctgcccattgccagggcctcactatggtcagctcaggccatgtgagggaggcagagcctctgcaccccctgtgttactggggtttcttctggagaactcatacattcaggtacaaaacaaaccaactgaggaggtgtgacccaacctcaccacccacctttctcctcctggggagtgtcgtgttgaactgtgtctgtgtcagtgcactggtcccagccctggccgcagcctagtcctttctctgtggagtgggctgcaaaacagcagcgcaagaggagacagtcttcgtcaggtgtgggtgtttggtgcctgcatgggtggccttgcacagagcagttaggggaagatgagggggaggcatggggctgggccagctctctgggatacagcctggtcagagagtaaatggagcagaggagcaggtgtggcagcacctgcccttcacctccctgaccaggcccgtccctccttcgccagtgctgtgcagagctcatttaaatgtattcctttctaggtctgggcgcggtggctcacgcctgtaatcccagcactttgggaggctgaggtgggtggatcatgaggtcgggagttcaagaccagcttggccaaacagtgaaaccctatctctactaaaatacaaaaattagctgggcatggtggcatgcgcctgtagtcccagctacttgggaggctgagacaggagaattgcttgaacccaggaggcggaggttgcactgagccgagattgcgccactgccctctagcctagacgacagagtgagactccatctcaaaaaaaataaataatttctttctggttgtattttcaagtcacaaattggaaaaggcttacatctagggacccactgttgattcctaagttgtgggtgggtgatatcagtggcctcagtgcctgcataaccctcacctgtttatgactgatctactgtaaccttcctcaggttgagagtgagctgctgtgagccagtgacaactactgctacaacttgctgttacttgaaattcgtgtgctatgttggtagcacaggagtaggcgggcgggggttttggtgtgggcactaggtaagtgggtggcaaccggctctttgggaccattggtgctgacctttgcctggtcacctgcctgtgcctaggccaagtgaatgttacatcttggaacctgagccatggaggtggcgccacctccctgaggagaaaggtgtggccaaaggaaactcctgcatggctcctgctccttccccttccctacatttcacttgggctaatgatgtaagccccccttgaggttggggatggtgtggagatagctgcagacacccctgtaacagacatccaggaagaattagggagtgggggtaattatagttcctaggtctaggggtgagaggtgggagtagaaccagaagtgccctggaatccagccgtgtcagccctcaccccagggcccccaggaaagcatggcctgcttgaagccctctgctccctgcagaaactggggcgaggaggagctttttccttcagttagatctttcccttccctgctgcctcgctcccttagctttggagccctaaagttagtggacaagacactgggataaagctctatggctgctggaaggaggtctgagtctgtgtgtgtgcatatgcatgcatgtgtgtgtgtgtgtgtgtcctcatttgcagaagtcttgctaccagttagggtgttaagagcatctccactgggcggagacctggcatttgttttccactgttaagagaatgacacaccccctgtcatgtaagggaggagctattgagttagacattttccctatgggaatcctcggtttggtttgtgggaaaggagggaatggataagtgatttttatctctaatcgtcaacacagctgttcttccactgaatttgtgctattgcatacatgtagccatctttcttttcactgcagcagtgtttatcagtagttcaaaatgatttatttgctcctggggagtaaaaccttttttatta

SEQ ID NO: 8987 - DNA, 532 bp, Homo sapiens
agcgtggcctggcttttgtcttcccatttagttttcctcttttacccttccttttgtgcttaatttattaaaatagttgctgtataatttattttcataaactataaaaaaatactaaatggttaaaatagacttgcaggccaatcttaaatggggtgggaggggtctgagggtgggatggggaaagggaaagaggttttgatataaacaaaacaaatgcactttgggtgtgttttggtatttttctggggatagagggggtggggttagggatgtccctgtagattagttccagaatggggtgtctgtatatactgtattaataggcatgtttgactctcgtaaagggacgttagtagctgctgcaggtcctgtttggaaaccccatgtacaattcccagttttttgtaagtgtcagtgcgagagacatttgactcttgtgtttgtatctcctttttatgattgctgtacctacccatgtctttttggggaggggtgaaaagagatttgaaataaaaatgtttagaaatta

SEQ ID NO: 8988 - DNA, 236 bp, Homo sapiens
  misc_feature (35)..(35): n is a, c, g, or t
  misc_feature (58)..(58): n is a, c, g, or t
  misc_feature (69)..(69): n is a, c, g, or t
cgtccctttacgagagtcaaacatgcctattaatncagtatatacagacaccccattntggaactaatntacagggacatccctaaccccatgtacaattcccagttttttgtaagtgtcagtgcgagagacatttgactcttgtgtttgtatctcctttttatgattgctgtacctacccatgtctttttggggaggggtgaaaagagatttgaaataaaaatgtttagaaatta

SEQ ID NO: 8989 - DNA, 5389 bp, Homo sapiens
  misc_feature (52)..(52): n is a, c, g, or t
acggccattcagctggtgccaaaggcagagttagagtctgtgctgtgggccntggaagatgggaggaggggcttgaggtttgcaaaggactgggagttcctgaggaagggggaatctgcctcttgttgccatgggcagctgttgtaggagcaggagagaaaggagggtgggtggtctcgaaaagaatattgggcaaaacctagccaattggccttagctgggagaagtagtgactcctgcatccttttttaaggtttaggaacctgagttcagaaacacctctcatggaagctgtactagttgtgatttacttaattccttaagttccatgacctgaagttaaccccgttcttcctctgctctcaacccattgccccttgagataactgtacatgtcactctgatcatggtaacagcatccctattgcttctgccagctgtcatggcaatcgtgtttcccatcacctgggcggttcagagccagtcatgggctgctgaatttaatggagcatgtttccaggttcttcatggcaaactgtactcatgacttaggagtgagtgttacttccatgtgcctgtcagcttgtgagggggaatgtggaggaaggtgagaaatacagctcccacagttgtgctcttcctagaggaagctctcagaacgcagccctcacgggatttccttaggtcagaggagagcatcgcatctcacgtttttaggtttatcactgccatcccacttctgggatgggaggtagcaagggcttctgtattttcttgtgttcattctagcaacccagacatttccggatcagatcctgctggtctccactcactggaaagtctgccagatgccgatttgagagctgcctgtccctgctttcaggaggagcggggagaaaaactccaatggtctttaatggtttctgcagctggccatggccaattcatatgacattgtgagtttgctttcttatagagctgctctggggagaggtttgctattgagatgtaacagtggagctgttgggtcttcatgactcctttgcgtgtgttccatgggactctctttctgggttccccatgcttatagttgcctcgtgtcacaagacagatactaatgtcaggtttgtggcttcctgatggtttgggtggggccccagtgtcctggtaatttataggactgcctcatctgggagcattgccttcttccttagtcccacgtggagtgaccagtcttcctccttgtagctgaacagggaggaaacttgcaccattacctgactgtggaagggtggcccacaagatgagctgtgcaccataaacacagcccacctctgatttgtcatgtggtacctcttctttccttggcttccatggtagtattatcaactaagcaagattgtgatcccagaaattggcttagcatgtgagtgttgcctcgtgagagtacaagtaatataactcgccatcttgcaggaagtgccaccccaatatagagcctgaagttggaatctgttgagatccttgggtggctgatatacagcctgggatctttcttttttttgttccttttcaaccacccataattttaatattattttttagtgtgtgtgtgcctggctttgcgctagatattgtagaaaacaaaaaaggtaaaagacgtaatatgtggcctaagggagcttttaggtgactgctgcacatcaagcagaaaatcaaggactatctaaagacgtttatagtagataagatcagggtagaccagatggtctgggaaagttctgtgcctctgaggctttgggttgtagtcaatggcaggacagacagtgagatgaaaaacacatgagcaaaagcaaggaagcagaaatctgcatggcatgtactgaacagtgcacagccctgttagagcaacatggttaaagaatcctttccagtgcggttttctagatggaagcttcccagccaccaggcagacctgagtgccaaggggttatgatggtgaggtggagcccaaagcccaaaggagtcagcaaggctcctgcccattgccagggcctcactatggtcagctcaggccatgtgagggaggcagagcctctgcaccccctgtgttactggggtttcttctggagaactcatacattcaggtacaaaacaaaccaactgaggaggtgtgacccaacctcaccacccacctttctcctcctggggagtgtcgtgttgaactgtgtctgtgtcagtgcactggtcccagccctggccgcagcctagtcctttctctgtggagtgggctgcaaaacagcagcgcaagaggagacagtcttcgtcaggtgtgggtgtttggtgcctgcatgggtggccttgcacagagcagttaggggaagatgagggggaggcatggggctgggccagctctctgggatacagcctggtcagagagtaaatggagcagaggagcaggtgtggcagcacctgcccttcacctccctgaccaggcccgtccctccttcgccagtgctgtgcagagctcatttaaatgtattcctttctaggtctgggcgcggtggctcacgcctgtaatcccagcactttgggaggctgaggtgggtggatcatgaggtcgggagttcaagaccagcttggccaaacagtgaaaccctatctctactaaaatacaaaaattagctgggcatggtggcatgcgcctgtagtcccagctacttgggaggctgagacaggagaattgcttgaacccaggaggcggaggttgcactgagccgagattgcgccactgccctctagcctagacgacagagtgagactccatctcaaaaaaaataaataatttctttctggttgtattttcaagtcacaaattggaaaaggcttacatctagggacccactgttgattcctaagttgtgggtgggtgatatcagtggcctcagtgcctgcataaccctcacctgtttatgactgatctactgtaaccttcctcaggttgagagtgagctgctgtgagccagtgacaactactgctacaacttgctgttacttgaaattcgtgtgctatgttggtagcacaggagtaggcgggcgggggttttggtgtgggcactaggtaagtgggtggcaaccggctctttgggaccattggtgctgacctttgcctggtcacctgcctgtgcctaggccaagtgaatgttacatcttggaacctgagccatggaggtggcgccacctccctgaggagaaaggtgtggccaaaggaaactcctgcatggctcctgctccttccccttccctacatttcacttgggctaatgatgtaagccccccttgaggttggggatggtgtggagatagctgcagacacccctgtaacagacatccaggaagaattagggagtgggggtaattatagttcctaggtctaggggtgagaggtgggagtagaaccagaagtgccctggaatccagccgtgtcagccctcaccccagggcccccaggaaagcatggcctgcttgaagccctctgctccctgcagaaactggggcgaggaggagctttttccttcagttagatctttcccttccctgctgcctcgctcccttagctttggagccctaaagttagtggacaagacactgggataaagctctatggctgctggaaggaggtctgagtctgtgtgtgtgcatatgcatgcatgtgtgtgtgtgtgtgtgtcctcatttgcagaagtcttgctaccagttagggtgttaagagcatctccactgggcggagacctggcatttgttttccactgttaagagaatgacacaccccctgtcatgtaagggaggagctattgagttagacattttccctatgggaatcctcggtttggtttgtgggaaaggagggaatggataagtgatttttatctctaatcgtcaacacagctgttcttccactgaatttgtgctattgcatacatgtagccatctttcttttcactgcagcagtgtttatcagtagttcaaaatgatttatttgctcctggggagtaaaaccttttttattaaaaaaagaaaaagaaaaaaaaaagaaagaaaagtgtgcccccctcctatgctgcgatagctataaaatgattgggtcacaaaggtcaagtctgcacgtccctgtggtagaccctgctttcacattggagccttcacactcagcacaaaatgattggaggccttgataaaatggagagcaaagtcttgggagcagtgaaatgggggttggatcatagagacaggcgctggggactcgggtactgcagttaggaaagtagcgttatgagttgtactgaaaatgttgattctctaatctgccagaaaaggacctgtcttttcatgcagatttcatattgtctttgtccttttcattgcttcttgaccttcctggcaggtgtcgctcagtttcttcctgtttcccttcctgtcctctccacacctgctatcccgtcccactcccatctacctcccgggaagccagccctgcatgctgagtttgtgacctgcttcattcccatttcatttctagagggtttagaggtgacctggaaccgttccctttccctctcctaccccctcctctgcaacaccaagaggcctggaggggcagacagaaagcagccagccacggcgggaagacatgcatgtttggttgcagctggactgcgatcgtagttcctcctggagatagagtgtgaggaacttaggacactcttcctcagactctgggatcatcacataccacactgccccgctcagagtttcgtcctgagctccctaaccagctcaggtggagcagaagcctgctctcactcctccatctctggtgctcccttgggcggggacctgtccctcactcttaggcccagaacctgtccaagggacaggtagggtccaggtgccactttgggtagctggctgttggaatgcccacactggtgctgcctgtggcatagccactgctgtacgtttttggttgtttttaagaaactcgatgaagaggttttgatataaacaaaacaaatgcactttgggtgtgttttggtatttttctggggatagagggggtggggttagggatgtccctgtagattagttccagaatggggtgtctgtatatactgtattaataggcatgtttgactctcgtaaagggacgttagtagctgctgcaggtcctgtttggaaaccccatgtacaattcccagttttttgtaagtgtcagtgcgagagacatttgactcttgtgtttgtatctcctttttatgattgctgtacctacccatgtctttttggggaggggtgaaaagagatttgaaataaaaatgtttagaaatta

SEQ ID NO: 8990 - DNA, 5380 bp, Homo sapiens
  misc_feature (52)..(52): n is a, c, g, or t
  misc_feature (5051)..(5051): n is a, c, g, or t
  misc_feature (5077)..(5077): n is a, c, g, or t
  misc_feature (5098)..(5098): n is a, c, g, or t
  misc_feature (5114)..(5115): n is a, c, g, or t
acggccattcagctggtgccaaaggcagagttagagtctgtgctgtgggccntggaagatgggaggaggggcttgaggtttgcaaaggactgggagttcctgaggaagggggaatctgcctcttgttgccatgggcagctgttgtaggagcaggagagaaaggagggtgggtggtctcgaaaagaatattgggcaaaacctagccaattggccttagctgggagaagtagtgactcctgcatccttttttaaggtttaggaacctgagttcagaaacacctctcatggaagctgtactagttgtgatttacttaattccttaagttccatgacctgaagttaaccccgttcttcctctgctctcaacccattgccccttgagataactgtacatgtcactctgatcatggtaacagcatccctattgcttctgccagctgtcatggcaatcgtgtttcccatcacctgggcggttcagagccagtcatgggctgctgaatttaatggagcatgtttccaggttcttcatggcaaactgtactcatgacttaggagtgagtgttacttccatgtgcctgtcagcttgtgagggggaatgtggaggaaggtgagaaatacagctcccacagttgtgctcttcctagaggaagctctcagaacgcagccctcacgggatttccttaggtcagaggagagcatcgcatctcacgtttttaggtttatcactgccatcccacttctgggatgggaggtagcaagggcttctgtattttcttgtgttcattctagcaacccagacatttccggatcagatcctgctggtctccactcactggaaagtctgccagatgccgatttgagagctgcctgtccctgctttcaggaggagcggggagaaaaactccaatggtctttaatggtttctgcagctggccatggccaattcatatgacattgtgagtttgctttcttatagagctgctctggggagaggtttgctattgagatgtaacagtggagctgttgggtcttcatgactcctttgcgtgtgttccatgggactctctttctgggttccccatgcttatagttgcctcgtgtcacaagacagatactaatgtcaggtttgtggcttcctgatggtttgggtggggccccagtgtcctggtaatttataggactgcctcatctgggagcattgccttcttccttagtcccacgtggagtgaccagtcttcctccttgtagctgaacagggaggaaacttgcaccattacctgactgtggaagggtggcccacaagatgagctgtgcaccataaacacagcccacctctgatttgtcatgtggtacctcttctttccttggcttccatggtagtattatcaactaagcaagattgtgatcccagaaattggcttagcatgtgagtgttgcctcgtgagagtacaagtaatataactcgccatcttgcaggaagtgccaccccaatatagagcctgaagttggaatctgttgagatccttgggtggctgatatacagcctgggatctttcttttttttgttccttttcaaccacccataattttaatattattttttagtgtgtgtgtgcctggctttgcgctagatattgtagaaaacaaaaaaggtaaaagacgtaatatgtggcctaagggagcttttaggtgactgctgcacatcaagcagaaaatcaaggactatctaaagacgtttatagtagataagatcagggtagaccagatggtctgggaaagttctgtgcctctgaggctttgggttgtagtcaatggcaggacagacagtgagatgaaaaacacatgagcaaaagcaaggaagcagaaatctgcatggcatgtactgaacagtgcacagccctgttagagcaacatggttaaagaatcctttccagtgcggttttctagatggaagcttcccagccaccaggcagacctgagtgccaaggggttatgatggtgaggtggagcccaaagcccaaaggagtcagcaaggctcctgcccattgccagggcctcactatggtcagctcaggccatgtgagggaggcagagcctctgcaccccctgtgttactggggtttcttctggagaactcatacattcaggtacaaaacaaaccaactgaggaggtgtgacccaacctcaccacccacctttctcctcctggggagtgtcgtgttgaactgtgtctgtgtcagtgcactggtcccagccctggccgcagcctagtcctttctctgtggagtgggctgcaaaacagcagcgcaagaggagacagtcttcgtcaggtgtgggtgtttggtgcctgcatgggtggccttgcacagagcagttaggggaagatgagggggaggcatggggctgggccagctctctgggatacagcctggtcagagagtaaatggagcagaggagcaggtgtggcagcacctgcccttcacctccctgaccaggcccgtccctccttcgccagtgctgtgcagagctcatttaaatgtattcctttctaggtctgggcgcggtggctcacgcctgtaatcccagcactttgggaggctgaggtgggtggatcatgaggtcgggagttcaagaccagcttggccaaacagtgaaaccctatctctactaaaatacaaaaattagctgggcatggtggcatgcgcctgtagtcccagctacttgggaggctgagacaggagaattgcttgaacccaggaggcggaggttgcactgagccgagattgcgccactgccctctagcctagacgacagagtgagactccatctcaaaaaaaataaataatttctttctggttgtattttcaagtcacaaattggaaaaggcttacatctagggacccactgttgattcctaagttgtgggtgggtgatatcagtggcctcagtgcctgcataaccctcacctgtttatgactgatctactgtaaccttcctcaggttgagagtgagctgctgtgagccagtgacaactactgctacaacttgctgttacttgaaattcgtgtgctatgttggtagcacaggagtaggcgggcgggggttttggtgtgggcactaggtaagtgggtggcaaccggctctttgggaccattggtgctgacctttgcctggtcacctgcctgtgcctaggccaagtgaatgttacatcttggaacctgagccatggaggtggcgccacctccctgaggagaaaggtgtggccaaaggaaactcctgcatggctcctgctccttccccttccctacatttcacttgggctaatgatgtaagccccccttgaggttggggatggtgtggagatagctgcagacacccctgtaacagacatccaggaagaattagggagtgggggtaattatagttcctaggtctaggggtgagaggtgggagtagaaccagaagtgccctggaatccagccgtgtcagccctcaccccagggcccccaggaaagcatggcctgcttgaagccctctgctccctgcagaaactggggcgaggaggagctttttccttcagttagatctttcccttccctgctgcctcgctcccttagctttggagccctaaagttagtggacaagacactgggataaagctctatggctgctggaaggaggtctgagtctgtgtgtgtgcatatgcatgcatgtgtgtgtgtgtgtgtgtcctcatttgcagaagtcttgctaccagttagggtgttaagagcatctccactgggcggagacctggcatttgttttccactgttaagagaatgacacaccccctgtcatgtaagggaggagctattgagttagacattttccctatgggaatcctcggtttggtttgtgggaaaggagggaatggataagtgatttttatctctaatcgtcaacacagctgttcttccactgaatttgtgctattgcatacatgtagccatctttcttttcactgcagcagtgtttatcagtagttcaaaatgatttatttgctcctggggagtaaaaccttttttattaaaaaaagaaaaagaaaaaaaaaagaaagaaaagtgtgcccccctcctatgctgcgatagctataaaatgattgggtcacaaaggtcaagtctgcacgtccctgtggtagaccctgctttcacattggagccttcacactcagcacaaaatgattggaggccttgataaaatggagagcaaagtcttgggagcagtgaaatgggggttggatcatagagacaggcgctggggactcgggtactgcagttaggaaagtagcgttatgagttgtactgaaaatgttgattctctaatctgccagaaaaggacctgtcttttcatgcagatttcatattgtctttgtccttttcattgcttcttgaccttcctggcaggtgtcgctcagtttcttcctgtttcccttcctgtcctctccacacctgctatcccgtcccactcccatctacctcccgggaagccagccctgcatgctgagtttgtgacctgcttcattcccatttcatttctagagggtttagaggtgacctggaaccgttccctttccctctcctaccccctcctctgcaacaccaagaggcctggaggggcagacagaaagcagccagccacggcgggaagacatgcatgtttggttgcagctggactgcgatcgtagttcctcctggagatagagtgtgaggaacttaggacactcttcctcagactctgggatcatcacataccacactgccccgctcagagtttcgtcctgagctccctaaccagctcaggtggagcagaagcctgctctcactcctccatctctggtgctcccttgggcggggacctgtccctcactcttaggcccagaacctgtccaagggacaggtagggtccaggtgccactttgggtagctggctgttggaatgcccacactggtgctgcctgtggcatagccactgctgtacgtttttggttgtttttaagaaactcgatgaagnaggggtgtcattctgggctcggggtnggttgccaatttttcaccagnaaagggagccaccccnnttgcaaccacttctgtctccgttagccccctgtcatgtaagggaggagctattgagttagacattttccctatgggaatcctcggtttggtttgtgggaaaggagggaatggataagtgatttttatctctaatcgtcaacacagctgttcttccactgaatttgtgctattgcaaacatgtagccatctttcttttcactgcagcagtgtttatcagtagttcaaaatgatttatttgctcctggggagtaaaaccttttttat

SEQ ID NO: 8991 - DNA, 4580 bp, Homo sapiens
  misc_feature (52)..(52): n is a, c, g, or t
acggccattcagctggtgccaaaggcagagttagagtctgtgctgtgggccntggaagatgggaggaggggcttgaggtttgcaaaggactgggagttcctgaggaagggggaatctgcctcttgttgccatgggcagctgttgtaggagcaggagagaaaggagggtgggtggtctcgaaaagaatattgggcaaaacctagccaattggccttagctgggagaagtagtgactcctgcatccttttttaaggtttaggaacctgagttcagaaacacctctcatggaagctgtactagttgtgatttacttaattccttaagttccatgacctgaagttaaccccgttcttcctctgctctcaacccattgccccttgagataactgtacatgtcactctgatcatggtaacagcatccctattgcttctgccagctgtcatggcaatcgtgtttcccatcacctgggcggttcagagccagtcatgggctgctgaatttaatggagcatgtttccaggttcttcatggcaaactgtactcatgacttaggagtgagtgttacttccatgtgcctgtcagcttgtgagggggaatgtggaggaaggtgagaaatacagctcccacagttgtgctcttcctagaggaagctctcagaacgcagccctcacgggatttccttaggtcagaggagagcatcgcatctcacgtttttaggtttatcactgccatcccacttctgggatgggaggtagcaagggcttctgtattttcttgtgttcattctagcaacccagacatttccggatcagatcctgctggtctccactcactggaaagtctgccagatgccgatttgagagctgcctgtccctgctttcaggaggagcggggagaaaaactccaatggtctttaatggtttctgcagctggccatggccaattcatatgacattgtgagtttgctttcttatagagctgctctggggagaggtttgctattgagatgtaacagtggagctgttgggtcttcatgactcctttgcgtgtgttccatgggactctctttctgggttccccatgcttatagttgcctcgtgtcacaagacagatactaatgtcaggtttgtggcttcctgatggtttgggtggggccccagtgtcctggtaatttataggactgcctcatctgggagcattgccttcttccttagtcccacgtggagtgaccagtcttcctccttgtagctgaacagggaggaaacttgcaccattacctgactgtggaagggtggcccacaagatgagctgtgcaccataaacacagcccacctctgatttgtcatgtggtacctcttctttccttggcttccatggtagtattatcaactaagcaagattgtgatcccagaaattggcttagcatgtgagtgttgcctcgtgagagtacaagtaatataactcgccatcttgcaggaagtgccaccccaatatagagcctgaagttggaatctgttgagatccttgggtggctgatatacagcctgggatctttcttttttttgttccttttcaaccacccataattttaatattattttttagtgtgtgtgtgcctggctttgcgctagatattgtagaaaacaaaaaaggtaaaagacgtaatatgtggcctaagggagcttttaggtgactgctgcacatcaagcagaaaatcaaggactatctaaagacgtttatagtagataagatcagggtagaccagatggtctgggaaagttctgtgcctctgaggctttgggttgtagtcaatggcaggacagacagtgagatgaaaaacacatgagcaaaagcaaggaagcagaaatctgcatggcatgtactgaacagtgcacagccctgttagagcaacatggttaaagaatcctttccagtgcggttttctagatggaagcttcccagccaccaggcagacctgagtgccaaggggttatgatggtgaggtggagcccaaagcccaaaggagtcagcaaggctcctgcccattgccagggcctcactatggtcagctcaggccatgtgagggaggcagagcctctgcaccccctgtgttactggggtttcttctggagaactcatacattcaggtacaaaacaaaccaactgaggaggtgtgacccaacctcaccacccacctttctcctcctggggagtgtcgtgttgaactgtgtctgtgtcagtgcactggtcccagccctggccgcagcctagtcctttctctgtggagtgggctgcaaaacagcagcgcaagaggagacagtcttcgtcaggtgtgggtgtttggtgcctgcatgggtggccttgcacagagcagttaggggaagatgagggggaggcatggggctgggccagctctctgggatacagcctggtcagagagtaaatggagcagaggagcaggtgtggcagcacctgcccttcacctccctgaccaggcccgtccctccttcgccagtgctgtgcagagctcatttaaatgtattcctttctaggtctgggcgcggtggctcacgcctgtaatcccagcactttgggaggctgaggtgggtggatcatgaggtcgggagttcaagaccagcttggccaaacagtgaaaccctatctctactaaaatacaaaaattagctgggcatggtggcatgcgcctgtagtcccagctacttgggaggctgagacaggagaattgcttgaacccaggaggcggaggttgcactgagccgagattgcgccactgccctctagcctagacgacagagtgagactccatctcaaaaaaaataaataatttctttctggttgtattttcaagtcacaaattggaaaaggcttacatctagggacccactgttgattcctaagttgtgggtgggtgatatcagtggcctcagtgcctgcataaccctcacctgtttatgactgatctactgtaaccttcctcaggttgagagtgagctgctgtgagccagtgacaactactgctacaacttgctgttacttgaaattcgtgtgctatgttggtagcacaggagtaggcgggcgggggttttggtgtgggcactaggtaagtgggtggcaaccggctctttgggaccattggtgctgacctttgcctggtcacctgcctgtgcctaggccaagtgaatgttacatcttggaacctgagccatggaggtggcgccacctccctgaggagaaaggtgtggccaaaggaaactcctgcatggctcctgctccttccccttccctacatttcacttgggctaatgatgtaagccccccttgaggttggggatggtgtggagatagctgcagacacccctgtaacagacatccaggaagaattagggagtgggggtaattatagttcctaggtctaggggtgagaggtgggagtagaaccagaagtgccctggaatccagccgtgtcagccctcaccccagggcccccaggaaagcatggcctgcttgaagccctctgctccctgcagaaactggggcgaggaggagctttttccttcagttagatctttcccttccctgctgcctcgctcccttagctttggagccctaaagttagtggacaagacactgggataaagctctatggctgctggaaggaggtctgagtctgtgtgtgtgcatatgcatgcatgtgtgtgtgtgtgtgtgtcctcatttgcagaagtcttgctaccagttagggtgttaagagcatctccactgggcggagacctggcatttgttttccactgttaagagaatgacacaccccctgtcatgtaagggaggagctattgagttagacattttccctatgggaatcctcggtttggtttgtgggaaaggagggaatggataagtgatttttatctctaatcgtcaacacagctgttcttccactgaatttgtgctattgcatacatgtagccatctttcttttcactgcagcagtgtttatcagtagttcaaaatgatttatttgctcctggggagtaaaaccttttttattaaaaaaagaaaaagaaaaaaaaaagaaagaaaagtgtgcccccctcctatgctgcgatagctataaaatgattgggtcacaaaggtcaagtctgcacgtccctgtggtagaccctgctttcacattggagccttcacactcagcacaaaatgattggaggccttgataaaatggagagcaaagtcttgggagcagtgaaatgggggttggatcatagagacaggcgctggggactcgggtactgcagttaggaaagtagcgttattagttccagaatggggtgtctgtatatactgtattaataggcatgtttgactctcgtaaagggacgttagtagctgctgcaggtcctgtttggaaaccccatgtacaattcccagttttttgtaagtgtcagtgcgagagacatttgactcttgtgtttgtatctcctttttatgattgctgtacctacccatgtctttttggggaggggtgaaaagagatttgaaataaaaatgtttagaaatta

SEQ ID NO: 8992 - DNA, 3066 bp, Homo sapiens
  misc_feature (45)..(45): n is a, c, g, or t
atgcgcttggagggagagggccgctcagcgagggcgggacagaanctctcccgggctgggagtgcacggcgcggtgcgcccagggacctcagcatgaacaacctcacagagcttcagcctggcctcttccaccacctgcgcttcttggaggagctgcgtctctctgggaaccatctctcacacatcccaggacaagcattctctggtctctacagcctgaaaatcctgatgctgcagaacaatcagctgggaggaatccccgcagaggcgctgtgggagctgccgagcctgcagtcgctagacctgaattataacaagctgcaggagttccctgtggccatccggaccctgggcagactgcaggaactggggttccataacaacaacatcaaggccatcccagaaaaggccttcatggggaaccctctgctacagacgatacacttttatgataacccaatccagtttgtgggaagatcggcattccagtacctgcctaaactccacacactatctctgaatggtgccatggacatccaggagtttccagatctcaaaggcaccaccagcctggagatcctgaccctgacccgcgcaggcatccggctgctcccatcggggatgtgccaacagctgcccaggctccgagtcctggaactgtctcacaatcaaattgaggagctgcccagcctgcacaggtgtcagaaattggaggaaatcggcctccaacacaaccgcatctgggaaattggagctgacaccttcagccagctgagctccctgcaagccctggatcttagctggaacgccatccggtccatccaccccgaggccttctccaccctgcactccctggtcaagctggacctgacagacaaccagctgaccacactgcccctggctggacttgggggcttgatgcatctgaagctcaaagggaaccttgctctctcccaggccttctccaaggacagtttcccaaaactgaggatcctggaggtgccttatgcctaccagtgctgtccctatgggatgtgtgccagcttcttcaaggcctctgggcagtgggaggctgaagaccttcaccttgatgatgaggagtcttcaaaaaggcccctgggcctccttgccagacaagcagagaaccactatgaccaggacctggatgagctccagctggagatggaggactcaaagccacaccccagtgtccagtgtagccctactccaggccccttcaagccctgtgagtacctctttgaaagctggggcatccgcctggccgtgtgggccatcgtgttgctctccgtgctctgcaatggactggtgctgctgaccgtgttcgctggcgggcctgtccccctgcccccggtcaagtttgtggtaggtgcgattgcaggcgccaacaccttgactggcatttcctgtggccttctagcctcagtcgatgccctgacctttggtcagttctctgagtacggagcccgctgggagacggggctaggctgccgggccactggcttcctggcagtacttgggtcggaggcatcggtgctgctgctcactctggccgcagtgcagtgcagcgtctccgtctcctgtgtccgggcctatgggaagtccccctccctgggcagcgttcgagcaggggtcctaggctgcctggcactggcagggctggccgccgcgctgcccctggcctcagtgggagaatacggggcctccccactctgcctgccctacgcgccacctgagggtcagccagcagccctgggcttcaccgtggccctggtgatgatgaactccttctgtttcctggtcgtggccggtgcctacatcaaactgtactgtgacctgccgcggggcgactttgaggccgtgtgggactgcgccatggtgaggcacgtggcctggctcatcttcgcagacgggctcctctactgtcccgtggccttcctcagctttgcctccatgctgggcctcttccctgtcacgcccgaggccgtcaagtctgtcctgctggtggtgctgcccctgcctgcctgcctcaacccactgctgtacctgctcttcaacccccacttccgggatgaccttcggcggcttcggccccgcgcaggggactcagggcccctagcctatgctgcggccggggagctggagaagagctcctgtgattctacccaggccctggtagccttctctgatgtggatctcattctggaagcttctgaagctgggcggccccctgggctggagacctatggcttcccctcagtgaccctcatctcctgtcagcagccaggggcccccaggctggagggcagccattgtgtagagccagaggggaaccactttgggaacccccaaccctccatggatggagaactgctgctgagggcagagggatctacgccagcaggtggaggcttgtcagggggtggcggctttcagccctctggcttggcctttgcttcacacgtgtaaatatccctccccattcttctcttcccctctcttccctttcctctctccccctcggtgaatgatggctgcttctaaaacaaatacaaccaaaactcagcagtgtgatctatagcaggatggcccagtacctggctccactgatcacctctctcctgtgaccatcaccaacgggtgcctcttggcctggctttcccttggccttcctcagcttcaccttgatactgggcctcttccttgtcatgtctgaagctgtggaccagagacctggacttttgtctgcttaagggaaatgagggaagtaaagacagtgaaggggtggagggttgatcagggcacagtggacagggagacctcacagagaaaggcctggaaggtgatttcccgtgtgactcatggataggatacaaaatgtgttccatgtaccattaatcttgacatatgccatgcataaagacttcctattaaaataagctttggaagagatacacatgatgtctttttcttagagattcacagtgcatgttagtgtaataaagagataagtcctacagtagtaaaatctattgaactttgtttacc

SEQ ID NO: 8993 - DNA, 3370 bp, Homo sapiens
tgaaaggcggttgtggtgcaaaggaaaacccacaggccaaggaatgggaagaccaaggttgacacttgtttgtcacgtgtcaataatcatctctgcccgggacctcagcatgaacaacctcacagagcttcagcctggcctcttccaccacctgcgcttcttggaggagctgcgtctctctgggaaccatctctcacacatcccaggacaagcattctctggtctctacagcctgaaaatcctgatgctgcagaacaatcagctgggaggaatccccgcagaggcgctgtgggagctgccgagcctgcagtcgctgcgcctagatgccaacctcatctccctggtcccggagaggagctttgaggggctgtcctccctccgccacctctggctggacgacaatgcactcacggagatccctgtcagggccctcaacaacctccctgccctgcaggccatgaccctggccctcaaccgcatcagccacatccccgactacgcgttccagaatctcaccagccttgtggtgctgcatttgcataacaaccgcatccagcatctggggacccacagcttcgaggggctgcacaatctggagacactagacctgaattataacaagctgcaggagttccctgtggccatccggaccctgggcagactgcaggaactggggttccataacaacaacatcaaggccatcccagaaaaggccttcatggggaaccctctgctacagacgatacacttttatgataacccaatccagtttgtgggaagatcggcattccagtacctgcctaaactccacacactatctctgaatggtgccatggacatccaggagtttccagatctcaaaggcaccaccagcctggagatcctgaccctgacccgcgcaggcatccggctgctcccatcggggatgtgccaacagctgcccaggctccgagtcctggaactgtctcacaatcaaattgaggagctgcccagcctgcacaggtgtcagaaattggaggaaatcggcctccaacacaaccgcatctgggaaattggagctgacaccttcagccagctgagctccctgcaagccctggatcttagctggaacgccatccggtccatccaccccgaggccttctccaccctgcactccctggtcaagctggacctgacagacaaccagctgaccacactgcccctggctggacttgggggcttgatgcatctgaagctcaaagggaaccttgctctctcccaggccttctccaaggacagtttcccaaaactgaggatcctggaggtgccttatgcctaccagtgctgtccctatgggatgtgtgccagcttcttcaaggcctctgggcagtgggaggctgaagaccttcaccttgatgatgaggagtcttcaaaaaggcccctgggcctccttgccagacaagcagagaaccactatgaccaggacctggatgagctccagctggagatggaggactcaaagccacaccccagtgtccagtgtagccctactccaggccccttcaagccctgtgagtacctctttgaaagctggggcatccgcctggccgtgtgggccatcgtgttgctctccgtgctctgcaatggactggtgctgctgaccgtgttcgctggcgggcctgtccccctgcccccggtcaagtttgtggtaggtgcgattgcaggcgccaacaccttgactggcatttcctgtggccttctagcctcagtcgatgccctgacctttggtcagttctctgagtacggagcccgctgggagacggggctaggctgccgggccactggcttcctggcagtacttgggtcggaggcatcggtgctgctgctcactctggccgcagtgcagtgcagcgtctccgtctcctgtgtccgggcctatgggaagtccccctccctgggcagcgttcgagcaggggtcctaggctgcctggcactggcagggctggccgccgcgctgcccctggcctcagtgggagaatacggggcctccccactctgcctgccctacgcgccacctgagggtcagccagcagccctgggcttcaccgtggccctggtgatgatgaactccttctgtttcctggtcgtggccggtgcctacatcaaactgtactgtgacctgccgcggggcgactttgaggccgtgtgggactgcgccatggtgaggcacgtggcctggctcatcttcgcagacgggctcctctactgtcccgtggccttcctcagctttgcctccatgctgggcctcttccctgtcacgcccgaggccgtcaagtctgtcctgctggtggtgctgcccctgcctgcctgcctcaacccactgctgtacctgctcttcaacccccacttccgggatgaccttcggcggcttcggccccgcgcaggggactcagggcccctagcctatgctgcggccggggagctggagaagagctcctgtgattctacccaggccctggtagccttctctgatgtggatctcattctggaagcttctgaagctgggcggccccctgggctggagacctatggcttcccctcagtgaccctcatctcctgtcagcagccaggggcccccaggctggagggcagccattgtgtagagccagaggggaaccactttgggaacccccaaccctccatggatggagaactgctgctgagggcagagggatctacgccagcaggtggaggcttgtcagggggtggcggctttcagccctctggcttggcctttgcttcacacgtgtaaatatccctccccattcttctcttcccctctcttccctttcctctctccccctcggtgaatgatggctgcttctaaaacaaatacaaccaaaactcagcagtgtgatctatagcaggatggcccagtacctggctccactgatcacctctctcctgtgaccatcaccaacgggtgcctcttggcctggctttcccttggccttcctcagcttcaccttgatactgggcctcttccttgtcatgtctgaagctgtggaccagagacctggacttttgtctgcttaagggaaatgagggaagtaaagacagtgaaggggtggagggttgatcagggcacagtggacagggagacctcacagagaaaggcctggaaggtgatttcccgtgtgactcatggataggatacaaaatgtgttccatgtaccattaatcttgacatatgccatgcataaagacttcctattaaaataagctttggaagagatacacatgatgtctttttcttagagattcacagtgcatgttagtgtaataaagagataagtcctacagtagtaaaatctattgaactttgtttacc

SEQ ID NO: 8994 - DNA, 262 bp, Homo sapiens
caggcccagtgggaacactggaagctgactcccttttgggccacagggatggttttgtggctttgtctcctgacccacttacccaaggcaaccggatccccttgtgctccctttaattctggtgacttcctcgggctgggccctttcttcctgtgccaggagaagtggggggctctactttcttcctcccagtgctcggggggcatggagcggagccagggtctgagcctgccggctcatccagcctctcttgctgccctag

SEQ ID NO: 8995 - DNA, 454 bp, Homo sapiens
attgggtgaagagatgtgcactttcctcttggcttgcatatctaccgaagactgtctgggagcccaagcctcaaagcatccaactatggaattatttttaaaggattttgatatttatgaccaagaagttgcagcactataatgtccattataataatgcccatccgggctgggcacggtggctcacacctgtaatcctagcacttcgggaggccgaggccggtgggtcacctgaggtcaggatttcaagaccagcctggccaacatggtgaaaccccgtctctactaaaaagatacaaaaaattagccaggcatgttggcgcatgcctgtaattgcagctactcgggaggctgagggaggagaattgcttgaacccgggaggcagaggttgcggtgagccaagatcacgccattgctctccagcttgggcaacaagagtgaaactctttctca

SEQ ID NO: 8996 - DNA, 418 bp, Homo sapiens
taaagactctttggggagtaaggtttttactataacctaatcgagggcattgacatcttaaacacactcacacagtctccatcagaatagcagtttttctgtctctaaaacagagaaaaagtaaagctattaatgtcactgttacggttcctaacaaagcactgtcagatcaacaacacctgccagattgaggcaagcattcagtccacctggcagatgtctaacccctgtggcactggaatcctacataattaactccacttgctgtgcttccacacacaccaagcttccctctggaaactgccttttcaaggagataattcactatcaggctgatagagtaattcagttatgccctattctgttgttcactgtgaattaataaagtcacattctttttttctcagtacatcagtgt

SEQ ID NO: 8997 - DNA, 419 bp, Homo sapiens
ggtcaggagtatctcccatctgcttcctttctgaagggatcctagctgaactgagtggggggtatgttgtgcacagttaatatgttgttgacacttgaacaactcaagggttacggcccccctgcacagttgaaaatctgcgtataacttttgagtaccccaaaatgtaactacttaacctatcatcaactagagcctactgataacatcaacagttgattacacatgctttatatatgtattatatactgcatttttacaataaagtaagctagacaaaagaaaatgttaagaaaatcatggctgagtgcagtagctcatgcttgtaaacccagtactttggaaggccaaggcgggcagatggactgagctcagaagttcgagacagcctggataacatggtgaaaccctgtctttac

SEQ ID NO: 8998 - DNA, 452 bp, Homo sapiens
gttcttcatcctccagctccaatctgaataatgttcgcctccacatcaaaggcatcagtatgggcagaagatgcatgacattcaaaatgaaatcataggacctggaatcaggcagagctgatttgaatctcaactccactagaagtgccttgaactcttctcttaacttttttgccaaggtgtgggcagcagactcatgttgtaaaaagtggtttctacccccttctactgtttctcaccaaagaatcacatcggcagcctcaagagaagcagttggtcgaagccacagatatggaacccacagatacaaagggctaactgtacaggaatctgcaaggccatttaggaagttatggcagaagtctcagcaagaaaaaatggaagcttggatgaaggcactaccagattaaatggaaagaagtgataacatccagaaaattttagactacaaa

SEQ ID NO: 8999 - DNA, 673 bp, Homo sapiens
aacaaggacaccaacatcgaggttaccttccttagcagtaacatcacctcttcatctaagatcaccatacctaagcagcaacgctatgggaaaggaatcatagcccatgccaccccacaatgccagataaaccaagtgaaattcaagtttcagtcttccaaccgagtttggaaaaaagaccggactaccattattgggaagttctgcactgcccttttgcctgtcaatgacagagaaaagatggtctgcttacctgaaccagtgaacttacaagcaagtgtgactgtttcctgtgacctgaagatagcctgtgtgtagtttaacctgggcaggacacatctccctgcattttttttttttttttttgagagagaggtgtgatgagggatgtgtgtgtgcagcttattgtagaccattactactaaggagaaaagcaaagctctttcttattttcctcataatcagctaccctggaggggagggagaactcattttacagaacttggtttcctttgccgatcttatgtacatacccattttagctttcccatgcatacttaactgcacttgctttatctccttgggcattcgtacttaggattcaatagaaacatgtacagggtaaacaattttttaaaaataaaacttcatggagtatctgaatcatttaatt

SEQ ID NO: 9000 - DNA, 281 bp, Homo sapiens
actgcattgttggagcttcttgtcaccaggtgcagtaatattgttaacattcagtatttcaccagtcatgctagtgaaagtggaagatgaagcgataacgggctgcacgaagggtgttgagcatttagtaatcagtgccctgggtgcctgttctccccaaggctttctagaactagagtcctatgtgggaaatatggcctgtatctggaaataatgctgtgctggatttatatctttatccctaggagtttgtttgacctgtctcaacctttccctgttta

SEQ ID NO: 9001 - DNA, 422 bp, Homo sapiens
gttttcatgagtcagttttgcctctagaaacactctttgaacttccatagttatatgaaagcataaaatgctatatgctatttttaactcatgtgttctgaattgtaattgtatataatttttacttgagatatagtctttctagaaaccaatttctcagcatcagctagagccaagacttttcagaattttaaggaaaagcatatttcatacgttgaagtcataggtcccttaagacaagttctattttggtatctacatttacaatgggctgagactgtcacaatcgttcaccttcatcattaaaaaggccatattaaagttcctttctcctctaaacttagaatgttaaatgttggccttgtaaactaactttctaagtcctttaaggtttatgtccagggatgtagaggctaggtaac

SEQ ID NO: 9002 - DNA, 189 bp, Homo sapiens
gcaacattgggagaccttgtctctataaaaattgaaaattaaccaggcttggtagctcatacccgtagtcccaactactcgggaggctgaagtgggaggagcacttgggcttcaggaaaatagaggctgcagtgagccatgattgtgccactgcactccagtctgggtgacaaagtgagactctgtctc

SEQ ID NO: 9003 - DNA, 815 bp, Homo sapiens
attgtggtgtagtttttggtagtatttgttagtagttcctaggccaaatgcgttgttggtgttgtgagttgtctctgctgctttatgaaccattttgaccccgaataagaaaatcgctggaatttgctatttgtctaacatcatttccatagtctaaaataaatataaaataaacagcaaataataaatcattaagaaaaaaaacaaagtgagaaatgtccattaaaatgatatatagcataaccacatttattttaagaatgtattccaatatcaaacggcaaattccaacaatacaaaacctgcaatgaacgtttgcaccaacccaatatttcagttgtttaacatttatttagaatatttttctttttcagtatgaaataaagaactactgtactatctataactatttactctgtgacaaaacatttttctaaattgatctttcacagtaatattttaaattattattttcctatggagatgttaaaataaatttagggcattcattatcttagaagttatagaagtcagaatgagtttttggtgtaatttcttttttgtattgaagttttatttttaaatgccctaagtgctgtctgtatttatgtatgtaataagttcataacatgttaaaaaatggatgctgttgtaagctgagattgcgccactgcactccagcctgggtgacagagtgagagcctgtctcaaaaaaaaaaaaaaaagttgctgttgtttttatatgcagcccctatttccttccttaatctacagcttttgtgtcataccttcattcctgccttccaggtaggaat

SEQ ID NO: 9004 - DNA, 858 bp, Homo sapiens
gttgcagtgagctgagatcacgccattatactccagtctaggcaacaagagtgaaactctgtctcaaaaaaattaatgataataatgttacaataataataatgttagtgatacatatcattttgaaaccagttcttaagcaattaaaaaaaagcagctatggtgattgagtttttgtgttatgaattttatactctgaaggcatggtcattgtgaatgccaaagaaatgaacaggagaaaattttatttgaaagctgggattgttgcatgctgcagaatttttttttcttttgctattgctgtgtaacaaatgaccacacacttagcagttcacattcacatcttgtttattaactacaattctctagatcagaagcctagacacaatgtgactggcttctctgctcagggtctcttggggacaaaataaaggtgtccgctggaggaacatcctttcctgcatgctctgtggaagaatccactgccaagctcattcaggatgctggcaggattcagatccttgaagttgtaagactagggcccctgtttcctactgacttctgctggtggctgccctcagctcccagaggcaacccacattccttgacttttggccccctgcatctcaaagccagcaacagaaactctcttgtgcatggagtcccctcctgctttgaatctctctgactttccttgactttgatgtctaggtctggatttcaagggctcagaaactctctcatgcatgtagttccctcctgctttgaatctctctgactttccttgattttgatgtctaggtctggatttcaagggctcacgtgatgaggatagtttctttatcttaagggcaactg

SEQ ID NO: 9005 - DNA, 332 bp, Homo sapiens
gccagttgaggctgttcctctccttgttttaatagttgaagcagactgaagagaacatttgtggctagtgctgcagaaaaaatcaccaatggctgaaaaaaaaatcagttgaacagcttttggtatcaggatagctgttggacctggagctgtggataaactttaagggtgataatgtcataggagattcacagatttaattctattgaaggagagaacccttatgggattaaccagtctttaaaaaaaagttgactggtgacaaaaatacctaattgtggatttgcaaaaatgttttatttattaaaatgatacatgctaatgaggtataa

SEQ ID NO: 9006 - DNA, 451 bp, Homo sapiens
tccgtctaaaaaagaaaaaaaagagaacaactgccccttctagcagcagcccagatggagacacccatagcagggcgccggatccaatctcttcctctcctccctcggccttcctctccccacaaaccccagggtctagaaagtagaaggttctcccctcttctctccttcctcataatgaactcgatggagctggcccgagtgcagtggtggttacagttaattgatcacaacgacttacagatttttttgttccttctccactcccactgcttcactggacgagccaaacacaaattaaataaataggcaggtcacagtggctcatgcctctagtcccagtgctgtaggaggccaaggtgggcggatcactcgagcccaggagttcgagaccagcctgggcaatgtggtgaaatcccatctctaccaaaaaaaaaaaaaaaaagaagca

SEQ ID NO: 9007 - DNA, 443 bp, Homo sapiens
tataagaaagcgtttcataaaaaaataaagcagaagcatctttctcagggttaaacaaggcagaagatgggacctctgtagggtggcatgggtttgaggaatggagttgccccccagcaggctgtgagctattcagggttaaggaccatatcacatccatcttttatttcttgcaattgtaacagtacttgttacatagtagtttctccaaagtattacatttaggtctagacacctggcaggcactgcctgtagtctcagctgcccggaaggctgaggcaagaggactggaggatgacttgagcccaggaggtggaggttgcagtgagccatgatctgtcttctgtcactgcagtacaccctgggtgacagagcaagaccccttctcaaaaaacaaaaacaaacaaaaaaccaaatggcaacctttgtttgaattggatggg

SEQ ID NO: 9008 - DNA, 312 bp, Homo sapiens
ttttgaaatataggagctgtgtatttcgctcaacagttcaaagattcccaacaacctattttattccccatgaaggccctggtccaggtcattataatgtgaaaatgcctccaacaagctctgtcacttcttgttttcaatccagagtccctcgattcttgcccagctgttcaaaaaccccaggcccaggagcatatacaactttaagacaattccctaagcagtctccgaccatagccaaaatgggccaagagcatagccttttcttcaacaacaacaattggcttttaaaataaagtgatcttggcacca

SEQ ID NO: 9009 - DNA, 364 bp, Homo sapiens
tcatctgtaagtcttctcagcagaaatgtgtactcagtgctttgtccatttcttaaggggttgtctttttgttgttgagttgtaaacactatatattctgtctccaagtgtcttatctaatatgatttgcaaatattttctcccattctgtaggttgtctttttgctttctttgtaatgtcctttgatgcacaaacatttctagttttgatgaagtacgatctttctgtttttcattgtgttgcttgtacctttggtgtcatagctgaggatcctttgccaattgcgccctggacttcccaagtcatgctctgccctggcctctgcgtcctcgctcctccctggtcctctgcgtcctcgctcct

SEQ ID NO: 9010 - DNA, 481 bp, Homo sapiens
atcgattgtgtcaacaaacagtgggcaattagctgccctgattttcggaaccgagccaccggggagctggttgaacagtctcccactgctttgattaaagaggtgcagttgctgagcctttaggccttatttctgaaaaatggatatgaaagccgtggttggagctgcttttcctcttgggattttcacataaaatcagagactaatccctcatctaataccaatttggtaagggctgggttagaacatagtcaactccactgatgaacatcggttaagatttctttatagaaagctatactattttcagaagcatttcagacaaacatcctaagaagacttagcaggctcaagatgtttaccttggacctgaatcttatttctaattaaccgagtcttcaacagtccatcagagaatgcagttacctgccaaatttcacacctaaggggaaaaaatattcccaataaaattttccttaaa

SEQ ID NO: 9011 - DNA, 1954 bp, Homo sapiens
  misc_feature (1)..(1): n is a, c, g, or t
  misc_feature (191)..(191): n is a, c, g, or t
  misc_feature (1024)..(1024): n is a, c, g, or t
ntttccgcagctgagcggcgacccgggcggcggcggcggtcgaggagctcccatggcagggacgaggcggagggaaggcgaaaggggggcgaggagttaagccagagcctccgcggggcgggtttccgagggaggcacagagggaaacggctctcgcagcccgaggagggtcaggcgcggagcttgtcgcncctcccgcgcattctgtccagcccgggctccggagatgcatctgcatcaggtcctcaccggagctgtcaaccctggagacaactgctactccgtgggcagcgtcggggatgtccccttcacggcatatggatcaggctgtgatattgttattttggcaaatgactttgaatgtgtacagatcattcctggtgctaagcatggaaacatccaagtcagctgtgtggagtgttctaaccaacaaggaagaattgcagcttcatatggtaatgctgtttgtatatttgagcccttgggcataaattctcataaaagaaattgtgtaagtattaaccaataatagaatacttttagaatctagttaactttagaatccaattgatgttaataaaaagctccttaggagctagtgctgaaaatagactagagtatcagtgaaaaattggtctagtgctttatgttaggatccttacattcactacggatacatccctagtgcttttagaaacccaagtctctagaatattgcaaattgacatttactgtgttaactgagatctaccctagtttgaactactgttatttcttgtctggattactaatatctatctgatatctggtttcctgctgccttcagccccagtgtctgttctcaacagaggagatcatgacatttctctgcttaaaactttgtaatggttccatatttctctctcttttttcttttgttttgagacagggtcgcactgtatcccctgggctggagtgcagtggcatgatcactgctcactgcagcctcaacctgtcaaatggtcctcccacctcaacctcccangtagttgcgactataggcatgtaccaccatggccagctaatttttaaatttttcgtagagatggagtttccctgtgttgctcaggctggtcttgaactctggggctaagtgatcctcccacttcagcctcccaaattgctggaattatgggcatgagccaccatgcccagctgctccatatttctttcagataaaaagccaaaagccttttgtagactacaacttcccttctactcagtagcacagttactatgtctcagagctcacctcgtaagttcttgtcctctctggttctactctggccacattggcatttttactgtttctcagttaaccttccctctttgagcctttgtgttgtttgttttctttgtcaggaatgttattcctccagctatctccaaggatagctcccatagatcctttaggtctttgctcactaataccttgtcaatgaggtttaccttgaccaccctttaaaaaattgtacccccacttatcttgctatttaaaaatttttttacagcatttatttatttattgtttactatgtaaaatgttatctaaaggtacataagggtaggaagcttttttcactgatgagtccccagtacttagaacagtatctggaacagccaggtgtggtggctcacacctgtaatcccaacactttgggaggctgaggcgggtggaacacgaggtcaggggtttgagatcagcctggccaacatggtgaaaccccgtgtctactaaaaataaaaaaattatccaggtgtggtggcacgtgcctatagtccctgctgctaggaaggctgaggcaggagaatcgcttgaacccaggaggtggaggttgcagtgatcctggactgcaccattgcactccagcttgggagtcagagcaagactccatctcaaaaaaaaaaaaaaaaa

SEQ ID NO: 9012 - DNA, 388 bp, Homo sapiens
ctgccttctgtgtccatctcgttgggagctgtagaccagagctgttcctattcagccatcttggcagctgtccatccaaatatgatttctttgaataggtcaaccttgtatatgatatgtaaaataaagcctgctgaattttttgataacaggggagagactcttaactccagtacacttccaggtatatttatggaaggaaataaaccatgaatactgtattgagattatatgtaattagtttatacattattatgaaaaggaagatatctttattttacccttttctagatattaatgctgtatttattcttttttagattgcagcttcatatggtaatgctgtttgtatatttgagcccttgggcataaattctcataaaagaaa

SEQ ID NO: 9013 - DNA, 449 bp, Homo sapiens
taaaagaagaagaagagacaagcttcttaaaggcaggaaaaggtgctccctggaggactggggcttctctagtttgtggtaaaatatgacttaaggtaaaacttttgttgacatcaatttaattcatggcaaaacttcacacagaaaattccataatatattgagagtagggaaattaagaaatcccaaatgaacaatagagaaggattcaggaactactttcagtctttttttattgacttctttttgatcatcaaagttactttcatctttgtagtgacaatagctttttagaatatttcttacactaattcctgatatcttctattaggctacagtttaccaaagaaatgtcaggaaatacccatgggtaaagctgaatatttcataatctttgtaaccaagagatgttgggttctttccacaaggtcctaggatgtagctgaaaa

SEQ ID NO: 9014 - DNA, 497 bp, Homo sapiens
tatacatttgcagagtctcctgcttagaagggccatgcactctgcttaatgcttttctgctactatctttataaaattctttacaaagttttaaacaaggggccttgcttttcatttttctctgggccctgcaaattacatagctggtcctggatgtgatttaaggtcataaaggtagaaagtggcaaaggccagtgcctttctgatactactcttctctgtttccgaattatgcatgaagagctttaaggtttaacctatttttcccactccctgaaaatactatttgtatggattatgtagctgattggtatctttcatcatggggattaatttcaggaccccttattttacagatggggtaagtgggagctcaggaaaggttaaatactatggatcagtaggaggtgacaggtttttcaacattgttattctggattccagactccacacacacaacaaacgtgctgactcctttgttataacactgtttcagc

SEQ ID NO: 9015 - DNA, 387 bp, Homo sapiens
gttagatgaattctatttttaatctaattaaattagaagtaacatgcattagtatattagctaaatctcatttatttacagtggaatcgaagttggacatattccttgaaaatattttgaaaattattttaatgattaagaatcaattaaaaagagattttactttatttgctaaagaatgactttcaatagtttagtctcaaaattgttacacatgattaccagtgtgaaatatatgagcaaagataaaaataatacctccctgccaaaaacagctcctgttagaaaatattttattaactaatcaaataatcttctggtaaatacagagagatgtttaaagattgcaatcgaattacaaggacacaataaaactaaaggaaatgc

SEQ ID NO: 9016 - DNA, 1993 bp, Homo sapiens
gctctttccactacggctgtattgcactggtgagtccgggcccatggatgagaaattgatgcgaggatcaatacaagcttaatttgaattaattcttgggggtcacgtgttcacaatcaatggcctttgaggagctcttgagtcaagttggaggccttgggagatttcagatgcttcatctggtttttattcttccctctctcatgttattaatccctcatatactgctagagaactttgctgcagccattcctggtcatcgttgctgggtccacatgctggacaataatactggatctggtaatgaaactggaatcctcagtgaagatgccctcttgagaatctctatcccactagactcaaatctgaggccagagaagtgtcgtcgctttgtccatccccagtggcagcttcttcacctgaatgggactatccacagcacaagtgaggcagacacagaaccctgtgtggatggctgggtatatgatcaaagctacttcccttcgaccattgtgactaaggacctggtatgtgattatcagtcactgaaatcagtggttcaattcctacttctgactggaatgctggtgggaggcatcataggtggccatgtctcagacaggtttgggcgaagatttattctcagatggtgtttgctccagcttgccatcactgacacctgcgctgccttcgctcccaccttccctgtttactgtgtactacgcttcttggcaggtttttcttccatgatcattatatcaaataattctttgcccattactgagtggataaggcccaactctaaagccctggtagtaatattgtcatctggtgcccttagtattggacagataatcctgggaggcttggcttatgtcttccgagactggcaaaccctgcacgtggtggcgtctgtacctttctttgtcttctttcttctttcaaggtggctggtggaatctgctcggtggttgataatcaccaataaactagatgagggcttaaaggcacttagaaaagttgcacgcacaaatggaataaagaatgctgaagaaaccctgaacatagaggttgtaagatccaccatgcaggaggagctggatgcagcacagaccaaaactactgtgtgtgacttgttccgcaaccccagtatgcgtaaaaggatctgtatcctggtatttttgagaaaaaaaaatctcaaggaaaaggcataaaaatgattgctacacaaaagtgaccaaattttaagaagccttcatgagctgattggtggggaaattcagaaaaaaaaatacaggaaaagaacacaccagaagggtttttttccctacaaccagcaagaacatatattagatacatgaatctcaattataattatggcattaatttgcattttatttcaaaattaacttgtggggacatgtaatctcttgagcaatctgatatttttgggaagtcctttaaaaagttacaaatttatcaataaattactagtagataagatgattcagaaacaaaagaaaatcacagaattaggatgtggctggctggtgtatgaagcaccatgtgatgaattcataaagttgcaaaagtcaaaacaatactgtacatgcaaccagaaatcaaaataaatccagaaatagagacctatataaatgcatttaatacatgatacttttgacataataagccattggaaaacggaaagattagatactaaataacattgactatctctttgtaaatacagtcactaaatgatgttagttacttttccatggtggaattttaattactttttctttgtaatttttctctctgtatattttaaacaaatagctggtatagtttacaatattataaagatattgttcaaattgaagggcaaaggccaggttcagcaattttcaaactgtatgtacatttaataaaataactataaattaaaaaattatatttcaaatgatgtgactaataaatgaaagtacatata

SEQ ID NO: 9017 - DNA, 1608 bp, Homo sapiens
ggaaggttttgtgtgaggatttccagagaaatccatgcttaagccaagacttgaatggtataggtaagaaaatgtagtaaaaagaggctagagagtgtgtccactgaaagctattgcagcaagtgaacaatgagaagacctggtatgtgattatcagtcactgaaatcagtggttcaattcctacttctgactggaatgctggtgggaggcatcataggtggccatgtctcagacaggtttgggcgaagatttattctcagatggtgtttgctccagcttgccatcactgacacctgcgctgccttcgctcccaccttccctgtttactgtgtactacgcttcttggcaggtttttcttccatgatcattatatcaaataattctttgcccattactgagtggataaggcccaactctaaagccctggtagtaatattgtcatctggtgcccttagtattggacagataatcctgggaggcttggcttatgtcttccgagactggcaaaccctgcacgtggtggcgtctgtacctttctttgtcttctttcttctttcaaggtggctggtggaatctgctcggtggttgataatcaccaataaactagatgagggcttaaaggcacttagaaaagttgcacgcacaaatggaataaagaatgctgaagaaaccctgaacatagaggttgtaagatccaccatgcaggaggagctggatgcagcacagaccaaaactactgtgtgtgacttgttccgcaaccccagtatgcgtaaaaggatctgtatcctggtatttttgagaaaaaaaaatctcaaggaaaaggcataaaaatgattgctacacaaaagtgaccaaattttaagaagccttcatgagctgattggtggggaaattcagaaaaaaaaatacaggaaaagaacacaccagaagggtttttttccctacaaccagcaagaacatatattagatacatgaatctcaattataattatggcattaatttgcattttatttcaaaattaacttgtggggacatgtaatctcttgagcaatctgatatttttgggaagtcctttaaaaagttacaaatttatcaataaattactagtagataagatgattcagaaacaaaagaaaatcacagaattaggatgtggctggctggtgtatgaagcaccatgtgatgaattcataaagttgcaaaagtcaaaacaatactgtacatgcaaccagaaatcaaaataaatccagaaatagagacctatataaatgcatttaatacatgatacttttgacataataagccattggaaaacggaaagattagatactaaataacattgactatctctttgtaaatacagtcactaaatgatgttagttacttttccatggtggaattttaattactttttctttgtaatttttctctctgtatattttaaacaaatagctggtatagtttacaatattataaagatattgttcaaattgaagggcaaaggccaggttcagcaattttcaaactgtatgtacatttaataaaataactataaattaaaaaattatatttcaaatgatgtgactaataaatgaaagtacatata

SEQ ID NO: 9018 - DNA, 1669 bp, Homo sapiens
gctctttccactacggctgtattgcactggtgagtccgggcccatggatgagaaattgatgcgaggatcaatacaagcttaatttgaattaattcttgggggtcacgtgttcacaatcaatggcctttgaggagctcttgagtcaagttggaggccttgggagatttcagatgcttcatctggtttttattcttccctctctcatgttattaatccctcatatactgctagagaactttgctgcagccattcctggtcatcgttgctgggtccacatgctggacaataatactggatctggtaatgaaactggaatcctcagtgaagatgccctcttgagaatctctatcccactagactcaaatctgaggccagagaagtgtcgtcgctttgtccatccccagtggcagcttcttcacctgaatgggactatccacagcacaagtgaggcagacacagaaccctgtgtggatggctgggtatatgatcaaagctacttcccttcgaccattgtgactaaggacctggtatgtgattatcagtcactgaaatcagtggttcaattcctacttctgactggaatgctggtgggaggcatcataggtggccatgtctcagacaggtggctggtggaatctgctcggtggttgataatcaccaataaactagatgagggcttaaaggcacttagaaaagttgcacgcacaaatggaataaagaatgctgaagaaaccctgaacatagaggttgtaagatccaccatgcaggaggagctggatgcagcacagaccaaaactactgtgtgtgacttgttccgcaaccccagtatgcgtaaaaggatctgtatcctggtatttttgagaaaaaaaaatctcaaggaaaaggcataaaaatgattgctacacaaaagtgaccaaattttaagaagccttcatgagctgattggtggggaaattcagaaaaaaaaatacaggaaaagaacacaccagaagggtttttttccctacaaccagcaagaacatatattagatacatgaatctcaattataattatggcattaatttgcattttatttcaaaattaacttgtggggacatgtaatctcttgagcaatctgatatttttgggaagtcctttaaaaagttacaaatttatcaataaattactagtagataagatgattcagaaacaaaagaaaatcacagaattaggatgtggctggctggtgtatgaagcaccatgtgatgaattcataaagttgcaaaagtcaaaacaatactgtacatgcaaccagaaatcaaaataaatccagaaatagagacctatataaatgcatttaatacatgatacttttgacataataagccattggaaaacggaaagattagatactaaataacattgactatctctttgtaaatacagtcactaaatgatgttagttacttttccatggtggaattttaattactttttctttgtaatttttctctctgtatattttaaacaaatagctggtatagtttacaatattataaagatattgttcaaattgaagggcaaaggccaggttcagcaattttcaaactgtatgtacatttaataaaataactataaattaaaaaattatatttcaaatgatgtgactaataaatgaaagtacatata

SEQ ID NO: 9019 - DNA, 1939 bp, Homo sapiens
gctctttccactacggctgtattgcactggtgagtccgggcccatggatgagaaattgatgcgaggatcaatacaagcttaatttgaattaattcttgggggtcacgtgttcacaatcaatggcctttgaggagctcttgagtcaagttggaggccttgggagatttcagatgcttcatctggtttttattcttccctctctcatgttattaatccctcatatactgctagagaactttgctgcagccattcctggtcatcgttgctgggtccacatgctggacaataatactggatctggtaatgaaactggaatcctcagtgaagatgccctcttgagaatctctatcccactagactcaaatctgaggccagagaagtgtcgtcgctttgtccatccccagtggcagcttcttcacctgaatgggactatccacagcacaagtgaggcagacacagaaccctgtgtggatggctgggtatatgatcaaagctacttcccttcgaccattgtgactaaggacctggtatgtgattatcagtcactgaaatcagtggttcaattcctacttctgactggaatgctggtgggaggcatcataggtggccatgtctcagacaggtttgggcgaagatttattctcagatggtgtttgctccagcttgccatcactgacacctgcgctgccttcgctcccaccttccctgtttactgtgtactacgcttcttggcaggtttttcttccatgatcattatatcaaataattctttgcccattactgagtggataaggcccaactctaaagccctggtagtaatattgtcatctggtgcccttagtattggacagataatcctgggaggcttggcttatgtcttccgagactggcaaaccctgcacgtggtggcgtctgtacctttctttgtcttctttcttctttcaaggtggctggtggaatctgctcggtggttgataatcaccaataaactagatgagggcttaaaggcacttagagttgtaagatccaccatgcaggaggagctggatgcagcacagaccaaaactactgtgtgtgacttgttccgcaaccccagtatgcgtaaaaggatctgtatcctggtatttttgagaaaaaaaaatctcaaggaaaaggcataaaaatgattgctacacaaaagtgaccaaattttaagaagccttcatgagctgattggtggggaaattcagaaaaaaaaatacaggaaaagaacacaccagaagggtttttttccctacaaccagcaagaacatatattagatacatgaatctcaattataattatggcattaatttgcattttatttcaaaattaacttgtggggacatgtaatctcttgagcaatctgatatttttgggaagtcctttaaaaagttacaaatttatcaataaattactagtagataagatgattcagaaacaaaagaaaatcacagaattaggatgtggctggctggtgtatgaagcaccatgtgatgaattcataaagttgcaaaagtcaaaacaatactgtacatgcaaccagaaatcaaaataaatccagaaatagagacctatataaatgcatttaatacatgatacttttgacataataagccattggaaaacggaaagattagatactaaataacattgactatctctttgtaaatacagtcactaaatgatgttagttacttttccatggtggaattttaattactttttctttgtaatttttctctctgtatattttaaacaaatagctggtatagtttacaatattataaagatattgttcaaattgaagggcaaaggccaggttcagcaattttcaaactgtatgtacatttaataaaataactataaattaaaaaattatatttcaaatgatgtgactaataaatgaaagtacatata

SEQ ID NO: 9020 - DNA, 768 bp, Homo sapiens
ccccctccctccatggtaactgtcatgcgttttcttgtggggctgctgatgtgtcgaccctggtgacattttaggaaggctttttatagagttttcttgtgtacacaaaaggtttggaagtttgttttgttttgatctgcagtaaacaggtccttcactttgctgacgtcatttccgttcatatttgagttgttgattgtgcttctttgcagggccctcttatccctacccccgccttgcctttcagctcagagcctgtggctgcctggggaagggggagtgtgctcctaagctgccaggtctgggttcaaaggctgagggtcgcgtggctgtgcctcgtcctagggtttgcccgctggggaagatgcttccagcttcaaatctggttaaacactccgacatccactcgccctggtattttcatggcacgcagtgattcatctcagcttcctttctttgtaacacctccccccactttgcccctgccacaccttgtctgtgtctttaatacatccttattgtccacttctccatgcccccacccaccgaaaaaccttgtaatgacgactcggagactttgattcagttgcaaatctgaagctggcattagtggacctcatgctgtgaaaaaaagaaagtgtttcaaggccttgcccccgcagcctccccaccaccgccttccatccctgttgggttgtttgtgcatgtgtgtttctccccgtttcctgccttttcgtagatataaaggccgttctggtgtcactaaaa

SEQ ID NO: 9021 - DNA, 618 bp, Homo sapiens
cagcttcaacatattgaaaaatcattgttacttctggttcagcgactcagtctaccttctcacttgccttgttaacataccaccatcttctgcctttcttctcaagaagaaaaaaatcagacctcactgacgcttcaccatcttcagcccctcattcccaatgtatctaaaaggagctgtgccactttttagaaaatcaaccctcatgcattcggcacctgttattatttctagaaactgtattaagcctgtggacaaacagggccctggttgtcatggaatttgaagccacccttttctgttttgattggatgcaggaacaatgagtacacaccacacccagagtccatcccttgtcatatcaagtccctctttcttcaaagacaacctcctacctgtatcttgcagattattgccaaaagaaatatcctaagtggcaattaattgctctactttatcttcatgaacctaaactaactctgtcataagcctagagttttcttatgctgagcttttgaaacttttcataatctgatattcactcttaactaattcccacattcccccaataattcccacttttccagccaagatatttggagctcactatccccttaa

SEQ ID NO: 9022 - DNA, 801 bp, Homo sapiens
  misc_feature (779)..(779): n is a, c, g, or t
  misc_feature (781)..(782): n is a, c, g, or t
cttttggatgagatgatgttgcttccttctttttctctaggaacttttggagtaaaatttctctctggtctcaacactagacatagtttttgtttttattcttagcaaatggagtgtttttatcttacagatactatgaattctttaaccgatgtttccttcttttccttgttcactggaaaactgagaggcaaatctgaggtgcatgcaaacgtacctagtgttggggcatgcggtttcgcactggcccattcctgcagtgtcttgtcttttctccttttgtcttcctttgtcttgttttctgccttcattcatcttaccttttattttgtgtgtacttatgttagcttctttaaatccttctggcaacaaggtatggagtccttttcggacacttcagcctaaaattaaatacaacaactggctgtttccccagaggtcttccttaggcctcttttcttgcatttgagttaccgcttactgagtgggtgtggagaaagcacgtgtggggctctggctggggcgtttcagttctttctgcctcactagctctgtcactcagggtgagtgcttcaactttgctgagtgtttctttgagtctagcatgcggattatcgtgctttctttgctaggtaactgtgaagattaaattaggtaatggttattcatgaacaccatgcctgacacacagtcccaaacgggcccagtgacactgccgactgcaccccagctcaggcccccactgcaccagcaatgctagaaaaccaagccaataaaananntttcttttttcattaattt

SEQ ID NO: 9023 - DNA, 454 bp, Homo sapiens
ggtaaagttaagaatccttagaccaggttttgtgaattcaagtcccaagtctatgacttatggagagtaaaacctcagacaaattatataacttctctgtgactcagtttttagatctttaaaattggccactgagcacctaccttaaagagttgtgggtgccggacgttgtggctcatgcctgtaatcctagcactttgggaggccaaggcaggttgatcatgaggtcaggagtttgtgaccagcctggccaacatggtgaaactccgtctttactaaaaatacaaaaattagctgggtgtggtggtaggcgcctgtaatctcagctacttgggaggctgaggcaggagaattgcttgaaaccggaaggtggaggttgcagtgagtggagatcctgccactgtactccagcctgggtgaaagagtgagattccatctcaaaaaaaaaaaaaag

SEQ ID NO: 9024 - DNA, 764 bp, Homo sapiens
gggttcagtatatggggccatcaggcagtataccctctgaatgtttttcattgttgtatttgcttagagtaactaaacaattgtatcttttaatttatcttttaattcaaagaggaaaccttggcttctgataactttgttgtgttgtatcttaatggcctatagctgtcattacttcctgtagctgcagtacagaattgttacagacctggattaatgcttccaaagacagaaggaccttggcacctaaactgaccagccctgtgatcctgcaccccacaggagtaactcatcaggacttaccagactgctgcttttgggcatcatctgctgggttgatgatttggtttggccaagagtcttgccaagactttaatctatgcctcttgttctacatgaattcttgggaattactcacgttccataggaagagtgcatccccaggtgatggtttttggttatggtatgatcctttcacaccgaggatttcattgtttaaaacgtgtttctttaaaagaagccttgataacgagagtgggggaaggaggcagcagactttgaagactgtggcctttggtgttctggagtagggggagggaaggagaaacatgttttccacatcatcgcaagtgtgtgccctttgccccttttcaggatccttagagttgcctccctccctccaccccgacagttttgcaataatgtgccttatcagttgtgagtttacaggtgaagcaatttcccaaataaatggatgtaagtgt

SEQ ID NO: 9025 - DNA, 1058 bp, Homo sapiens
  misc_feature (832)..(832): n is a, c, g, or t
  misc_feature (836)..(837): n is a, c, g, or t
  misc_feature (861)..(861): n is a, c, g, or t
  misc_feature (919)..(919): n is a, c, g, or t
gggttcagtatatggggccatcaggcagtataccctctgaatgtttttcattgttgtatttgcttagagtaactaaacaattgtatcttttaatttatcttttaattcaaagaggaaaccttggcttctgataactttgttgtgttgtatcttaatggcctatagctgtcattacttcctgtagctgcagtacagaattgttacagacctggattaatgcttccaaagacagaaggaccttggcacctaaactgaccagccctgtgatcctgcaccccacaggagtaactcatcaggacttaccagactgctgcttttgggcatcatctgctgggttgatgatttggtttggccaagagtcttgccaagactttaatctatgcctcttgttctacatgaattcttgggaattactcacgttccataggaagagtgcatccccaggtgatggtttttggttatggtatgatcctttcacaccgaggatttcattgtttaaaacgtgtttctttaaaagaagccttgataacgagagtgggggaaggaggcagcagactttgaagactgtggcctttggtgttctggagtagggggagggaaggagaaacatgttttccacatcatcgcaagtgtgtgccctttgccccttttcaggatccttagagttgcctccctccctccaccccgacagttttgcaataatgtgccttatcagttgtgagtttacaggtgaagcaatttcccaaataaatggatgtaagtgttctgtgtggtgcttgtttgaacatgttgctaactttcaactacctttgccagtgggaattaggattgnctgnnaattggacagtccaaaatggtgtnttaagctttccactctcaatgcttcttaccaaaataatttctcagaagccagattttnatcttcattttctctctctgctccctgtatagtggggtcagtagtaacaggagtagctaccggatgggcagcaggaaagcatagggaagaagcagagtgccagtctagcttttacagaatactcaagaagaggctgtca

SEQ ID NO: 9026 - DNA, 951 bp, Homo sapiens
gtctctattcattatatggtctaggttgagacttccttggaagcagaacctgagtaccaggaactcatattttataaagtatatttattccttttagctgcaaactaacccagccatgttttagtgaatgctttaatctgaagatgactttgagctcattgaccatattaatctttcatcaaacaaactggatgttgtttcattaacaaaaaactcctccacaccaaggagtgtttagtaacttctgcacagaggactcatccatctcttgcttatgtttgggacagaaagacacttctctggctttttactggcttgaacccaatgggacagagactctctagaaagtttcagggctcacattcacttgtttgtccaaaaaatatttttgagtgtctcccaagtgccaaaccctggctactcccacctttgcctgagcccatgagcggtagtctgggggctggatgtgaggagttctgagttggctaggaagacacaaggcacaatggacatggggcaaagtccacttgctggacattggtcccttccacttccaagctgtccatcaggctgagagatctggaatgcataccccacactttgaagatgaggaagggcgagtttctcaaagtgtgtgtgtgtgtttctcttttaatctgtaatggtttctgcattttgaggtagaaacagaaatctcttttttgagtgggaccactcgggtgcggcttcttagtcttgttgatataataaagcacatgcccactcctcatggagtggagaggagaaaattctaagggaacgtactctgaatgcaaatgtttctgagattaaacactagtcacttgttaaaaaaacaagagtagaaataaaaagagaaaggaaggaaagagaaaatgagtaaaaaagaggatagaaagaaaaaggaaaacgggggggggggggatagtgtgg

SEQ ID NO: 9027 - DNA, 821 bp, Homo sapiens
  misc_feature (676)..(676): n is a, c, g, or t
aatctcaatactcaaattagaaaattaggattgcagatataatctattcattttccatttatttattcagcaaatatctttcagcacctaactattttaggtgctggagagtttagtgttgttgtaataacagtcagtataagaaattataagatgactgaagaactgaggctagggaaccatatgcctgcttataaccaggacaaactgaactgtcagcccaaaagctgaggaccctgaggtggtgagtgtggaggagggtgtgcctaccaacagtgttcccctgggtttctatgtttaaagggcaagtatgaggacgtttagtaaaatatgtaaaatgtagtttaagcatttaggccttttctcttgctgaaacttgtaaaaccatttaggtaagatagatttctattaacgttaaatagcataagtcatgaataaacataagtccataccacaaagtttatcaatgtatggcaggtatgtggataaatttccctattgtattctctatgttaagctactagaagaaagagtaatattttctgagcccgaaatgatgagaaaagattgtgtttttgaaacagcaaaattaggcagacagttgtaacatttttttaaaaatacactagttagcttggtgttctgttgcatttgaaaatagcatgatacagtatcnatcaactcttaaattatgttggaagaaaagataggaaacacatcaaattgttattagtatctggtgaattcacaggtgacttttttggtctcttataatttcattatatattctacagttcatgagtattacctttataatcgag

SEQ ID NO: 9028 - DNA, 487 bp, Homo sapiens
tgtgctaggaatacaaagtttaaatgataaagttcctgccttagagacgtttattgtctactggagaaggtgggcatataatttacccaggtgagtaaataatttataaactcaagtaattagcattgtaatagaagttgcctagtacttgtgtatctactatctctgctaaaaggattgaggaaagctttactgaggagctgtcatttgagcttggtcacaaaagatgagaaggaatttgccaggtaaatttgttcaggaatcagagattctagacaaagggaacttcatgtgcaaacgtaaaagagcatggcaatgttggaaaggatcaactggagctagagcatgggactctgtatatgttgggagagatgaaatgagaggcatggtggagcttaagtgctgtgctatgaatgttgacctcatcctatagacagcaggaaacaaagtttttaagtggtaggtgatactataaggcttttttcaa

SEQ ID NO: 9029 - DNA, 392 bp, Homo sapiens
cccaaatcatagactaggaggtggcagagctgatctgttgacttttttttcataatgttactcttgcactctgcaattacatcaaaaaaagatgactttttctgggcgcgatggctcatgcctgtaatcctagcactttgggaggccgaggtgggcggatcccctgaggtcaggggtttgagaccagcctggccaacagggtgcaaccccatctctactaaaaatacaaaaaaattagttgggtgtggtggcgcgtgcctgtaatcccagctacttgggaggctggggcaagagaatcgcttgaacccaggaggcagaggttgcagtgagccaagatcgcaccactgcactccagcatgggcgacacagcgagactccctctcaaaaaaaaa

SEQ ID NO: 9030 - DNA, 360 bp, Homo sapiens
tagtgtggcagcagtgccactggtctctggggtgggggcaagactgtcagagagtagagccccaggatgagcagtactcctgaaaatatgcctggaccaatactggcagcctcccctgacttccaatagaggctgctgatgacagggctccatgtgaaggggcaggcagtaatgctccccttcccagaggcaaaggctggttggcaaatcctacccttcttggtcagtcatattctttctgggtcttagattctaggagataggcttctggaaacacaatttgtggatctacatgaagcatggatcctgaaattattttagagccagtgtggcagggctgtgggactatccttggcttca

SEQ ID NO: 9031 - DNA, 760 bp, Homo sapiens
tgaaatggagtcttgctctgtcgcccaggctggagtgcagtggcgcgatcttggctcactgcaacctccatctcccaggttcaagcgattctcctgcctcagcctcccaagtagctgggattacaggcacgtgccaccacacccagctaatttttatctttagtagagacggtgtttcgccatgttggccaggctggtcttgaactcctgacctcaggtgatccacccaccttggcctcccaaagtgctaggattacaggcatgagccactgcgcctggctgagaagagcagctttaaagtacatcataataatggtgggtgtttccttcagttaggaaatgagcattttgctatgatttttattttaaaaaagagatggagaatttttgaaggtatccttatataatgatttatctgcacatgtatcattattaatgtatcaaaggaaaatggaaagtgacatgttgattaactagatttgattaatttgattaattagatttcttccaactcagtgacatttgtaacacgtgacaggttgcttgataaagggtaacatttctcttacaaatgctacttttgttattttttttcttttggtgatctgtgctgtcatttgcatgttagtaatctgattttaagaattttgtattttggggaacataaccatgttaaaagacagtttattttagtactgaaagaaaatagttacttttactctcatttatttaatttctgttcattttttccctgtattta

SEQ ID NO: 9032 - DNA, 352 bp, Homo sapiens
aaagcttaaactatggggaaagtcttgcctgttttccaaggcttcctccaccctgccaccgaagaacttacctggatgccaacctgggacccctttgtctttgggcttttgccctttgaaactgtgaatgcttcaagagccacataaatgctctggcagtgtctccatgtaactagtaaattgtcctggctggattcgttgtgaaatggaactgtcccatttactttggttgcaaataaggaagatgtatgagtattggcctggaaatgagccctctagtgtagagaggttattctgagggtttaaactacatggataggccttgggttcaaggttacaggaaaggctgtaa

SEQ ID NO: 9033 - DNA, 214 bp, Homo sapiens
tgcctggctgttttccactcattttttgatagcttaggcattatcttttcaagtgtcttttcattggcttaacctccctgccaaggtgggttgaatctccctctttaagtttccaataccatgttgcaaagatctctttcagaatgctcaacagatcgtattcaaatgatatacatgcttggcttcctcaataattgtatgatccaagatgata

SEQ ID NO: 9034 - DNA, 282 bp, Homo sapiens
aaactcatattctgtatataattgtatatacattgggtttttctcccttatagcaattcacactaggagtctcagtcaacatgattttttaatggctgtataatattctagcgtatgaacacatcattatttaaccattttcctgtcactgagtgagcctgtttgaaggttttgtttttttttcaattgaatgttatgttgtggtgagcagctctgtatataataattaattgtctgtgtttggatcataaagttagcattgactccaaaaagtgaaatcac

SEQ ID NO: 9035 - DNA, 410 bp, Homo sapiens
acgcctataatcccagcactttgggaggccgaggcgggtggatcatgaggtcaggagtttgagaccaacctgaccaagatggtgaaaccccgtctctactaaaaatacaaaaactagccaggcttggtggcgagcgcctgttatcccagctactcaggagactgagaacacaggtgcacactaccatgccagctggacaggtacttttcctgaagacaactgttatacttcagtacgaaacagaagtcctttatgcatatgctccctacttgtcacaaagattttttaaatgcactttaggatcaagatttaataaaataaataattgtcactgccttaattcatgttaaaacaccagagaatgtacccaccattacttttgcaacattgatgcaaatgtcagcacagta

SEQ ID NO: 9036 - DNA, 2235 bp, Homo sapiens
gaattccggctggcaggggagaacatggcgctgctctgggggctcctggtgctcagctggtcctgcctgcaaggcccctgctccgtgttctcccctgtgagcgccatggagcccttgggccggcagctaactagcgggccgaaccaggagcaggtgtccccacttaccctcctcaagttgggcaaccaggagcctggtggccagactgccctgaagagtcccccaggagtctgcagcagagaccccaccccagagcagacccacaggctggcccgggccatgatggccttcactgccgacctgttctccctggtggctcaaacgtccacctgccccaacctcatcctgtcacccctgagtgtggccctggcgctgtctcacctggcactaggtgctcagaaccacacgttgcagaggctgcaacaggtgctgcacgcaggctcagggccctgcctcccccatctgctgagccgcctctgccaggacctgggccccggcgcgttccgactggctgccaggatgtacctgcagaaaggatttcccatcaaagaagatttcctggaacaatccgaacagctatttggggcaaagcccgtgagcctgacgggaaagcaggaagatgacctggcaaacatcaaccaatgggtgaaggaggccacggaggggaagattcaggaattcctctctgggctgccggaagacaccgtgttgcttctcctcaacgccatccacttccagggtttctggaggaacaagtttgacccgagccttacccagagagactccttccacctggacgagcagttcacggtgcccgtggaaatgatgcaggcccgcacgtacccgctgcgctggttcttgctggagcagcctgagatccaggtggctcatttcccctttaagaacaacatgagctttgtggtccttgtacccacccactttgaatggaacgtgtcccaggtactggccaacctgagttgggacaccctgcacccacctctggtgtgggagaggcccaccaaggtccggctgcctaagctgtatctgaaacaccaaatggacctggtggccaccctcagccagctgggcctgcaggagttgttccaggccccagacctgcgtgggatctccgagcagagcctggtggtgtccggcgtgcagcatcagtccaccctggagctcagcgaggtcggcgtggaggcggcggcggccaccagcattgccatgtcccgcatgtccctgtcctccttcagcgtgaaccgccccttcctcttcttcatcttcgaggacaccacaggccttcccctcttcgtgggcagcgtgaggaaccccaaccccagtgcaccgcgggagctcaaggaacagcaggattccccgggcaacaaggacttcctccagagcctgaaaggcttcccccgcggagacaagcttttcggccctgacttaaaacttgtgccccccatggaggaggattacccccagtttggcagccccaagtgaggggccgtggctgtggcatccagactccctgcctggaccagcctctccactcatgtgactctttccaacctgctttgtggcactggggcaggggccgggggcagtctgagagaggccattctttcccaacacctcttggggagtttagggtgggggggggcgcggctgggaggagggcaggcatcggggagccgggagcctgaccctcatctttcttccaaacaggctcagagggtgtcctgcaccggggcctgggcaggagggaggtgcttctagttctgccaggagacaggttagctgctccccacgtcagctgggacaccccgacttttgtttaccagagaaaaagggagggggagagggctgcctttggacttgtcccgggacacctaggctagggtggggagagacgggccctggtggtggctcgggaggcgaagcgttgtcctcagccccgcgtggaactcgtgtctggcacagcctggctgtggcctaacctgccgagagtccatcagcctccatcctaccccctgtgccttgtcacgccagacttcccacggctcctcgagatcccaacactgccagcatttcccttccttcctctcctgtctccctcctctgcccgggagctcaggaaccgaggcagggaaggatcccatgagctccttaaggctcttttgtaaggtttttgtagtgatttttatgccacctgaataaagaatgaatgggcctggc

SEQ ID NO: 9037 - DNA, 1273 bp, Homo sapiens
gaattccggctggcaggggagaacatggcgctgctctgggggctcctggtgctcagctggtcctgcctgcaaggcccctgctccgtgttctcccctgtgagcgccatggagcccttgggccggcagctaactagcgggccgaaccaggagcaggtgtccccacttaccctcctcaagttgggcaaccaggagcctggtggccagactgccctgaagagtcccccaggagtctgcagcagagaccccaccccagagcagacccacaggctggcccgggccatgatggccttcactgccgacctgttctccctggtggctcaaacgtccacctgccccaacctcatcctgtcacccctgagtgtggccctggcgctgtctcacctggcactaggtgctcagaaccacacgttgcagaggctgcaacaggtgctgcacgcaggctcagggccctgcctcccccatctgctgagccgcctctgccaggacctgggccccggcgcgttccgactggctgccaggatgtacctgcagaaaggatttcccatcaaagaagatttcctggaacaatccgaacagctatttggggcaaagcccgtgagcctgacgggaaagcaggaagatgacctggcaaacatcaaccaatgggtgaaggaggccacggaggggaagattcaggaattcctctctgggctgccggaagacaccgtgttgcttctcctcaacgccatccacttccagggtttctggaggaacaagtttgacccgagccttacccagagagactccttccacctggacgagcagttcacggtgcccgtggaaatgatgcaggcccgcacgtacccgctgcgctggttcttgctggagcagcctgagatccaggtggctcatttcccctttaagaacaacatgagctttgtggtccttgtacccacccactttgaatggaacgtgtcccaggtactggccaacctgagttgggacaccctgcacccacctctggtgtgggagaggcccaccaaggtccggctgcctaagctgtatctgaaacaccaaatggacctggtggccaccctcagccagctgggcctgcaggagttgttccaggccccagacctgcgtgggatctccgagcagagcctggtggtgtccggcgtgcagcatcagtccaccctggagctcagcgaggtcctgctgaagccgttgcgtgccacaagctttgcaattgtcccgcaagtccccttggctctctttgtgcccgcccttccttttt

SEQ ID NO: 9038 - DNA, 392 bp, Homo sapiens
tgacaggagtgtggtgcgcttctgattgtgcggcactgtcgagcgtgttcctaagagcgaatgtctgtatcgagcaggtattgatgagaatcaagtcttcctggtttatattcacacacctgctggtgggaagaattttccacagacttccggctccacatatatcaagcctcatctctcctccacaaccggtactccctgttccaggtcccgtaggacacgttcctatcacagtacaaccgtggccttgctccttctggttacgacaccaggtgtcaggcaatggacaagaagcatgttcttgaagccagccctaccccaggatgactggcaatgacctactaaatgcagaagtgactgtgaacgcacaaatatatcccactaacctcaaa

SEQ ID NO: 9039 - DNA, 457 bp, Homo sapiens
gttttcctttccctatatccctttcattaacaatcaatctcaaaatggttagaagtatcagatattatatctgtaatttagcaaagcaattaaaagtaagaaaatcataaaagtattcaggaaagaagttatttattattattctggtcagtgttctgaatgattttcaagtattatagctaaatgtgaaaagtagctattttaagacaaatgacaacatttgaaactctgcatattaactgaaaactatgaaaatatatttggtactgtaggagatgaagtaattatttcaggaattagaatggaatactacttttctccatatttggctgcagaattggctggagaacatctaaaaatctgtattttattaataaaatacacagagataggacactgtatttgctgagagaatgagctggatttacataataaaaacgacaatgctatttgaaaa

SEQ ID NO: 9040 - DNA, 453 bp, Homo sapiens
aacacagctgtgtgttctttccagtcgcttctgttcccagacttcaggcaacatggcagctcccatacttgccagggtagttggaagggcagctctggagacaggaagtggaggtagaagcaaaggaagggagtccttggctgggaagtgcttgggttcggacagacagggaagaagggaaagtatgaggtgtgttcagggaagcttagaagggcagagaggtttcagtaggacatgtatgggctaaagggtcagttagaaccagagtatggagagtctgggatgccatatacaaaagtttgggctctaacagtctcctgatgaggagcaattttccaaaacatgaaagaattattctaagaatgacaaagggaagttaatataaattatgactaccacagggtttggcaatctcactaaccaccattaaactgaggagagaacaaaaaaaaa

SEQ ID NO: 9041 - DNA, 1045 bp, Homo sapiens
cctttggaaacaacggcaagacttcaaagcagatcaatagagaaataccaagacctgaacttcctagcaaatgctctcttctattttaaataatttgaagaccttttggtgtactcaagtcacaaaggatatttggtggtggaccgtggacaatccagaccaaacctccagagggaaggcaaccaaggtaccatgtgaaggcctgggcatataacatgaaacaagaaagataaggcccgtgcttacatagaacttggtgaagaatctagaccataacaagcacacagagaaaacgtatcacaaattgtgctaaagttctgtaaagggattaagatgaagtgtcacaagactgaattagacagagtgcccttgaaagagtgccaatttttagaatggagggtgtagatccatcctttgcaactggtgaggacctcctcagtaaggcactgagccaggagtctatacagccatgccaacagggagcactgtctttcattgtctgatgttattgcaaacctgttcttttcagctttcgtgtttcagcctagtccaaagacgtttacatcctggaagagaacttgctggcttttcacctcagcatgtatgggccaaactaatataacaagaagtcttgagaggagtcagcggccaagctccatgtcttgcagccaaacaatgctgtgggatggaaggtgggatgtcatgtgtctggtttacagcactcacgtatcagttggcagttaacggaagtgctactgattgtaacagtggaagcaatttgaaatgaaatacaacacttaaagcaaatgaaacggaagtgaatgccagcagtaaatggcaagaagaaatccagttcagtgtgttcctcagaaatcttgcctcttgggactaaatgctgcaaatttaactcttatccttgtttttcaagttttaccatctcaaagctatccactttatattaaattagttctgttatattatgtcaatttgtattcttaagagcacaagtttggcctcaaatagacctgagctgagatccaattct

SEQ ID NO: 9042 - DNA, 461 bp, Homo sapiens
gttttcctacgtaacaaacctgcacatcctgcacatgtatcctggaacttaaaataaaataaaataaaatttttaaaaagaataaataaatagcagcctagtccaaagacgtttacatcctggaagagaacttgctggcttttcacctcagcatgtatgggccaaactaatataacaagaagtcttgagaggagtcagcggccaagctccatgtcttgcagccaaacaatgctgtgggatggaaggtgggatgtcatgtgtctggtttacagcactcacgtatcagttggcagttaacggaagtgctactgattggtgatatgcctactcccccttcaccttcgatcatgattgtaaacttcgtgaggacatcaccaaaggctgacattggcaacatgcttcctgtacaatctgcagaacaacgatggaacaaaataaacaccttttctttataaattacc

SEQ ID NO: 9043 - DNA, 578 bp, Homo sapiens
  misc_feature (578)..(578): n is a, c, g, or t
ggagaagaccgtacttttcgcccccctcccacctctcgcccttcagttgccaccaaggtgcttggtccttccgaggaagctaaggccacattggggtgaggccatcacttcatccagtgactagcaccacctctggcaatgtcagccccacactcgcccgcgccatggcctccatctccgagcttgcctgtgtctacttggccctcattctgcacgatgacgaggtgatcatcatggaggttaatatcaataccctcattaaagcagccagtgtaaatgttgaaccttttggcctggcttgtttggaaaggccctggccaacgtcaacattggaagcctcatctgcaatgtaggggctggtggacctgctctagcagctggtgctgcaccagcaggaggtcctgccccctccattgctgctgcttcagctgaggagaagaaaatggaagcaaagaaagaagaatctgaggagtctgatgatgacatgggctttggtctttttactaaacctgttttataatgtgttcaataaaaagctggcctcgttggcctcagcggtggagctctgcggccggaan

SEQ ID NO: 9044 - DNA, 545 bp, Homo sapiens
agtgttgccggtttaaaagccgtgtttgagtactctaaagtacttttctgtgacagctattactataggaattggcaccagctaagaaaatttacagtttaatactttagagcaaataattgcttagggtgctttaaatagcacaggaaatgtgtagagtgtttacttgacatttgctatattgaacactaatactgaaacagattctttgaccacagagaatgccagtgtaggaggggtgggggtaggtgggagaaagaggcggagaaggaaacggcaatacaattagataaaaattaaatgacaaatgtactttttcatgatacagagatatcatggggaaaaatgcccatttgtttgatcaagtaatcttctagtgtggtagcagaaagcaaagtacagacaacttcctgggattaggttcctcctgctaaaggctgtcttcaccagaaggtcaaagccttgcagcccttggtcgctctggtttatttttcaagctcctgaaagcaagaggaatgacctccgtttttattaaaaaaaaaaaa

SEQ ID NO: 9045 - DNA, 870 bp, Homo sapiens
gaagatgtctttttccagatgttctttttatttaactaaaatgtctctagcttctttccatttatgataatcctgcccttttcgacccacagtgtagctcagaggaggaggaccttaagaaaaactgagattcgttattcagggcccatggtaccttaatctagaaacacatatcccaagaaatattttctttttaaaattatacatcaactttatgccttattgtttaaaaatcttctatcaaaagtatcatcgataagacaatttatcttgcttttgtacctcataattaccctaaaatgtgaagtttctagtctcactgatttcagatgaatatttaaaataatttgataagtttaatcaattgaactctactgtgtgagtgagggagagaaaggagttatttttgtgttttgaagaaagttgacaggatggaagatctgaaattatggctggggattgtagtgatagctggtagctgaaaccacccaaaaaagctagaaaagtgttctcttatgcctccagagatacctagaaaatatgaagaatgtggaaaagagcaagatggaaccctcagagtgtttcagataaggtctgttggtatctccataagcttttctcctatttggagaaaatagactctcactgaaactcttcaatgtttttaccctccatccttttcttagcaatctaaactcaatggcctcctgttccccaacactgcagtctgggcatctgactttgtcttccctctgcactcatttctgtgaatcatgaccagggatgaaactgatatccctagttcctcttccccatttcttctcacactcccctgcctgagaatcagttgagttcccaatacctcttcct

SEQ ID NO: 9046 - DNA, 765 bp, Homo sapiens
tgttacctgttttttttagacattatcttagcaagaatggtaagtctttgaacttgataggaatttggtgggttcaagctttcaaacttttttttgtaatatatccatttgggaagaggtgcagggaggaagaggtggtgattataagtaaggaagtgtggaaaaagttgtaaattcttgaagaaagcatgaggtaaggttttactcctgtttttttttttttatccctgtgtgccctttagttcagtttagttcatacaaattagatagacatgagcctctggttgagtctaatcttgaaaatattttctttgtgatggggttggttttagaagagtagcctggaatacgaaagcttttatttgtatggttatcatgtgtcttcaacctttatgtcaataattgcagacttagaatagcagttctaagttaatggtaaaatgttacctactttcgattccatagcatctatcttctttgagtactttcttagagtgtgattttaatgattatgatctttgttctaactattttgaggcttcattaaaaaataaattatgattttattgttagaatcgtttctataaattaacgtcactgcgcctggcccttaaatgtaaatttgtttttatcaatcaactatttcttcataaaaagcaaagaatacgattagaaatttgaagactatctggtattttaaaaataaagttcatctttctggccggctagttcatcgtctaacttttgcagaagtggaatgtgaat

SEQ ID NO: 9047 - DNA, 430 bp, Homo sapiens
cagcgaaggaatcacttgcgaacgcccgctctctctgccatacgagtgtcgttctgcggggccatctggctggcagcagctctcagccaatggcaggatgttgtaaacctcactcgctgaatgcggcaccgaaaatcttgaaaattaactgcaaaaataaaatcaaagctggctccgagatggtatttcttggcctggcataagctctccggatgaacttgctctgccttgttgatagatgcctcttactagtttggttttttcccaggagccagttggcatcttttaacttttccttgtaaaatccaggcagaaacattttgagagctttctggagtttttatttgctaattaaaatgtgagaagggaacacagccacaggtagaggtctagtgcaagccacagctgtgattcagaagaagaaaaaaaa

SEQ ID NO: 9048 - DNA, 299 bp, Homo sapiens
gccgggcgcggtggcgcgtgcctgtagtcccaagggcacagcaggggacagtgcagggaggtgtggggtaagggagggaagtcacatcagaaaagggaaagccacggaatgtgtgtgaagcccagaaatggcatttgcagttaattagcacatgtgagggttagacaggtaggtgaatgcaagctcaaggtttggaaaaatgacttttcagttatgtctttggtatcagacatacgaaaggtctctttgtagttcgtgttaatgtaacattaataaatttattgattccattgctttaa

SEQ ID NO: 9049 - DNA, 978 bp, Homo sapiens
gagctgtcccatttacccgacccgacgccggcgtgatgtggcttccgctggtgctgctcctggctgtgctgctgctggccgtcctctgcaaagtttacttgggactattctctggcagctccccgaatcctttctccgaagatgtcaaacggcccccagcgcccctggtaactaactaactaactaactaactaactaactaataactaactaactaactaactaactaactaataactaactaactaactaactaactaactaataactaactaactaactaactaactaactaataactaactaactaactaactaactaactaataactaactaactaactaactaactaactaataactaactaactaactaactaactaactaataactaactaactaactaactaactaactaataactaactaactaactaactaactaactaataactaactaactaactaactaactaactaataactaactaactaactaactaactaactaataactaactaactaactaactaactaactaataactaactaactaactaactaactaactaataactaactaactaactaactaactaactaataactaactaactaactaactaactaactaataactaactaactaactaactaactaactaataactaactaactaactaactaactaactaataactaactaactaactaactaactaactaataactaactaactaactaactaactaactaataactaactaactaactaactaactaactaataactaactaactaactaactaactaactaataactaactaactaactaactaactaactaataactaactaactaactaactaactaactaataactaactaactaactaactaactaactaataactaactaactaactaactaactaactaataactaactaactaactaactaactaactaa

SEQ ID NO: 9050 - DNA, 3013 bp, Homo sapiens
gagctgtcccatttacccgacccgacgccggcgtgatgtggcttccgctggtgctgctcctggctgtgctgctgctggccgtcctctgcaaagtttacttgggactattctctggcagctccccgaatcctttctccgaagatgtcaaacggcccccagcgcccctggtaactgacaaggaggccaggaagaaggttctcaaacaagctttttcagccaaccaagtgccggagaagctggatgtggtggtaattggcagtggctttgggggcctggctgcagctgcaattctagctaaagctggcaagcgagtcctggtgctggaacaacataccaaggcagggggctgctgtcatacctttggaaagaatggccttgaatttgacacaggaatccattacattgggcgtatggaagagggcagcattggccgttttatcttggaccagatcactgaagggcagctggactgggctcccctgtcctctccttttgacatcatggtactggaagggcccaatggccgaaaggagtaccccatgtacagtggagagaaagcctacattcagggcctcaaggagaagtttccacaggaggaagctatcattgacaagtatataaagctggttaaggtggtatccagtggagcccctcatgccatcctgttgaaattcctcccattgcccgtggttcagctcctcgacaggtgtgggctgctgactcgtttctctccattccttcaagcatccacccagagcctggctgaggtcctgcagcagctgggggcctcctctgagctccaggcagtactcagctacatcttccccacttacggtgtcacccccaaccacagtgccttttccatgcacgccctgctggtcaaccactacatgaaaggaggcttttatccccgagggggttccagtgaaattgccttccacaccatccctgtgattcagcgggctgggggcgctgtcctcacaaaggccactgtgcagagtgtgttgctggactcagctgggaaagcctgtggtgtcagtgtgaagaaggggcatgagctggtgaacatctattgccccatcgtggtctccaacgcaggactgttcaacacctatgaacacctactgccggggaacgcccgctgcctgccaggtgtgaagcagcaactggggacggtgcggcccggcttaggcatgacctctgttttcatctgcctgcgaggcaccaaggaagacctgcatctgccgtccaccaactactatgtttactatgacacggacatggaccaggcgatggagcgctacgtctccatgcccagggaagaggctgcggaacacatccctcttctcttcttcgctttcccatcagccaaagatccgacctgggaggaccgattcccaggccggtccaccatgatcatgctcatacccactgcctacgagtggtttgaggagtggcaggcggagctgaagggaaagcggggcagtgactatgagaccttcaaaaactcctttgtggaagcctctatgtcagtggtcctgaaactgttcccacagctggaggggaaggtggagagtgtgactgcaggatccccactcaccaaccagttctatctggctgctccccgaggtgcctgctacggggctgaccatgacctgggccgcctgcacccttgtgtgatggcctccttgagggcccagagccccatccccaacctctatctgacaggccaggatatcttcacctgtggactggtcggggccctgcaaggtgccctgctgtgcagcagcgccatcctgaagcggaacttgtactcagaccttaagaatcttgattctaggatccgggcacagaagaaaaagaattagttccatcagggaggagtcagaggaatttgcccaatggctggggcatctcccttgacttacccataatgtctttctgcattagttccttgcacgtataaagcactctaatttggttctgatgcctgaagagaggcctagtttaaatcacaattccgaatctggggcaatggaatcactgcttccagctggggcaggtgagatctttacgccttttataacatgccatccctactaataggatattgacttggatagcttgatgtctcatgacgagcggcgctctgcatccctcacccatgcctcctaactcagtgatcaaagcgaatattccatctgtggatagaacccctggcagtgttgtcagctcaacctggtgggttcagttctgtcctgaggcttctgctctcattcatttagtgctacgctgcacagttctacactgtcaagggaaaagggagactaatgaggcttaactcaaaacctgggcatggttttggttgccattccataggtttggagagctctagatctcttttgtgctgggttcagtggctcttcaggggacaggaaatgcctgtgtctggccagtgtggttctggagctttggggtaacagcaggatccatcagttagtagggtgcatgtcagatgatcatatccaattcatatggaagtcccgggtctgtcttccttatcatcggggtggcagctggttctcaatgtgccagcagggactcagtacctgagcctcaatcaagccttatccaccaaatacacagggaagggtgatgcagggaagggtgacatcaggagtcagggcatggactggtaagatgaatactttgctgggctgaagcaggctgcagggcattccagccaagggcacagcaggggacagtgcagggaggtgtggggtaagggagggaagtcacatcagaaaagggaaagccacggaatgtgtgtgaagcccagaaatggcatttgcagttaattagcacatgtgagggttagacaggtaggtgaatgcaagctcaaggtttggaaaaatgacttttcagttatgtctttggtatcagacatacgaaaggtctctttgtagttcgtgttaatgtaacattaataaatttattgattccattgctttaa

SEQ ID NO: 9051 - DNA, 2830 bp, Homo sapiens
gagctgtcccatttacccgacccgacgccggcgtgatgtggcttccgctggtgctgctcctggctgtgctgctgctggccgtcctctgcaaagtttacttgggactattctctggcagctccccgaatcctttctccgaagatgtcaaacggcccccagcgcccctggtaactgacaaggaggccaggaagaaggttctcaaacaaggaatccattacattgggcgtatggaagagggcagcattggccgttttatcttggaccagatcactgaagggcagctggactgggctcccctgtcctctccttttgacatcatggtactggaagggcccaatggccgaaaggagtaccccatgtacagtggagagaaagcctacattcagggcctcaaggagaagtttccacaggaggaagctatcattgacaagtatataaagctggttaaggtggtatccagtggagcccctcatgccatcctgttgaaattcctcccattgcccgtggttcagctcctcgacaggtgtgggctgctgactcgtttctctccattccttcaagcatccacccagagcctggctgaggtcctgcagcagctgggggcctcctctgagctccaggcagtactcagctacatcttccccacttacggtgtcacccccaaccacagtgccttttccatgcacgccctgctggtcaaccactacatgaaaggaggcttttatccccgagggggttccagtgaaattgccttccacaccatccctgtgattcagcgggctgggggcgctgtcctcacaaaggccactgtgcagagtgtgttgctggactcagctgggaaagcctgtggtgtcagtgtgaagaaggggcatgagctggtgaacatctattgccccatcgtggtctccaacgcaggactgttcaacacctatgaacacctactgccggggaacgcccgctgcctgccaggtgtgaagcagcaactggggacggtgcggcccggcttaggcatgacctctgttttcatctgcctgcgaggcaccaaggaagacctgcatctgccgtccaccaactactatgtttactatgacacggacatggaccaggcgatggagcgctacgtctccatgcccagggaagaggctgcggaacacatccctcttctcttcttcgctttcccatcagccaaagatccgacctgggaggaccgattcccaggccggtccaccatgatcatgctcatacccactgcctacgagtggtttgaggagtggcaggcggagctgaagggaaagcggggcagtgactatgagaccttcaaaaactcctttgtggaagcctctatgtcagtggtcctgaaactgttcccacagctggaggggaaggtggagagtgtgactgcaggatccccactcaccaaccagttctatctggctgctccccgaggtgcctgctacggggctgaccatgacctgggccgcctgcacccttgtgtgatggcctccttgagggcccagagccccatccccaacctctatctgacaggccaggatatcttcacctgtggactggtcggggccctgcaaggtgccctgctgtgcagcagcgccatcctgaagcggaacttgtactcagaccttaagaatcttgattctaggatccgggcacagaagaaaaagaattagttccatcagggaggagtcagaggaatttgcccaatggctggggcatctcccttgacttacccataatgtctttctgcattagttccttgcacgtataaagcactctaatttggttctgatgcctgaagagaggcctagtttaaatcacaattccgaatctggggcaatggaatcactgcttccagctggggcaggtgagatctttacgccttttataacatgccatccctactaataggatattgacttggatagcttgatgtctcatgacgagcggcgctctgcatccctcacccatgcctcctaactcagtgatcaaagcgaatattccatctgtggatagaacccctggcagtgttgtcagctcaacctggtgggttcagttctgtcctgaggcttctgctctcattcatttagtgctacgctgcacagttctacactgtcaagggaaaagggagactaatgaggcttaactcaaaacctgggcatggttttggttgccattccataggtttggagagctctagatctcttttgtgctgggttcagtggctcttcaggggacaggaaatgcctgtgtctggccagtgtggttctggagctttggggtaacagcaggatccatcagttagtagggtgcatgtcagatgatcatatccaattcatatggaagtcccgggtctgtcttccttatcatcggggtggcagctggttctcaatgtgccagcagggactcagtacctgagcctcaatcaagccttatccaccaaatacacagggaagggtgatgcagggaagggtgacatcaggagtcagggcatggactggtaagatgaatactttgctgggctgaagcaggctgcagggcattccagccaagggcacagcaggggacagtgcagggaggtgtggggtaagggagggaagtcacatcagaaaagggaaagccacggaatgtgtgtgaagcccagaaatggcatttgcagttaattagcacatgtgagggttagacaggtaggtgaatgcaagctcaaggtttggaaaaatgacttttcagttatgtctttggtatcagacatacgaaaggtctctttgtagttcgtgttaatgtaacattaataaatttattgattccattgctttaa

SEQ ID NO: 9052 - DNA, 2846 bp, Homo sapiens
gagctgtcccatttacccgacccgacgccggcgtgatgtggcttccgctggtgctgctcctggctgtgctgctgctggccgtcctctgcaaagtttacttgggactattctctggcagctccccgaatcctttctccgaagatgtcaaacggcccccagcgcccctggtaactgacaaggaggccaggaagaaggttctcaaacaagctttttcagccaaccaagtgccggagaagctggatgtggtggtaattggcagtggctttgggggcctggctgcagctgcaattctagctaaagctggcaagcgagtcctggtgctggaacaacataccaaggcagggggctgctgtcatacctttggaaagaatggccttgaatttgacacaggaatccattacattgggcgtatggaagagggcagcattggccgttttatcttggaccagatcactgaagggcagctggactgggctcccctgtcctctccttttgacatcatggtactggaagggcccaatggccgaaaggagtaccccatgtacagtggagagaaagcctacattcagggcctcaaggagaagtttccacaggaggaagctatcattgacaagtatataaagctggttaaggtggtatccagtggagcccctcatgccatcctgttgaaattcctcccattgcccgtggttcagctcctcgacaggtgtgggctgctgactcgtttctctccattccttcaagcatccacccagagcctggctgaggtcctgcagcagctgggggcctcctctgagctccaggcagtactcagctacatcttccccacttacggtgtcacccccaaccacagtgccttttccatgcacgccctgctggtcaaccactacatgaaaggaggcttttatccccgagggggttccagtgaaattgccttccacaccatccctgtgattcagcgggctgggggcgctgtcctcacaaaggccactgtgcagagtgtgttgctggactcagctgggaaagcctgtggtgtcagtgtgaagaaggggcatgagctggtgaacatctattgccccatcgtggtctccaacgcaggactgttcaacacctatgaacacctactgccggggaacgcccgctgcctgccaggtgtgaagcagcaactggggacggtgcggcccggcttaggcatgacctctgttttcatctgcctgcgaggcaccaaggaagacctgcatctgccgtccaccaactactatgtttactatgacacggacatggaccaggcgatggagcgctacgtctccatgcccagggaagaggctgcggaacacatccctcttctcttcttcgctttcccatcagccaaagatccgacctgggaggaccgattcccaggtggagagtgtgactgcaggatccccactcaccaaccagttctatctggctgctccccgaggtgcctgctacggggctgaccatgacctgggccgcctgcacccttgtgtgatggcctccttgagggcccagagccccatccccaacctctatctgacaggccaggatatcttcacctgtggactggtcggggccctgcaaggtgccctgctgtgcagcagcgccatcctgaagcggaacttgtactcagaccttaagaatcttgattctaggatccgggcacagaagaaaaagaattagttccatcagggaggagtcagaggaatttgcccaatggctggggcatctcccttgacttacccataatgtctttctgcattagttccttgcacgtataaagcactctaatttggttctgatgcctgaagagaggcctagtttaaatcacaattccgaatctggggcaatggaatcactgcttccagctggggcaggtgagatctttacgccttttataacatgccatccctactaataggatattgacttggatagcttgatgtctcatgacgagcggcgctctgcatccctcacccatgcctcctaactcagtgatcaaagcgaatattccatctgtggatagaacccctggcagtgttgtcagctcaacctggtgggttcagttctgtcctgaggcttctgctctcattcatttagtgctacgctgcacagttctacactgtcaagggaaaagggagactaatgaggcttaactcaaaacctgggcatggttttggttgccattccataggtttggagagctctagatctcttttgtgctgggttcagtggctcttcaggggacaggaaatgcctgtgtctggccagtgtggttctggagctttggggtaacagcaggatccatcagttagtagggtgcatgtcagatgatcatatccaattcatatggaagtcccgggtctgtcttccttatcatcggggtggcagctggttctcaatgtgccagcagggactcagtacctgagcctcaatcaagccttatccaccaaatacacagggaagggtgatgcagggaagggtgacatcaggagtcagggcatggactggtaagatgaatactttgctgggctgaagcaggctgcagggcattccagccaagggcacagcaggggacagtgcagggaggtgtggggtaagggagggaagtcacatcagaaaagggaaagccacggaatgtgtgtgaagcccagaaatggcatttgcagttaattagcacatgtgagggttagacaggtaggtgaatgcaagctcaaggtttggaaaaatgacttttcagttatgtctttggtatcagacatacgaaaggtctctttgtagttcgtgttaatgtaacattaataaatttattgattccattgctttaa

SEQ ID NO: 9053 - DNA, 3069 bp, Homo sapiens
gagctgtcccatttacccgacccgacgccggcgtgatgtggcttccgctggtgctgctcctggctgtgctgctgctggccgtcctctgcaaagtttacttgggactattctctggcagctccccgaatcctttctccgaagatgtcaaacggcccccagcgcccctggtaactgacaaggaggccaggaagaaggttctcaaacaagctttttcagccaaccaagtgccggagaagctggatgtggtggtaattggcagtggctttgggggcctggctgcagctgcaattctagctaaagctggcaagcgagtcctggtgctggaacaacataccaaggcagggggctgctgtcatacctttggaaagaatggccttgaatttgacacaggaatccattacattgggcgtatggaagagggcagcattggccgttttatcttggaccagatcactgaagggcagctggactgggctcccctgtcctctccttttgacatcatggtactggaagggcccaatggccgaaaggagtaccccatgtacagtggagagaaagcctacattcagggcctcaaggagaagtttccacaggaggaagctatcattgacaagtatataaagctggttaaggtggtatccagtggagcccctcatgccatcctgttgaaattcctcccattgcccgtggttcagctcctcgacaggtgtgggctgctgactcgtttctctccattccttcaagcatccacccagagcctggctgaggtcctgcagcagctgggggcctcctctgagctccaggcagtactcagctacatcttccccacttacggtgtcacccccaaccacagtgccttttccatgcacgccctgctggtcaaccactacatgaaaggaggcttttatccccgagggggttccagtgaaattgccttccacaccatccctgtgattcagcgggctgggggcgctgtcctcacaaaggccactgtgcagagtgtgttgctggactcagctgggaaagcctgtggtgtcagtgtgaagaaggggcatgagctggtgaacatctattgccccatcgtggtctccaacgcaggactgttcaacacctatgaacacctactgccggggaacgcccgctgcctgccaggtgtgaagcagcaactggggacggtgcggcccggcttaggcatgacctctgttttcatctgcctgcgaggcaccaaggaagacctgcatctgccgtccaccaactactatgtttactatgacacggacatggaccaggcgatggagcgctacgtctccatgcccagggaagaggctgcggaacacatccctcttctcttcttcgctttcccatcagccaaagatccgacctgggaggaccgattcccaggccggtccaccatgatcatgctcatacccactgcctacgagtggtttgaggagtggcaggcggagctgaagggaaagcggggcagtgactatgagaccttcaaaaactcctttgtggaagcctctatgtcagtggtcctgaaactgttcccacagctggaggggaagtggaacgtgccggtagattcttgttggaatgccggatctccattcgactgaacatcttgctttctaggctgatcacccccagtggactgctagtgcgctgttagccatgacctcggttggccctgctcgcacccttgatgtcctcgtctcgctgaatgcgtgcatgagcgccatactccagatatctatatgaccacgtgcctcggagggtttcttcgacctgctggacctgttcggtgggcctactagggtgcacttgctgatgcatgaatgaagccttatgctgaatgcggaacttgtactcagaccttaagaatcttgattctaggatccgggcacagaagaaaaagaattagttccatcagggaggagtcagaggaatttgcccaatggctggggcatctcccttgacttacccataatgtctttctgcattagttccttgcacgtataaagcactctaatttggttctgatgcctgaagagaggcctagtttaaatcacaattccgaatctggggcaatggaatcactgcttccagctggggcaggtgagatctttacgccttttataacatgccatccctactaataggatattgacttggatagcttgatgtctcatgacgagcggcgctctgcatccctcacccatgcctcctaactcagtgatcaaagcgaatattccatctgtggatagaacccctggcagtgttgtcagctcaacctggtgggttcagttctgtcctgaggcttctgctctcattcatttagtgctacgctgcacagttctacactgtcaagggaaaagggagactaatgaggcttaactcaaaacctgggcatggttttggttgccattccataggtttggagagctctagatctcttttgtgctgggttcagtggctcttcaggggacaggaaatgcctgtgtctggccagtgtggttctggagctttggggtaacagcaggatccatcagttagtagggtgcatgtcagatgatcatatccaattcatatggaagtcccgggtctgtcttccttatcatcggggtggcagctggttctcaatgtgccagcagggactcagtacctgagcctcaatcaagccttatccaccaaatacacagggaagggtgatgcagggaagggtgacatcaggagtcagggcatggactggtaagatgaatactttgctgggctgaagcaggctgcagggcattccagccaagggcacagcaggggacagtgcagggaggtgtggggtaagggagggaagtcacatcagaaaagggaaagccacggaatgtgtgtgaagcccagaaatggcatttgcagttaattagcacatgtgagggttagacaggtaggtgaatgcaagctcaaggtttggaaaaatgacttttcagttatgtctttggtatcagacatacgaaaggtctctttgtagttcgtgttaatgtaacattaataaatttattgattccattgctttaa

SEQ ID NO: 9054 - DNA, 2959 bp, Homo sapiens
gagctgtcccatttacccgacccgacgccggcgtgatgtggcttccgctggtgctgctcctggctgtgctgctgctggccgtcctctgcaaagtttacttgggactattctctggcagctccccgaatcctttctccgaagatgtcaaacggcccccagcgcccctggtaactgacaaggaggccaggaagaaggttctcaaacaagctttttcagccaaccaagtgccggagaagctggatgtggtggtaattggcagtggctttgggggcctggctgcagctgcaattctagctaaagctggcaagcgagtcctggtgctggaacaacataccaaggcagggggctgctgtcatacctttggaaagaatggccttgaatttgacacaggaatccattacattgggcgtatggaagagggcagcattggccgttttatcttggaccagatcactgaagggcagctggactgggctcccctgtcctctccttttgacatcatggtactggaagggcccaatggccgaaaggagtaccccatgtacagtggagagaaagcctacattcagggcctcaaggagaagtttccacaggaggaagctatcattgacaagtatataaagctggttaaggtggtatccagtggagcccctcatgccatcctgttgaaattcctcccattgcccgtggttcagctcctcgacaggtgtgggctgctgactcgtttctctccattccttcaagcatccacccagagcctggctgaggtcctgcagcagctgggggcctcctctgagctccaggcagtactcagctacatcttccccacttacggtgtcacccccaaccacagtgccttttccatgcacgccctgctggtcaaccactacatgaaaggaggcttttatccccgagggggttccagtgaaattgccttccacaccatccctgtgattcagcgggctgggggcgctgtcctcacaaaggccactgtgcagagtgtgttgctggactcagctgggaaagcctgtggtgtcagtgtgaagaaggggcatgagctggtgaacatctattgccccatcgtggtctccaacgcaggactgttcaacacctatgaacacctactgccggggaacgcccgctgcctgccaggtgtgaagcagcaactggggacggtgcggcccggcttaggcatgacctctgttttcatctgcctgcgaggcaccaaggaagacctgcatctgccgtccaccaactactatgtttactatgacacggacatggaccaggcgatggagcgctacgtctccatgcccagggaagaggctgcggaacacatccctcttctcttcttcgctttcccatcagccaaagatccgacctgggaggaccgattcccaggccggtccaccatgatcatgctcatacccactgcctacgagtggtttgaggagtggcaggcggagctgaagggaaagcggggcagtgactatgagaccttcaaaaactcctttgtggaagcctctatgtcagtggtcctgaaactgttcccacagctggaggggaaggtggagagtgtgactgcaggatccccactcaccaaccagttctatctggctgctccccgaggtgcctgctacggggctgaccatgacctgggccgcctgcacccttgtgtgatggcctccttgagggcccagagccccatccccaacctctatctgacaggccaggatatcttcacctgtggactggtcggggccctgcaaggtgccctgctgtgcagcagcgccatcctgaagcggaacttgtactcagaccttaagaatcttgattctaggatccgggcacagaagaaaaagaattagttccatcagggaggagtcagaggaatttgcccaatggctggggcatctcccttgacttacccataatgtctttctgcattagttccttgcacgtataaagcactctaatttggttctgatgcctgaagagaggcctagtttaaatcacaattccgaatctggggcaatggaatcactgcttccagctggggcaggtgagatctttacgccttttataacatgccatccctactaataggatattgacttggatagcttgatgtctcatgacgagcggcgctctgcatccctcacccatgcctcctaactcagtgatcaaagcgaatattccatctgtggatagaacccctggcagtgttgtcagctcaacctggtgggttcagttctgtcctgaggcttctgctctcattcatttagtgctacgctgcacagttctacactgtcaagggaaaagggagactaatgaggcttaaatctcttttgtgctgggttcagtggctcttcaggggacaggaaatgcctgtgtctggccagtgtggttctggagctttggggtaacagcaggatccatcagttagtagggtgcatgtcagatgatcatatccaattcatatggaagtcccgggtctgtcttccttatcatcggggtggcagctggttctcaatgtgccagcagggactcagtacctgagcctcaatcaagccttatccaccaaatacacagggaagggtgatgcagggaagggtgacatcaggagtcagggcatggactggtaagatgaatactttgctgggctgaagcaggctgcagggcattccagccaagggcacagcaggggacagtgcagggaggtgtggggtaagggagggaagtcacatcagaaaagggaaagccacggaatgtgtgtgaagcccagaaatggcatttgcagttaattagcacatgtgagggttagacaggtaggtgaatgcaagctcaaggtttggaaaaatgacttttcagttatgtctttggtatcagacatacgaaaggtctctttgtagttcgtgttaatgtaacattaataaatttattgattccattgctttaa

SEQ ID NO: 9055 - DNA, 2386 bp, Homo sapiens
gagctgtcccatttacccgacccgacgccggcgtgatgtggcttccgctggtgctgctcctggctgtgctgctgctggccgtcctctgcaaagtttacttgggactattctctggcagctccccgaatcctttctccgaagatgtcaaacggcccccagcgcccctggtaactgacaaggaggccaggaagaaggttctcaaacaaggtgtcacccccaaccacagtgccttttccatgcacgccctgctggtcaaccactacatgaaaggaggcttttatccccgagggggttccagtgaaattgccttccacaccatccctgtgattcagcgggctgggggcgctgtcctcacaaaggccactgtgcagagtgtgttgctggactcagctgggaaagcctgtggtgtcagtgtgaagaaggggcatgagctggtgaacatctattgccccatcgtggtctccaacgcaggactgttcaacacctatgaacacctactgccggggaacgcccgctgcctgccaggtgtgaagcagcaactggggacggtgcggcccggcttaggcatgacctctgttttcatctgcctgcgaggcaccaaggaagacctgcatctgccgtccaccaactactatgtttactatgacacggacatggaccaggcgatggagcgctacgtctccatgcccagggaagaggctgcggaacacatccctcttctcttcttcgctttcccatcagccaaagatccgacctgggaggaccgattcccaggccggtccaccatgatcatgctcatacccactgcctacgagtggtttgaggagtggcaggcggagctgaagggaaagcggggcagtgactatgagaccttcaaaaactcctttgtggaagcctctatgtcagtggtcctgaaactgttcccacagctggaggggaaggtggagagtgtgactgcaggatccccactcaccaaccagttctatctggctgctccccgaggtgcctgctacggggctgaccatgacctgggccgcctgcacccttgtgtgatggcctccttgagggcccagagccccatccccaacctctatctgacaggccaggatatcttcacctgtggactggtcggggccctgcaaggtgccctgctgtgcagcagcgccatcctgaagcggaacttgtactcagaccttaagaatcttgattctaggatccgggcacagaagaaaaagaattagttccatcagggaggagtcagaggaatttgcccaatggctggggcatctcccttgacttacccataatgtctttctgcattagttccttgcacgtataaagcactctaatttggttctgatgcctgaagagaggcctagtttaaatcacaattccgaatctggggcaatggaatcactgcttccagctggggcaggtgagatctttacgccttttataacatgccatccctactaataggatattgacttggatagcttgatgtctcatgacgagcggcgctctgcatccctcacccatgcctcctaactcagtgatcaaagcgaatattccatctgtggatagaacccctggcagtgttgtcagctcaacctggtgggttcagttctgtcctgaggcttctgctctcattcatttagtgctacgctgcacagttctacactgtcaagggaaaagggagactaatgaggcttaactcaaaacctgggcatggttttggttgccattccataggtttggagagctctagatctcttttgtgctgggttcagtggctcttcaggggacaggaaatgcctgtgtctggccagtgtggttctggagctttggggtaacagcaggatccatcagttagtagggtgcatgtcagatgatcatatccaattcatatggaagtcccgggtctgtcttccttatcatcggggtggcagctggttctcaatgtgccagcagggactcagtacctgagcctcaatcaagccttatccaccaaatacacagggaagggtgatgcagggaagggtgacatcaggagtcagggcatggactggtaagatgaatactttgctgggctgaagcaggctgcagggcattccagccaagggcacagcaggggacagtgcagggaggtgtggggtaagggagggaagtcacatcagaaaagggaaagccacggaatgtgtgtgaagcccagaaatggcatttgcagttaattagcacatgtgagggttagacaggtaggtgaatgcaagctcaaggtttggaaaaatgacttttcagttatgtctttggtatcagacatacgaaaggtctctttgtagttcgtgttaatgtaacattaataaatttattgattccattgctttaa

SEQ ID NO: 9056 - DNA, 3165 bp, Homo sapiens
gagctgtcccatttacccgacccgacgccggcgtgatgtggcttccgctggtgctgctcctggctgtgctgctgctggccgtcctctgcaaagtttacttgggactattctctggcagctccccgaatcctttctccgaagatgtcaaacggcccccagcgcccctggtaactgacaaggaggccaggaagaaggttctcaaacaagctttttcagccaaccaagtgccggagaagctggatgtggtggtaattggcagtggctttgggggcctggctgcagctgcaattctagctaaagctggcaagcgagtcctggtgctggaacaacataccaaggcagggggctgctgtcatacctttggaaagaatggccttgaatttgacacaggaatccattacattgggcgtatggaagagggcagcattggccgttttatcttggaccagatcactgaagggcagctggactgggctcccctgtcctctccttttgacatcatggtactggaagggcccaatggccgaaaggagtaccccatgtacagtggagagaaagcctacattcagggcctcaaggagaagtttccacaggaggaagctatcattgacaagtatataaagctggttaaggtggtatccagtggagcccctcatgccatcctgttgaaattcctcccattgcccgtggttcagctcctcgacaggtgtgggctgctgactcgtttctctccattccttcaagcatccacccagagcctggctgaggtcctgcagcagctgggggcctcctctgagctccaggcagtactcagctacatcttccccacttacggtgtcacccccaaccacagtgccttttccatgcacgccctgctggtcaaccactacatgaaaggaggcttttatccccgagggggttccagtgaaattgccttccacaccatccctgtgattcagcgggctgggggcgctgtcctcacaaaggccactgtgcagagtgtgttgctggactcagctgggaaagcctgtggtgtcagtgtgaagaaggggcatgagctggtgaacatctattgccccatcgtggtctccaacgcaggactgttcaacacctatgaacacctactgccggggaacgcccgctgcctgccaggtgtgaagcagcaactggggacggtgcggcccggcttaggcatgacctctgttttcatctgcctgcgaggcaccaaggaagacctgcatctgccgtccaccaactactatgtttactatgacacggacatggaccaggcgatggagcgctacgtctccatgcccagggaagaggctgcggaacacatccctcttctcttcttcgctttcccatcagccaaagatccgacctgggaggaccgattcccaggccggtccaccatgatcatgctcatacccactgcctacgagtggtttgaggagtggcaggcggagctgaagggaaagcggggcagtgactatgagaccttcaaaaactcctttgtggaagcctctatgtcagtggtcctgaaactgttcccacagctggaggggaaggtggagagtgtgactgcaggatccccactcaccaaccagttctatctggctgctccccgaggtgcctgctacggggctgaccatgacctgggccgcctgcacccttgtgtgatggcctccttgagggcccagagccccatccccaacctctatctgacaggccaggatatcttcacctgtggactggtcggggccctgcaaggtgccctgctgtgcagcagcgccatcctgaagcggaacttgtactcagaccttaagaatcttgattctaggatccgggcacagaagaaaaagaattagttccatcagggaggagtcagaggaatttgcccaatggctggggcatctcccttgacttacccataatgtctttctgcattagttccttgcacgtataaagcactctaatttggttctgatgcctgaagagaggcctagtttaaatcacaattccgaatctggggcaatggaatcactgcttccagctggggcaggtgagatctttacgccttttataacatgccatccctactaataggatattgacttggatagcttgatgtctcatgacgagcggcgctctgcatccctcacccatgcctcctaactcagtgatcaaagcgaatattccatctgtggatagaacccctggcagtgttgtcagctcaacctggtgggttcagttctgtcctgaggcttctgctctcattcatttagtgctacgctgcacagttctacactgtcaagggaaaagggagactaatgaggcttaactcaaaacctgggcatggttttggttgccattccataggtttggagagctctagatctcttttgtgctgggttcagtggctcttcaggggacaggaaatgcctgtgtctggccagtgtggttctggagctttggggtaacagcaggatccatcagttagtagggtgcatgtcagatgatcatatccaattcatatggaagtcccgggtctgtcttccttatcatcggggtggcagctggttctcaatgtgccagcagggactcagtacctgagcctcaatcaagccttatccaccaaatacacagggaagggtgatgcagggaagggtgacatcaggagtcagggcatggactggtaagatgaatactttgctgggctgaagcaggctgcagggcattccagccaagggcacagcaggggacagtgcagggaggtgtggggtaagggagggaagtcacatcagaaaagggaaagccacggaatgtgtgtgaagcccagaaatggcatttgcagttaattagcacatgtgagggttagacaggtaggtgaatgcaagctcaaggtttggaaaaatgacttttcagttatgtctttggtatcagacatacgaaaggtctctttgtagttcgtgttaatgtaacattaataaatttattgattccattgctttaacatttgaaaattattttggttttttgttcaagaaaacaaaactattattgtgatggcatttgcagaagctcagtaaacactatatacctgaataacacccaaataagctttaaaaaaataaaattaagtaattttaaagttaaaaaacaatg

SEQ ID NO: 9057 - DNA, 2990 bp, Homo sapiens
  misc_feature (2725)..(2725): n is a, c, g, or t
  misc_feature (2757)..(2757): n is a, c, g, or t
gagctgtcccatttacccgacccgacgccggcgtgatgtggcttccgctggtgctgctcctggctgtgctgctgctggccgtcctctgcaaagtttacttgggactattctctggcagctccccgaatcctttctccgaagatgtcaaacggcccccagcgcccctggtaactgacaaggaggccaggaagaaggttctcaaacaagctttttcagccaaccaagtgccggagaagctggatgtggtggtaattggcagtggctttgggggcctggctgcagctgcaattctagctaaagctggcaagcgagtcctggtgctggaacaacataccaaggcagggggctgctgtcatacctttggaaagaatggccttgaatttgacacaggaatccattacattgggcgtatggaagagggcagcattggccgttttatcttggaccagatcactgaagggcagctggactgggctcccctgtcctctccttttgacatcatggtactggaagggcccaatggccgaaaggagtaccccatgtacagtggagagaaagcctacattcagggcctcaaggagaagtttccacaggaggaagctatcattgacaagtatataaagctggttaaggtggtatccagtggagcccctcatgccatcctgttgaaattcctcccattgcccgtggttcagctcctcgacaggtgtgggctgctgactcgtttctctccattccttcaagcatccacccagagcctggctgaggtcctgcagcagctgggggcctcctctgagctccaggcagtactcagctacatcttccccacttacggtgtcacccccaaccacagtgccttttccatgcacgccctgctggtcaaccactacatgaaaggaggcttttatccccgagggggttccagtgaaattgccttccacaccatccctgtgattcagcgggctgggggcgctgtcctcacaaaggccactgtgcagagtgtgttgctggactcagctgggaaagcctgtggtgtcagtgtgaagaaggggcatgagctggtgaacatctattgccccatcgtggtctccaacgcaggactgttcaacacctatgaacacctactgccggggaacgcccgctgcctgccaggtgtgaagcagcaactggggacggtgcggcccggcttaggcatgacctctgttttcatctgcctgcgaggcaccaaggaagacctgcatctgccgtccaccaactactatgtttactatgacacggacatggaccaggcgatggagcgctacgtctccatgcccagggaagaggctgcggaacacatccctcttctcttcttcgctttcccatcagccaaagatccgacctgggaggaccgattcccaggccggtccaccatgatcatgctcatacccactgcctacgagtggtttgaggagtggcaggcggagctgaagggaaagcggggcagtgactatgagaccttcaaaaactcctttgtggaagcctctatgtcagtggtcctgaaactgttcccacagctggaggggaaggtggagagtgtgactgcaggatccccactcaccaaccagttctatctggctgctccccgaggtgcctgctacggggctgaccatgacctgggccgcctgcacccttgtgtgatggcctccttgagggcccagagccccatccccaacctctatctgacaggccaggatatcttcacctgtggactggtcggggccctgcaaggtgccctgctgtgcagcagcgccatcctgaagcggaacttgtactcagaccttaagaatcttgattctaggatccgggcacagaagaaaaagaattagttccatcagggaggagtcagaggaatttgcccaatggctggggcatctcccttgacttacccataatgtctttctgcattagttccttgcacgtataaagcactctaatttggttctgatgcctgaagagaggcctagtttaaatcacaattccgaatctggggcaatggaatcactgcttccagctggggcaggtgagatctttacgccttttataacatgccatccctactaataggatattgacttggatagcttgatgtctcatgacgagcggcgctctgcatccctcacccatgcctcctaactcagtgatcaaagcgaatattccatctgtggatagaacccctggcagtgttgtcagctcaacctggtgggttcagttctgtcctgaggcttctgctctcattcatttagtgctacgctgcacagttctacactgtcaagggaaaagggagactaatgaggcttaactcaaaacctgggcatggttttggttgccattccataggtttggagagctctagatctcttttgtgctgggttcagtggctcttcaggggacaggaaatgcctgtgtctggccagtgtggttctggagctttggggtaacagcaggatccatcagttagtagggtgcatgtcagatgatcatatccaattcatatggaagtcccgggtctgtcttccttatcatcggggtggcagctggttctcaatgtgccagcagggactcagtacctgagcctcaatcaagccttatccaccaaatacacagggaagggtgatgcagggaagggtgacatcaggagtcagggcatggactggtaaggtgcctgctacggggctgaccatgncctgggccgcctgcacccttgtgtgatggccncctaagggagggaagtcacatcagaaaagggaaagccacggaatgtgtgtgaagcccagaaatggcatttgcagttaattagcacatgtgagggttagacaggtaggtgaatgcaagctcaaggtttggaaaaatgacttttcagttatgtctttggtatcagacatacgaaaggtctctttgtagttcgtgttaatgtaacattaataaatttattgattccattgctttaa

SEQ ID NO: 9058 - DNA, 952 bp, Homo sapiens
tgttataaaaggcgtaaagatctcacatgccatccctactaataggatattgacttggatagcttgatgtctcatgacgagcggcgctctgcatccctcacccatgcctcctaactcagtgatcaaagcgaatattccatctgtggatagaacccctggcagtgttgtcagctcaacctggtgggttcagttctgtcctgaggcttctgctctcattcatttagtgctacgctgcacagttctacactgtcaagggaaaagggagactaatgaggcttaactcaaaacctgggcatggttttggttgccattccataggtttggagagctctagatctcttttgtgctgggttcagtggctcttcaggggacaggaaatgcctgtgtctggccagtgtggttctggagctttggggtaacagcaggatccatcagttagtagggtgcatgtcagatgatcatatccaattcatatggaagtcccgggtctgtcttccttatcatcggggtggcagctggttctcaatgtgccagcagggactcagtacctgagcctcaatcaagccttatccaccaaatacacagggaagggtgatgcagggaagggtgacatcaggagtcagggcatggactggtaagatgaatactttgctgggctgaagcaggctgcagggcattccagccaagggcacagcaggggacagtgcagggaggtgtggggtaagggagggaagtcacatcagaaaagggaaagccacggaatgtgtgtgaagcccagaaatggcatttgcagttaattagcacatgtgagggttagacaggtaggtgaatgcaagctcaaggtttggaaaaatgacttttcagttatgtctttggtatcagacatacgaaaggtctctttgtagttcgtgttaatgtaacattaataaatttattgattccattgctttaa

SEQ ID NO: 9059 - DNA, 478 bp, Homo sapiens
ctagaggatcccctcacccacaatccccctcggggtggcagctggttctcaatgtgccagcagggactcagtacctgagcctcaatcaagccttatccaccaaatacacagggaagggtgatgcagggaagggtgacatcaggagtcagggcatggactggtaagatgaatactttgctgggctgaagcaggctgcagggcattccagccaagggcacagcaggggacagtgcagggaggtgtggggtaagggagggaagtcacatcagaaaagggaaagccacggaatgtgtgtgaagcccagaaatggcatttgcagttaattagcacatgtgagggttagacaggtaggtgaatgcaagctcaaggtttggaaaaatgacttttcagttatgtctttggtatcagacatacgaaaggtctctttgtagttcgtgttaatgtaacattaataaatttattgattccattgctttaa

SEQ ID NO: 9060 - DNA, 1182 bp, Homo sapiens
gagctgtcccatttacccgacccgacgccggcgtgatgtggcttccgctggtgctgctcctggctgtgctgctgctggccgtcctctgcaaagtttacttgggactattctctggcagctccccgaatcctttctccgaagatgtcaaacggcccccagcgcccctggtaactgacaaggaggccaggaagaaggttctcaaacaagctttttcagccaaccaagtgccggagaagctggatgtggtggtaattggcagtggctttgggggcctggctgcagctgcaattctagctaaagctggcaagcgagtcctggtgctggaacaacataccaaggcagggggctgctgtcatacctttggaaagaatggccttgaatttgacacaggaatccattacattgggcgtatggaagagggcagcattggccgttttatcttggaccagatcactgaagggcagctggactgggctcccctgtcctctccttttgacatcatggtactggaagggcccaatggccgaaaggagtaccccatgtacagtggagagaaagcctacattcagggcctcaaggagaagtttccacaggaggaagctatcattgacaagtatataaagctggttaaggtggtatccagtggagcccctcatgccatcctgttgaaattcctcccattgcccgtggttcagctcctcgacaggtgtgggctgctgactcgtttctctccattccttcaagcatccacccagagcctggctgaggtcctgcagcagctgggggcctcctctgagctccaggcagtactcagctacatcttccccacttacgcatccctgtgattcagcgggctgggggcgctgtcctcacaaaggccactgtgcagagtgtgttgctggactcagctgggaaagcctgtggtgtcagtgtgaagaaggggcatgagctgaagggagggaagtcacatcagaaaagggaaagccacggaatgtgtgtgaagcccagaaatggcatttgcagttaattagcacatgtgagggttagacaggtaggtgaatgcaagctcaaggtttggaaaaatgacttttcagttatgtctttggtatcagacatacgaaaggtctctttgtagttcgtgttaatgtaacattaataaatttattgattccattgctttaa

SEQ ID NO: 9061 - DNA, 814 bp, Homo sapiens
gagctgtcccatttacccgacccgacgccggcgtgatgtggcttccgctggtgctgctcctggctgtgctgctgctggccgtcctctgcaaagtttacttgggactattctctggcagctccccgaatcctttctccgaagatgtcaaacggcccccagcgcccctggtaactgacaaggaggccaggaagaaggttctcaaacaagctttttcagccaaccaagtgccggagaagctggatgtggtggtaattggcagtggctttgggggcctggctgcagctgcaattctagctaaagctggcaagcgagtcctggtgctggaacaacataccaaggcagggggctgctgtcatacctttggaaagaatggccttgaatttgacacaggaatccattacattgggcgtatggaagagggcagcattggccgttttatcttggaccagatcactgaagggcagctggactgggctcccctgtcctctccttttgacatcatggtactggaagggcccaatggccgaaaggagtaccccatgtacagtggagagaaagcctacattcagggcctcaaggagaagtttccacaggaggaagctatcattgacaagtatataaagctggttaaggtggtatccagtggagcccctcatgccatcctgttgaaattcctcccattgcccgtggttcagctcctcgacaggtgtgggctgctgactcgtttctctccattccttcaagcatccacccagagtgtgtccctgactcacttgggaaaccctgtgtgtcagtgtgaagaagggcgccatga

SEQ ID NO: 9062 - DNA, 396 bp, Homo sapiens
ccccaccctcccctgggcctgcctgggtgcacgctcaggggcctctgctcttgcctcctaggccaggatatcttcacctgtggactggtcggggccctgcaaggtgccctgctgtgcagcagcgccatcctgaagcggaacttgtactcagaccttaagaatcttgattctaggatccgggcacagaagaaaaagaattagttccatcagggaggagtcagaggaatttgcccaatggctggggcatctcccttgacttacccataatgtctttctgcattagttccttgcacgtataaagcactctaatttggttctgatgcctgaagagaggcctagtttaaatcacaattccgaatctggggcaatggaatcactgcttccagctggggcagg

SEQ ID NO: 9063 - DNA, 1082 bp, Homo sapiens
tctgtttgtggtccggccttcttttgtgtgtgcgtgtgatgcatctttagatttttttcccccaccaggtggtttttgacactctctgagaggaccggagtggaagatgggtgggttaggggaagggagaagcattaggaggggattaaaatcgatcatcgtggctcccatccctttcccgggaacaggaacacactaccagccagagagaggagaatgacagtttgtcaagacatatttccttttgctttccagagaaatttcattttaatttctaagtaatgatttctgctgttatgaaagcaaagagaaaggatggaggcaaaataaaaaaaaatcacgtttcaagaaatgttaagctcttcttggaacaagccccaccttgctttccttgtgtagggcaaacccgctgtcccccgcgcgcctgggtggtcaggctgagggatttctacctcacactgtgcatttgcacagcagatagaaagacttgtttatattaaacagcttatttatgtatcaatattagttggaaggaccaggcgcagagcctctctctgtgacatgtgactctgtcaattgaagacaggacattaaaagagagcgagagagagaaacagttcagattactgcacatgtggataaaaacaaaaacaaaaaaaaggagtggttcaaaatgccatttttgcacagtgttaggaattacaaaatccacagaagatgttacttgcacaaaaagaaattaaatattttttaaagggagaggggctgggcagatcttaaataaaattcaaactctacttctgttgtctagtatgttattgagctaatgattcattgggaaaatacctttttatactcctttatcatggtactgtaactgtatccatattataaatataattatcttaaggattttttatttttttttatgtccaagtgcccacgtgaatttgctggtgaaagttagcacttgtgtgtaaattctacttcctcttgtgtgttttaccaagtatttatactctggtgcaactaactactgtgtgaggaattggtccatgtgcaataaataccaatgaagcaca

SEQ ID NO: 9064 - DNA, 3148 bp, Homo sapiens
  misc_feature (1371)..(1372): n is a, c, g, or t
  misc_feature (2079)..(2081): n is a, c, g, or t
  misc_feature (2086)..(2086): n is a, c, g, or t
  misc_feature (2109)..(2109): n is a, c, g, or t
tctgtttgtggtccggccttcttttgtgtgtgcgtgtgatgcatctttagatttttttcccccaccaggtggtttttgacactctctgagaggaccggagtggaagatgggtgggttaggggaagggagaagcattaggaggggattaaaatcgatcatcgtggctcccatccctttcccgggaacaggaacacactaccagccagagagaggagaatgacagtttgtcaagacatatttccttttgctttccagagaaatttcattttaatttctaagtaatgatttctgctgttatgaaagcaaagagaaaggatggaggcaaaataaaaaaaaatcacgtttcaagaaatgttaagctcttcttggaacaagccccaccttgctttccttgtgtagggcaaacccgctgtcccccgcgcgcctgggtggtcaggctgagggatttctacctcacactgtgcatttgcacagcagatagaaagacttgtttatattaaacagcttatttatgtatcaatattagttggaaggaccaggcgcagagcctctctctgtgacatgtgactctgtcaattgaagacaggacattaaaagagagcgagagagagaaacagttcagattactgcacatgtggataaaaacaaaaacaaaaaaaaggagtggttcaaaatgccatttttgcacagtgttaggaattacaaaatccacagaagatgttacttgcacaaaaagaaattaaatattttttaaagggagaggggctgggcagatcttaaataaaattcaaactctacttctgttgtctagtatgttattgagctaatgattcattgggaaaatacctttttatactcctttatcatggtactgtaactgtatccatattataaatataattatcttaaggattttttatttttttttatgtccaagtgcccacgtgaatttgctggtgaaagttagcacttgtgtgtaaattctacttcctcttgtgtgttttaccaagtatttatactctggtgcaactaactactgtgtgaggaattggtccatgtgcaataaataccaatgaagcacaatcaagattatgtactgtgtgtctgtaaagggtcagtgacaatgaaaaagacagcttgttttgttcaaaatatagactggatttcccatagagctcttttaataggtttccatgactcaataacatagcaaaatgcctccagacctaaataaggtgtttacctactgagagctacagatttaccctacattttcacagccggattcaaggtgttctagactacttgtaggcactttcaagatcccatctgctgcacttgactgaagaagtgacctttgtgattgcgtanntcctaaaaaaaaaaaaaaaaaaaaaaaagtgacgcggtcatttaactcagctgcaacttttcacggaaatgcaggaaagactaactcattgaatgatcagttgcctacttggaatgcaataagtggcttccacagcttatttttgttttccaatagaaaatcacagcctgcggatgatcagtgtgtgcagatttctccagaggctgtttagaatgaaaaatgctttcatggttaagcaaaaatgtataaaagggcttctgaagtaaatttttttctcttatgtagttaaatagatcattttgccagaagttctgggtggacagatcataggtaaaagcaagtgtgaaaggatttaagtttccaacaaaattacagcacccaaaggatggggtatttttcataaagttatttcctaaaggaagggatagtgcaattctgtcctgagattaattttacattctccaaaatacatttaaagttcttactatatttttaaataagctttttatttcatgaccatacagtaaagaaaccaaagtaaagaatattaacttctggcttatgctgcactttaaatgagcggagtattctttaacagggaaaagttgagactgaatattcttttttgcaatggcatattctaaagacaaggcaaccatcttctgagaaaggttaatgacgtagatgttttagagaccagcagaagnnngcatnaacagtaacagcctcaacaaaanctgctatgaagtttaacccctttccagcaaaaaaaaaaaaaaaaaaaggaaaaggaaaaaggagagcttctttaagaatacaaagataaatacttaaacatattttgaagaacataaaatcagtctcaggatgaaatgtcactataatttccctaggaaccaaatatggttaatatccatccacccccgaccatgagtatgtaagatgcattttcttaggggttttgtccttctttgtttgaaattactagacactgaagtaccaggtaaatgcttcactttcttggtttcctgtttatttacttattttgtctagataagtcttcacatttaaataaaaagaaatcttcccagcccaaaacatatacgcaggcccttcaaatctcaggtcttaaaatcactcaggtcttaaaatcatgaaagtcctttaagctttaagaacaaatgtgtataatttaactacttagtacacaggtttagtcactttagtgagttagaggaaaccactgtaatcttggggccggtttctatgtattggcaggaaatagaaaagatttttgtgtgatctcccaagatctccaactgaaaattacatggattcagaaacagaccatgtcagtgattccaaatccccatgaagactactttttgtcgcttttgaagaaggcagccattgatttataataggaaatgtggggagctgggctgtcagtcccagtagcgatggcagtgggaggagagagcagccagtcctgcttaatctggtgagattgtgcactgcagaaataggaagaagaagacattgagtgtgcaaaaaggcagccttacccatgggcttgtgtgtatcaaagtaccaaaagcataaaccttaaaatcaaagcaggaaaatgtgatcaagatccatagatttgctacattggacgttacattcaggttaaacactaacaataactcaatggagattttccaggatttataaattctctctccgatgtagaaatgtgtaattggtatagcatatggcttcatactttggtga

SEQ ID NO: 9065 - DNA, 1363 bp, Homo sapiens
tctgtttgtggtccggccttcttttgtgtgtgcgtgtgatgcatctttagatttttttcccccaccaggtggtttttgacactctctgagaggaccggagtggaagatgggtgggttaggggaagggagaagcattaggaggggattaaaatcgatcatcgtggctcccatccctttcccgggaacaggaacacactaccagccagagagaggagaatgacagtttgtcaagacatatttccttttgctttccagagaaatttcattttaatttctaagtaatgatttctgctgttatgaaagcaaagagaaaggatggaggcaaaataaaaaaaaatcacgtttcaagaaatgttaagctcttcttggaacaagccccaccttgctttccttgtgtagggcaaacccgctgtcccccgcgcgcctgggtggtcaggctgagggatttctacctcacactgtgcatttgcacagcagatagaaagacttgtttatattaaacagcttatttatgtatcaatattagttggaaggaccaggcgcagagcctctctctgtgacatgtgactctgtcaattgaagacaggacattaaaagagagcgagagagagaaacagttcagattactgcacatgtggataaaaacaaaaacaaaaaaaaggagtggttcaaaatgccatttttgcacagtgttaggaattacaaaatccacagaagatgttacttgcacaaaaagaaattaaatattttttaaagggagaggggctgggcagatcttaaataaaattcaaactctacttctgttgtctagtatgttattgagctaatgattcattgggaaaatacctttttatactcctttatcatggtactgtaactgtatccatattataaatataattatcttaaggattttttatttttttttatgtccaagtgcccacgtgaatttgctggtgaaagttagcacttgtgtgtaaattctacttcctcttgtgtgttttaccaagtatttatactctggtgcaactaactactgtgtgaggaattggtccatgtgcaataaataccaatgaagcacaatcaagattatgtactgtgtgtctgtaaagggtcagtgacaatgaaaaagacagcttgttttgttcaaaatatagactggatttcccatagagctcttttaataggtttccatgactcaataacatagcaaaatgcctccagacctaaataaggtgtttacctactgagagctacagatttaccctacattttcacagccggattcaatcttaccctacctacctcacagggctgttgtgaggacccagcgcgtttggatgtggaagtaaaagtgctgcta

SEQ ID NO: 9066 - DNA, 909 bp, Homo sapiens
aaatttctagagttttatttcctggccctaggatctttgactatactacttaaatttgtgggggaaccttggggatcaagtgataggtttgcgaaggtgctttggaacttcttgaatgtgctgaacatatttagcaatgtgctttctctgattgttctgttttcgtctttttttgtcctatttttttcttttagtcttattgttagggccccatcacatgttgctagttctgaaaatgcagtcaatctccttttagggagaactttcagataacgagattttctccctgtttcatataagaagttcctttcctctctcccgccctcctccctctctttctttttctttcccttcctcccttccttttcattcctttcttttttcctttccgttcttttttgggtaggggtttctggtagaaactggaaaacctgctagacaaattctaaaagctatataatgctagaatttttcttatatatcttgtaatttcctaactttggtcctccttttatctttagtattttagtccaaccttctagaatggggcttagtaaagctctgaagtctaatacctgtattctaatactgttttcatctgaatatgtgtagttagtatggttcttactgagtatggaacaattagaactgtgatattttctgtgctgtacttttttctggagacgagctggctagcagatgtgaaccactggcattggtgtcttaggggccaccactagcctatgcaccatcactatgagagctttgctctggtcaggtgatggtgtgaagtgggtgctgggtaattgcttggacaggccctgcaggtgtgggtgcaggtaaggaagatgggaataaagcagccactgagccctataaatgtctcccacatggtactctttatctcaa

SEQ ID NO: 9067 - DNA, 823 bp, Homo sapiens
ccttgactctgggtgggctgtgtgacttttccttgctcaatagaatgagaaggaggtggcgcaccggctacaaggctagaccgggggctcgcatatctccacttgcagctgccactgccattagaagaacttgctcagccagctcctgggccccaggaaaaggacaagtgtcacccagaacagagccacctccagctgcactcagctccagaagctggcccggccggtccagtacaccttttaaataatgtcctctacgtgccggtgtggaagtagcccggatgcaattgaatgaacaacagacggtgctttccaggacggcgctgtgctttccaggatggtgctgtgctttcattcatttgggtagctcctctgtgagcctcccagcgccgactgcagagcccccactctccagcctgcaagaccccgaaattcaagccacacaaagaaaggaggagggggccgttggcatttactgaaccttataaaactgtcagcaaaacagcccttaggcttggactccctgctagccgggttttacggtgctgaagtcagcatcttgattcagctgcataaataatctcctgcagtcctgcaaggcctggggtaggagagggtatggggaccagggcactctgtaagggctgggataggaaccccagggaataagacagaccaactgcgggacttcagactccactgcagccgggatcgggttgttgttaatttcttaagcaatttctaaattctgtattgactctctcatgcatgtaactgatccttagatattgtcagccaaatgactaaaggatttagaaatctg

SEQ ID NO: 9068 - DNA, 529 bp, Homo sapiens
caggaaaaggacaagtgtcacccagaacagagccacctccagctgcactcagctccagaagctggcccggccggtccagtacacgtgagaataaattgttgttgcttttacccattaggttttggggtgatttgtgatgttgcattgttgcagcaataacaaataaatataaacagtgtttgagctgtgggctccaatggacttttgtcacttattagctctggccattatttcaactttctaaatcacaatatctgtcacaaagacagcaaaataaaaatacctaaagtaatattttagaaggtgcatgcatttctgtgtgctaattaaatgagataatgctggtaagggcgttctgcagcacctggcgccagttgtattacattagcccttgtgtggtggccctgtgcctgggaagggattctgcaggcagaggcctctgcatcgggtgctgaccacagccctgtgcccaccagctggttccgtagttttcagattttacaggttaaacgtgctgaaagcagcacgg

SEQ ID NO: 9069 - DNA, 357 bp, Homo sapiens
tggcatttactgaaccttataaaactgtcagcaaaacagcccttaggcttggactccctgctagccgggttttacggtgctgaagtcagcatcttgattcagctgcataaataatctcctgcagtcctgcaaggcctggggtaggagagggtatggggaccagggcactctgtaagggctgggataggaaccccagggaataagacagaccaactgcgggacttcagactccactgcagccgggatcgggttgttgttaatttcttaagcaatttctaaattctgtattgactctctcatgcatgtaactgatccttagatattgtcagccaaatgactaaaggatttagaaatctg

SEQ ID NO: 9070 - DNA, 386 bp, Homo sapiens
ctttattaagtcagaaatttttcactgattttgactcatccagtactcttattaaaattagtaatgaagctatttgtattgagtttgtagttaatagccctaaaagggagctgatatgaatatattaggttggaacttactcctcaaatgttgatgtaatagctaacctgactgaataaaagagaaaatgtgtagtgtggagatttttttaaaaatctattattgtcttgctgaggttcctccaaaaaaaaaagtctgagaccgggtgtggtggctcacgcctgtaatcccagcattttaggaggccaaggcaggtggatcatgaggtcaggagatcgagaccatcctggctaacacagtgaaaccccgtctctactaaaaataca

SEQ ID NO: 9071 - DNA, 965 bp, Homo sapiens
gaaggagctaggagaagaattctctcatgtcagtagccctcttagggactacttaggttcggatccatttagtaactgaactcctagtgagcttgtttgcaaatcctctctattgtcccagccgtgaagtacttctctggcttccatagttaccttctccctggctggtgaagaagtggcccatgtttctggggtttcccagaatgttacagtcagcctcaaagcccatgtggaaggtatatttcctggtttctattgcaaaagttctgtagtggtgttgctgcaatgaaatggaagtccaaggcattccctgttagtgacggagtgttcagaggacctacacgtaattgctttcatgttcgttacccaagtaggggacagagagagaggagccactgacacgtgaacccagggagacctcccctggatggctgggtgcaggtacttaccacccaccaaccgatgatgagtatctgccaatttactggaagaaaacctgaaatctagctgtggagccaagatagatgcagaagaaagcgagtggaacaggagaaagtgtataggaactcagaggctggcagggccttcctgagtctgggaagggctgaggcgggaacgaggacacatttgctccctgggacacgtggttcttagtgtgcaggggaaacccgcatgtggtcactgagggagaggcacaggcccacacatctcatcaccatgaaggaaggaacaattcaatgtggccaatttgtttttctactatggcaagcactttttttcctttaacatttttggtattttaagagtttttgcacatttattctgcttctaatgaagttttaattgtttctctttcctcctgagtttagaatctgattcataatgtacatgggaacccatgaatttcactcatatttaatgcataaccaaagatataaactgaaatgatacattttgagaagatc

SEQ ID NO: 9072 - DNA, 2237 bp, Homo sapiens
  misc_feature (1545)..(1545): n is a, c, g, or t
  misc_feature (1674)..(1674): n is a, c, g, or t
caaatgtttataaaatgactaccgtatgctaggcagagtatggagcatagcaactatgaaatctgtttcagtagcttggtccagaaccctcagtatttggaaagttgcatattgtcatcatttactcccattttgattatattaagaaagtatgtgagggcatgagcctctcaggaggggacctcagtgtttccggatccctcctgccctctgtgggacctagatgctggctagctgagcaccgtcaatgtgtcctcgcagaagacgaagcgcatttcctttcttctcttttttgcggttccagtgtgatgacatggcttggtcaccatgcttcgtgtttgctaaaaagaaaccagggatatgagtttctgaattctcaacctggtgcctttgccagagaacaaagtcaggttaatcagacgtcttcccctctccagcccaactcattcgctggctgacctctcctggtcccatggttctaagaaccatctccacgataatgattcccaaatgaatatcctagcccagacctctccctcccactccagacttctgcttggattccgtgggctgtctcataggcatcttatgcttgctacatctaagtccagcaccagattccaccctccagcctgctcagcccttgcctcctgcttttgggaaacggcacatcgctttttccttgagttgtgtgtgccagaagtcgtgaactcacccttgactccatcttcctttcaggagctcagttcatcatcaggtcctctttgttccactttcaaaatgtgcagaacacatctctttcttccttccaccaggctgttttccatgtggcagccaggtgaattcctttaaaatgtaacttagttatctcatccctgttagcttagaaaggctcagtgttgcttcctacttcattcagtaaaaaatccagagttcttactatgacctgcacacttccaaatctgtcccccaaccagcataacccttattcctattccccccaaccccatacgcacagagtgtgcttcagccacgtcggtcacctttttgttcctctccaatcccactgagggcctttggccttgccgctgcctctgcctggaatagtcctctgtcacatgtcttcatggtatgctctcactatcttctttctgaacaaatgccttattgcagcagccttcagggaccacttgaacaccccatcctttgtccttccttgtaccccttatctgctgtattttgttttcactgcattgacacattatgcatttatgtctctctcccaccgccttgcacacacatactagaatgccagctccctgggtgcagagacagagcatttgttcacagaaacaaccccagagcctggagagggcctggcacaaagttgccgaatcatctgtatcctcatgggtttgctcccaggagctcagagatcgcctctttggaaaagttgcggcagggaggccagaatgagccaagcgtaacccagtcacacccgtagctcgtccttagtagaagctaagaatccagggcaggtctganagcacattcacagggtgctctgaggcttctaaacagctgtccacataggcactaacttggtatatcctcctgacaaccctatgactgaagcagcatcttcatgagagatgctttcgatgggagaggttnagtaacttgtctgaggtctcttggccgtaaagggacaatattgcaccagcagccacatgcctgaccatttatgtagcttctgactagcactaaatttctttaaggtctgatttatctctaacatgcttgtaaattttgcataatttttactccataattctggtacatgtttgttttaatataaaaataacagttgatcctaccagcttactcactccacttttttgcttcttgggctaaaagtgacacaccaataagattgcatcctggctgggcgcggtggctcacacctgtaaccccagcactttgggaggccgaggcgggtggatcacaaggtccggagttcaagaccagcctggccaacatggagaaactctgtctctactaaaaatacaaaaattatttgggcatggtggtgcatgcctgtaatcccagctacttgggaggctgaggaaggagaattgcttgaactggggcccaggaggcagaggtagaagtgagccaagattgcgccactgcactccagcctgggcaacagagcgagactctatctcaaaaaaaaa

SEQ ID NO: 9073 - DNA, 414 bp, Homo sapiens
gacatgccagaagtaaaggtcagtgaacttgaagatagattaatagaaattacccaagctgaagaacaaagagaagactgaaagaaaaatggactgttgtttggtttcctgtgagactataccaagcaatctaaatccagaaataaagaaaagatagaataagtcagaaaaaattgaaaaataatggtgaaaattttccacatttgattaaaaacattaaccttcagaattaagagatttagaaaaaatacatgccaggtaaaaacaaacgcactgaaaaccaaatataagaagacaagtttaagagcagccataggaggaaaataagacaaattatatatagtagtattataaaaacaaatgatggctgatttctcatcagaaagaaaaaatggatgctatatttaaagtact

SEQ ID NO: 9074 - DNA, 2284 bp, Homo sapiens
cctgggcagagagtgaggagcacccaagtggggccagaggaacgttgtgtgtggcagcaaggagcccgcagaggaacatggcgctgctctgggggctcctggtgctcagctggtcctgcctgcaaggcccctgctccgtgttctcccctgtgagcgccatggagcccttgggccggcagctaactagcgggccgaaccaggagcaggtgtccccacttaccctcctcaagttgggcaaccaggagcctggtggccagactgccctgaagagtcccccaggagtctgcagcagagaccccaccccagagcagacccacaggctggcccgggccatgatggccttcactgccgacctgttctccctggtggctcaaacgtccacctgccccaacctcatcctgtcacccctgagtgtggccctggcgctgtctcacctggcactaggtgctcagaaccacacgttgcagaggctgcaacaggtgctgcacgcaggctcagggccctgcctcccccatctgctgagccgcctctgccaggacctgggccccggcgcgttccgactggctgccaggatgtacctgcagaaaggatttcccatcaaagaagatttcctggaacaatccgaacagctatttggggcaaagcccgtgagcctgacgggaaagcaggaagatgacctggcaaacatcaaccaatgggtgaaggaggccacggaggggaagattcaggaattcctctctgggctgccggaagacaccgtgttgcttctcctcaacgccatccacttccagggtttctggaggaacaagtttgacccgagccttacccagagagactccttccacctggacgagcagttcacggtgcccgtggaaatgatgcaggcccgcacgtacccgctgcgctggttcttgctggagcagcctgagatccaggtggctcatttcccctttaagaacaacatgagctttgtggtccttgtacccacccactttgaatggaacgtgtcccaggtactggccaacctgagttgggacaccctgcacccacctctggtgtgggagaggcccaccaaggtccggctgcctaagctgtatctgaaacaccaaatggacctggtggccaccctcagccagctgggcctgcaggagttgttccaggccccagacctgcgtgggatctccgagcagagcctggtggtgtccggcgtgcagcatcagtccaccctggagctcagcgaggtcggcgtggaggcggcggcggccaccagcattgccatgtcccgcatgtccctgtcctccttcagcgtgaaccgccccttcctcttcttcatcttcgaggacaccacaggccttcccctcttcgtgggcagcgtgaggaaccccaaccccagtgcaccgcgggagctcaaggaacagcaggattccccgggcaacaaggacttcctccagagcctgaaaggcttcccccgcggagacaagcttttcggccctgacttaaaacttgtgccccccatggaggaggattacccccagtttggcagccccaagtgaggggccgtggctgtggcatccagagtccctgcctggaccagcctctccactcatgtgactctttccaaccggctttgtggcactggggcaggggccgggggcagtctgagagaggccattctttcccaacacctcttggggagtttagggtggggggggggcgcggctgggaggagggcaggcatcggggagccgggagcctgaccctcatctttcttccaaacaggctcagagggtgtcctgcaccggggcctgggcaggagggaggtgcttctagttctgccaggagacaggttagctgctccccacgtcagctgggacaccccgacttttgtttaccagagaaaaagggagggggagagggctgcctttggacttgtcccgggacacctaggctagggtggggagagacgggccctggtggtggctcgggaggcgaagcgttgtcctcagccccgcgtggaactcgtgtctggcacagcctggctgtggcctaacctgccgagagtccatcagcctccatcctaccccctgtgccttgtcacgccagacttcccacggctcctcgagatcccaacactgccagcatttcccttccttcctctcctgtctccctcctctgcccgggagctcaggaaccgaggcagggaaggatcccatgagctccttaaggctcttttgtaaggtttttgtagtgatttttatgccacctgaataaagaatgaatgggc

SEQ ID NO: 9075 - DNA, 2262 bp, Homo sapiens
gggacttgaaaaactggagcctgttcttggcaagaagattctaatgcccaggaacatggcgctgctctgggggctcctggtgctcagctggtcctgcctgcaaggcccctgctccgtgttctcccctgtgagcgccatggagcccttgggccggcagctaactagcgggccgaaccaggagcaggtgtccccacttaccctcctcaagttgggcaaccaggagcctggtggccagactgccctgaagagtcccccaggagtctgcagcagagaccccaccccagagcagacccacaggctggcccgggccatgatggccttcactgccgacctgttctccctggtggctcaaacgtccacctgccccaacctcatcctgtcacccctgagtgtggccctggcgctgtctcacctggcactaggtgctcagaaccacacgttgcagaggctgcaacaggtgctgcacgcaggctcagggccctgcctcccccatctgctgagccgcctctgccaggacctgggccccggcgcgttccgactggctgccaggatgtacctgcagaaaggatttcccatcaaagaagatttcctggaacaatccgaacagctatttggggcaaagcccgtgagcctgacgggaaagcaggaagatgacctggcaaacatcaaccaatgggtgaaggaggccacggaggggaagattcaggaattcctctctgggctgccggaagacaccgtgttgcttctcctcaacgccatccacttccagggtttctggaggaacaagtttgacccgagccttacccagagagactccttccacctggacgagcagttcacggtgcccgtggaaatgatgcaggcccgcacgtacccgctgcgctggttcttgctggagcagcctgagatccaggtggctcatttcccctttaagaacaacatgagctttgtggtccttgtacccacccactttgaatggaacgtgtcccaggtactggccaacctgagttgggacaccctgcacccacctctggtgtgggagaggcccaccaaggtccggctgcctaagctgtatctgaaacaccaaatggacctggtggccaccctcagccagctgggcctgcaggagttgttccaggccccagacctgcgtgggatctccgagcagagcctggtggtgtccggcgtgcagcatcagtccaccctggagctcagcgaggtcggcgtggaggcggcggcggccaccagcattgccatgtcccgcatgtccctgtcctccttcagcgtgaaccgccccttcctcttcttcatcttcgaggacaccacaggccttcccctcttcgtgggcagcgtgaggaaccccaaccccagtgcaccgcgggagctcaaggaacagcaggattccccgggcaacaaggacttcctccagagcctgaaaggcttcccccgcggagacaagcttttcggccctgacttaaaacttgtgccccccatggaggaggattacccccagtttggcagccccaagtgaggggccgtggctgtggcatccagagtccctgcctggaccagcctctccactcatgtgactctttccaaccggctttgtggcactggggcaggggccgggggcagtctgagagaggccattctttcccaacacctcttggggagtttagggtggggggggggcgcggctgggaggagggcaggcatcggggagccgggagcctgaccctcatctttcttccaaacaggctcagagggtgtcctgcaccggggcctgggcaggagggaggtgcttctagttctgccaggagacaggttagctgctccccacgtcagctgggacaccccgacttttgtttaccagagaaaaagggagggggagagggctgcctttggacttgtcccgggacacctaggctagggtggggagagacgggccctggtggtggctcgggaggcgaagcgttgtcctcagccccgcgtggaactcgtgtctggcacagcctggctgtggcctaacctgccgagagtccatcagcctccatcctaccccctgtgccttgtcacgccagacttcccacggctcctcgagatcccaacactgccagcatttcccttccttcctctcctgtctccctcctctgcccgggagctcaggaaccgaggcagggaaggatcccatgagctccttaaggctcttttgtaaggtttttgtagtgatttttatgccacctgaataaagaatgaatgggc

SEQ ID NO: 9076 - DNA, 1938 bp, Homo sapiens
cctgggcagagagtgaggagcacccaagtggggccagaggaacgttgtgtgtggcagcaaggagcccgcagaggaacatggcgctgctctgggggctcctggtgctcagctggtcctgcctgcaaggcccctgctccgtgttctcccctgtgagcgccatggagcccttgggccggcagctaactagcgggccgaaccaggagcaggtgtccccacttaccctcctcaagttgggcaaccaggagcctggtggccagactgccctgaagagtcccccaggagtctgcagcagagaccccaccccagagcagacccacaggctggcccgggccatgatggccttcactgccgacctgttctccctggtggctcaaacgtccacctgccccaacctcatcctgtcacccctgagtgtggccctggcgctgtctcacctggcactaggtgtttctggaggaacaagtttgacccgagccttacccagagagactccttccacctggacgagcagttcacggtgcccgtggaaatgatgcaggcccgcacgtacccgctgcgctggttcttgctggagcagcctgagatccaggtggctcatttcccctttaagaacaacatgagctttgtggtccttgtacccacccactttgaatggaacgtgtcccaggtactggccaacctgagttgggacaccctgcacccacctctggtgtgggagaggcccaccaaggtccggctgcctaagctgtatctgaaacaccaaatggacctggtggccaccctcagccagctgggcctgcaggagttgttccaggccccagacctgcgtgggatctccgagcagagcctggtggtgtccggcgtgcagcatcagtccaccctggagctcagcgaggtcggcgtggaggcggcggcggccaccagcattgccatgtcccgcatgtccctgtcctccttcagcgtgaaccgccccttcctcttcttcatcttcgaggacaccacaggccttcccctcttcgtgggcagcgtgaggaaccccaaccccagtgcaccgcgggagctcaaggaacagcaggattccccgggcaacaaggacttcctccagagcctgaaaggcttcccccgcggagacaagcttttcggccctgacttaaaacttgtgccccccatggaggaggattacccccagtttggcagccccaagtgaggggccgtggctgtggcatccagagtccctgcctggaccagcctctccactcatgtgactctttccaaccggctttgtggcactggggcaggggccgggggcagtctgagagaggccattctttcccaacacctcttggggagtttagggtggggggggggcgcggctgggaggagggcaggcatcggggagccgggagcctgaccctcatctttcttccaaacaggctcagagggtgtcctgcaccggggcctgggcaggagggaggtgcttctagttctgccaggagacaggttagctgctccccacgtcagctgggacaccccgacttttgtttaccagagaaaaagggagggggagagggctgcctttggacttgtcccgggacacctaggctagggtggggagagacgggccctggtggtggctcgggaggcgaagcgttgtcctcagccccgcgtggaactcgtgtctggcacagcctggctgtggcctaacctgccgagagtccatcagcctccatcctaccccctgtgccttgtcacgccagacttcccacggctcctcgagatcccaacactgccagcatttcccttccttcctctcctgtctccctcctctgcccgggagctcaggaaccgaggcagggaaggatcccatgagctccttaaggctcttttgtaaggtttttgtagtgatttttatgccacctgaataaagaatgaatgggc

SEQ ID NO: 9077 - DNA, 2226 bp, Homo sapiens
cctgggcagagagtgaggagcacccaagtggggccagaggaacgttgtgtgtggcagcaaggagcccgcagaggaacatggcgctgctctgggggctcctggtgctcagctggtcctgcctgcaaggcccctgctccgtgttctcccctgtgagcgccatggagcccttgggccggcagctaactagcgggccgaaccaggagcaggtgtccccacttaccctcctcaagttgggcaaccaggagcctggtggccagactgccctgaagagtcccccaggagtctgcagcagagaccccaccccagagcagacccacaggctggcccgggccatgatggccttcactgccgacctgttctccctggtggctcaaacgtccacctgccccaacctcatcctgtcacccctgagtgtggccctggcgctgtctcacctggcactaggtgctcagaaccacacgttgcagaggctgcaacaggtgctgcacgcaggctcagggccctgcctcccccatctgctgagccgcctctgccaggacctgggccccggcgcgttccgactggctgccaggatgtacctgcagaaaggatttcccatcaaagaagatttcctggaacaatccgaacagctatttggggcaaagcccgtgagcctgacgggaaagcaggaagatgacctggcaaacatcaaccaatgggtgaaggaggccacggaggggaagattcaggaattcctctctgggctgccggaagacaccgtgttgcttctcctcaacgccatccacttccagggtttctggaggaacaagtttgacccgagccttacccagagagactccttccacctggacgagcagttcacggtgcccgtggaaatgatgcaggcccgcacgtacccgctgcgctggttcttgctggagcagcctgagatccaggtggctcatttcccctttaagaacaacatgagctttgtggtccttgtacccacccactttgaatggaacgtgtcccaggtactggccaacctgagttgggacaccctgcacccacctctggtgtgggagaggcccaccaaggtccggctgcctaagctgtatctgaaacaccaaatggacctggtggccaccctcagccagctgggcctgcaggagttgttccaggccccagacctgcgtgggatctccgagcagagcctggtggtgtccggcgtgcagcatcagtccaccctggagctcagcgaggtcggcgtggaggcggcggcggccaccagcattgccatgtcccgcatgtccctgtcctccttcagcgtgaaccgccccttcctcttcttcatcttcgaggacaccacaggccttcccctcttcgtgggcagcgtgaggaaccccaaccccagtgcaccgcgggagctcaaggaacagcaggattccccgggcaacaaggacttcctccagagcctgaaaggcttcccccgcggagacaagcttttcggccctgacttaaaacttgtgccccccatggaggaggattacccccagtttggcagccccaagtgaggggccgtggctgtggcatccagagtccctgcctggaccagcctctccactcatgtgactctttccaaccggctttgtggcactggggcaggggccgggggcagtctgagagaggccattctttcccaacacctcttggggagtttagggtggggggggggcgcggctgggaggagggcaggcatcggggagccgggagcctgaccctcatctttcttccaaacaggctcagagggtgtcctgcaccggggcctgggcaggagggaggtgcttctagttctgccaggagacaggttagctgctccccacgtcagctgggacaccccgacttttgtttaccaggtggggagagacgggccctggtggtggctcgggaggcgaagcgttgtcctcagccccgcgtggaactcgtgtctggcacagcctggctgtggcctaacctgccgagagtccatcagcctccatcctaccccctgtgccttgtcacgccagacttcccacggctcctcgagatcccaacactgccagcatttcccttccttcctctcctgtctccctcctctgcccgggagctcaggaaccgaggcagggaaggatcccatgagctccttaaggctcttttgtaaggtttttgtagtgatttttatgccacctgaataaagaatgaatgggc

SEQ ID NO: 9078 - DNA, 2078 bp, Homo sapiens
cctgggcagagagtgaggagcacccaagtggggccagaggaacgttgtgtgtggcagcaaggagcccgcagaggaacatggcgctgctctgggggctcctggtgctcagctggtcctgcctgcaaggcccctgctccgtgttctcccctgtgagcgccatggagcccttgggccggcagctaactagcgggccgaaccaggagcaggtgtccccacttaccctcctcaagttgggcaaccaggagcctggtggccagactgccctgaagagtcccccaggagtctgcagcagagaccccaccccagagcagacccacaggctggcccgggccatgatggccttcactgccgacctgttctccctggtggctcaaacgtccacctgccccaacctcatcctgtcacccctgagtgtggccctggcgctgtctcacctggcactaggtgctcagaaccacacgttgcagaggctgcaacaggtgctgcacgcaggctcagggccctgcctcccccatctgctgagccgcctctgccaggacctgggccccggcgcgttccgactggctgccaggatgtacctgcagaaaggatttcccatcaaagaagatttcctggaacaatccgaacagctatttggggcaaagcccgtgagcctgacgggaaagcaggaagatgacctggcaaacatcaaccaatgggtgaaggaggccacggaggggaagattcaggaattcctctctgggctgccggaagacaccgtgttgcttctcctcaacgccatccacttccagggtttctggaggaacaagtttgacccgagccttacccagagagactccttccacctggacgagcagttcacggtgcccgtggaaatgatgcaggcccgcacgtacccgctgcgctggttcttgctggagcagcctgagatccaggtggctcatttcccctttaagaacaacatgagctttgtggtccttgtacccacccactttgaatggaacgtgtcccaggtactggccaacctgagttgggacaccctgcacccacctctggtgtgggagaggcccaccaaggtccggctgcctaagctgtatctgaaacaccaaatggacctggtggccaccctcagccagctgggcctgcaggagttgttccaggccccagacctgcgtgggatctccgagcagagcctggtggtgtccggcgtgcagcatcagtccaccctggagctcagcgaggtcggcgtggaggcggcggcggccaccagcattgccatgtcccgcatgtccctgtcctccttcagcgtgaaccgccccttcctcttcttcatcttcgaggacaccacaggccttcccctcttcgtgggcagcgtgaggaaccccaaccccagtgcaccgcgggagctcaaggaacagcaggattccccgggcaacaaggacttcctccagagcctgaaaggcttcccccgcggagacaagcttttcggccctgacttaaaacttgtgccccccatggaggaggattacccccagtttggcagccccaagtgaggggccgtggctgtggcatccagagtccctgcctggaccagcctctccactcatgtgactctttccaaccggctttgtggcactggggcaggggccgggggcagtctgagagaggccattctttcccaacacctcttggggagtttagggtggggggggggcgcggctgggaggagggcaggcatcggggagccgggagcctgaccctcatctttcttccaaacaggctcagagggtgtcctgcaccggggcctgggcaggagggaggtgcttctagttctgccaggagacaggttagctgctccccacgtcagctgggacaccccgacttttgtttaccacagacttcccacggctcctcgagatcccaacactgccagcatttcccttccttcctctcctgtctccctcctctgcccgggagctcaggaaccgaggcagggaaggatcccatgagctccttaaggctcttttgtaaggtttttgtagtgatttttatgccacctgaataaagaatgaatgggc

SEQ ID NO: 9079 - DNA, 1845 bp, Homo sapiens
cctgggcagagagtgaggagcacccaagtggggccagaggaacgttgtgtgtggcagcaaggagcccgcagaggaacatggcgctgctctgggggctcctggtgctcagctggtcctgcctgcaaggcccctgctccgtgttctcccctgtgagcgccatggagcccttgggccggcagctaactagcgggccgaaccaggagcaggtgtccccacttaccctcctcaagttgggcaaccaggagcctggtggccagactgccctgaagagtcccccaggagtctgcagcagagaccccaccccagagcagacccacaggctggcccgggccatgatggccttcactgccgacctgttctccctggtggctcaaacgtccacctgccccaacctcatcctgtcacccctgagtgtggccctggcgctgtctcacctggcactaggtgctcagaaccacacgttgcagaggctgcaacaggtgctgcacgcaggctcagggccctgcctcccccatctgctgagccgcctctgccaggacctgggccccggcgcgttccgactggctgccaggatgtacctgcagaaaggatttcccatcaaagaagatttcctggaacaatccgaacagctatttggggcaaagcccgtgagcctgacgggaaagcaggaagatgacctggcaaacatcaaccaatgggtgaaggaggccacggaggggaagattcaggaattcctctctgggctgccggaagacaccgtgttgcttctcctcaacgccatccacttccagggtttctggaggaacaagtttgacccgagccttacccagagagactccttccacctggacgagcagttcacggtgcccgtggaaatgatgcaggcccgcacgtacccgctgcgctggttcttgctggagcagcctgagatccaggtggctcatttcccctttaagaacaacatgagctttgtggtccttgtacccacccactttgaatggaacgtgtcccaggtactggccaacctgagttgggacaccctgcacccacctctggtgtgggagaggcccaccaaggtccggctgcctaagctgtatctgaaacaccaaatggacctggtggccaccctcagccagctgggcctgcaggagttgttccaggccccagacctgcgtgggatctccgagcagagcctggtggtgtccggcgtgcagcatcagtccaccctggagctcagcgaggtcggcgtggaggcggcggcggccaccagcattgccatgtcccgcatgtccctgtcctccttcagcgtgaaccgccccttcctcttcttcatcttcgaggacaccacaggccttcccctcttcgtgggcagcgtgaggaaccccaaccccagtgcaccgcgggagctcaaggaacagcaggattccccgggcaacaaggacttcctccagagcctgaaaggcttcccccgcggagacaagcttttcggccctgacttaaaacttgtgccccccatggaggaggattacccccagtttggcagccccaagtgaggggccgtggctgtggcatccagagtccctgcctggaccagcctctccactcatgtgactctttccaaccggctttgtggcactggggcaggggccgggggcagtctgagagaggccattctttcccaacacctcttggggagtttagggtgggggcccgtctccccaatggtaaaaaactctttgcggtctcgcgttacttattagctttgttttgcctccacattcgaggagagtcttgtatttattatgttttaatcaggtcaccatgggcatttttcccagggtctct

SEQ ID NO: 9080 - DNA, 889 bp, Homo sapiens
agcagttgcctactttccccgcagtgcgataaacccctcgttggggccgccttagttctcggccgctctcggaggatggcgatctgggagcccctccatgggacccctctcacactttgtcactggaattttatttattttttagttcatattttattttgcttatagaagagaaagatatcccttccgaagaggaggaagcttacagaagtttataacctttcaaaaagtaaataagtccaggcttgcctgattctgccctacccggacttccttatcccgtctgtgggagacccaggtgctttctcattactcttcagaaggaaaccgctttggagttcgtgtaattgggacttggggatcagggagaagttgccgaaacttctcataccagtaactactgaagtagaagattctggaaaaatccttgtcttgggggcacaggctaaaacctgaaggatttttaagatgaccaaggttccagccaccaagaagcttcagagttcccccaactcgggggctgtccggcccttttatgcctcggagaacctaaggcaggtcccagacaagccaatgaagagcatcaagtatatggacaaggaaataataaacctcaaaaaggaccttatacgaagccgcctctcccactgccggacacaaaggagaatggggaaaaggccaaacagagaagccacaagcaagcaagaaagaaacgacaatgagatgttccatctggccacacttctggatcccaccaacattaaggaaggaatcaggattccccttcagaaggaaacaccatgttttccaagggaagtcatctctccaagtggcacaaactccctgaccccatatcccagtattaaatgaggcgaattgttaacaaaga

SEQ ID NO: 9081 - DNA, 948 bp, Homo sapiens
agcagttgcctactttccccgcagtgcgataaacccctcgttggggccgccttagttctcggccgctctcggaggatggcgatctgggagcccctccatgggacccctctcacactttgtcactggaattttatttattttttagttcatattttattttgcttatagaagagaaagatatcccttccgaagaggaggaagcttacagaagtttataacctttcaaaaagtaaataagtccaggcttgcctgattctgccctacccggacttccttatcccgtctgtgggagacccaggtgctttctcattactcttcagaaggaaaccgctttggagttcgtgtaattgggacttggggatcagggagaagttgccgaaacttctcataccagtaactactgaagtagaagattctggaaaaatccttgtcttgggggcacaggctaaaacctgaaggatttttaagatgaccaaggttccagccaccaagaagcttcagagttcccccaactcgggggctgtccggcccttttatgcctcggagaacctaaggcaggtcccagacaagccaatgaagagcatcaagtatatggacaaggaaataataaacctcaaaaaggaccttatacgaagccgatgcagtgagaggcaaagtgagacaccctctcccttcacctccatcttctgaaagccacccttctccaccactaccggaatctccaccctgccccatccagcagcacaacttcatggaactgatgactgagcccaggaggactcctggaagggtagctgcctgggtgctgacaggtggcaggaagtcacagtggctaagaaactggctcctgagaatcgcctgaacccgggaggtggaggttgcagtgagctgagatcgcgccattgcactccagcatgggcaacaagtgaaactctgtctcaaaagaaa

SEQ ID NO: 9082 - DNA, 462 bp, Homo sapiens
caacctgtgcctccttgaaactggtagagaaactgggatcagtattgggacacccagagctgatatgtgaggaattattggcatgatctacaaatgtgtgaaatttgaggattttataagccatttcagtcatatcagtgtttattaactacataggttaatattttgtgtaggtcatttttgtttatactgtagtcttcagtagcttaatggtgggaagcttacatctggaagcttttggggctcctgcacctagccaggttcagtcattgtgattctgtaacttcaccagaactcaaatttcttgggaggttttgaggaccacaaaaattaacttgagtccaggtgtggtggctcacacctgtaatgctagcactttgggaggccaaggcaggctgatcacctgaggtcagaagttcgagaccagcctggccaacatggtgaaaccttgtctctactaaa

SEQ ID NO: 9083 - DNA, 1760 bp, Homo sapiens
ctgcgagagggagggaggaaagggctgtgcaataaagtcctctcccattatcttactcaacacaatttattgagcaaatactacgtgttctaggccctgtacaggccatctcacttgatggccacaacagtcctgggaagcagacaaaccaagaatgctaatgcccatctgacatcagagacggcagtgctccccagacctctcacagcaagctggatggacaggcagggccagaagagtcctccagccaagcctcctccttggttcttgtacccaaaggtagagaaactgcaggtcttcttgggtctgagcctggggcaggggttctggctggacgaaaaggggcagggaagcagcaggagccagagaccacaggctgagctggagcccacatggttcctaagggcagaacaggctctgaggaaagatgtgaacagctggaaggctgacagtgaggtctcagcagtgtggtgcacccctccccagcacatccgagtccctggggtcccaggtaccataggtactgcaagatttcccaagagacagcaccagcaacctgggcctgaccctgtacaaccgccaaaccatcacgagccccgcccaggcttgtgagaaggacatgcatggatcaagaccttgcccttgacccatctgcttctcagatgggctcccaatcaccagaggaagttgctgtcagcccactttccagactgcccccacactggggctctaagtttcaggtctgagattttatgctctgtgatcccccacttggggttcccagactccaagctcctggctcctgtgttcagtggctgaattcaacgtccgagattcggaatatgggctccagcctgcagaaactcttctccaggcattgtggtttgtgcctcctagtgttggctccctcatgaaaagagggtcaacacccttggcccccagccaagatctctgctcaatgtccatacaaggaggaagccaaaaccaagtgaggtgctggagccacattcaaatgtggttgataatcttggggcaggccagctctgatgtggatgaaagctgagccaactgtcgccacagctgcccagctgggtccgctgctcccctggctggctgttcagctgtctactaagcccaaaaaaaatactatgcctcactagcagaggctagacccagaaagagggaacaatgaggacccctcccctcccagaggaaagagctgagccactctccccatccagggaacagtaggtccaggctggatgctggtatgatgggaactgcccttttcacctgccagggagttcctaaagctgatcttcctggggttctgaaggttgcgacctaggttaatgagaccaaattctaggaaccactgcccaggccaaccaccgccagtgctgcagagatcaaagaaatccacagccacaggaaaaggagcttctttggacatgcccagctccaaactgtcccagggggaactggcacagcccttacatagcccaccccctcttggcctcaccgtggcctggaaattggccagagggtccacatcctgcccaaaccactctcctctcgtcccaaggcaaaggtgatgccctgaggcctagggctggataaagcccagctctggatgctgctaacccactctgctgccccaccccatcctccaatttttatactaggctctttgccattgtgacgtcccatgacatagtctgatgcacgataaaacaattatttctttatcttgcaattgt

SEQ ID NO: 9084 - DNA, 795 bp, Homo sapiens
ttactgaatcaaatttgtctaggtattttcaaaacttttaagatgaataccacatactttgctgctatcaaaatctgttttaggaaaccaataaataatagtttgaaggaattatttgggactatttttattacaccttttgatagcattgctctgacctttgtgtttattttgcttgagtttaagttgagtttattttgcttaagtttggtataaccaaacttatttgtgggttctgtacatacagaaatgaggaattatgtagagattttttaaaaccacaggctttatgtggaacaataattctgacttgaaggttagaactgaataccacaagttaattaaatattttttgtattttattgtgtaaaatatgatcgattctaggagccactaccaatgagaaagaaccagttgttttgttcttgggctataaaaacttgttccagcctcttttttgtcacatgtcctccctatattcctaaactgcttgttgtttttattctgaggccgctgaagtcttttcttgaacttggagtaccttattctagtacatctcaaaactgaaaaaaaaaaaatagatctttatagaattttgctttctttcactttttaataattaacatatattcattattttaaagaagggtagacatcaaatttcacttgtgacgtatcaagactgaaattgttaagtatgtaaaattatattttacctttaatggtataagtattatatgaatatttttctctattcttattggttttgcaatataaagaacagtttaatcacag

SEQ ID NO: 9085 - DNA, 127 bp, Homo sapiens
ttttggatcttcagtgacccaagcaagctaagcacactaaaaggaaataggaggagagaggtggattttgaaactcatccttggagctctgagaaaactagggatgttttggcagagagctatactg

SEQ ID NO: 9086 - DNA, 282 bp, Homo sapiens
cccccaggcaaattttgataagatacttgtgtcaatacaaaaagagattaatgccaatgtgaatcaatacccgcttattggtttgggttgcttcttctccacgcagcagctggcaccaagaggggtttccaaacaccagcggctcccagccaatctgcatatttctttatttaaatcatgagagtgggaagtggcaagggaatggtgggttggcagggggctgcccacgcccactcccaaattgagaagggaatgaaaataaaacaaacgcaacttgtcaac

SEQ ID NO: 9087 - DNA, 430 bp, Homo sapiens
ggcggaggttgcagtgagtcaagattggattgtgccactgcactccagtctgagtgattctgtctcaaaaaaataaaaaaataaagaagtcacaggaggcccagcatacagagaacatcaggtatagagagatgtccttcctgggccaaaacaggtggtgtcattttgctgagtttgatagagaaaaagtcctgatgtctgtgtacataagaactcacgtctagagttcgagaaaaaccggtgatgagaacttgaacttggaggagtcacagggggatcaggaaagcttggtaattggcatgaatttcctacctccaggggcctggcacagagacctaggatgaagagggggccatcgagcatggtgttgaacttggagagtgttggggagctgccccagccgagggcactggatgggaattcatgccag

SEQ ID NO: 9088 - DNA, 471 bp, Homo sapiens
gaacgggaaaagaagaatgaggatgaccaagtagaaagcatgcttttgcactgttgcgttgatcaatctggacctgaggccagcatcctggtgcctactaggcaggaggaaatcaagatgtataaaactaaggtaggccagagaaacaggaaccaatcatggtggaccataaaatgaggaagtcattggacatttagaaaaaggacaaacagagtgggcctgaaggggagattggcaaagagagtagtatactttagtgtgtaacacagcaaaacacagttacaaaatcttcttaaaatttggagacagattctgaagcatatctatcaagagaatgtttctatctcaaggtacttaaaagaatattgaaaatatttgttcttaaggtacctcaccattatcttattttagcaagcatttaaaaacagaactaccatttgactcagcaattccattactgtttatatatca

SEQ ID NO: 9089 - DNA, 887 bp, Homo sapiens
ctaaaatttgctggacaaaaattgtacctcacagttaacagtctgtttcactaacatttgtgcataaaacctatatatctgaaggaaaaaatgcctaaaagcaaagataatatgagggtagccatggggaaaacagaaattggcaccaaaatccttgaaaagtatcctaacccatgctgtttcacgtttacactttactcaatttacctttatcagaggggccagaaacaatcaattcaacttcattgaccctataatttacaaaggaatagcgtatgtattggctttggggtttctaagaaatagtaaaaggataaatagtgaattggtcacctaatcgggaaaggtggttccttggtaagatgataatttcaggtgtgaatgaccacagtgtattcctctgcccactccttcagcctcatagcctcaggcaaggtggccacttcaatagaaccctgcaaagtcagagggcctgagttcaagccctaacgcctttgtctctctgatttacccactctgacacaaggcaggcttctcacttctcagagtgtttcctcattaggagtctgataataattcagatattacctcccaagggaaaagaggaaataatatatacaacaatgctttatatagtataccttgatatccctaaatcattatatttctggatgcttttcctgaagcaaatgtttggctggactaccaaagtcagtaatttcataggcttttctcaagtatttgtcgtaactactgtcgtctccattttacctaaaacattaattttcccatgagaatacaccagaggttctataattgtactgctagacttaatttctcaccctttcccccttagtctttgaataaaacaatttctatacatttat

SEQ ID NO: 9090 - DNA, 459 bp, Homo sapiens
taagctttaaataaatactaagtatagaggcataatactgaatatctgaaatatctttctgaatttttttctttttaatatatgggttcaaggaaaatttcttagtaaataaaagttggaataaatacgtttgtcatttattatatacaggtagtagctgctgtatttttcataatcactgttagcagttgtggttaagcccctaaaatcatgtttttctctctgaaaggggtttttaggaatcagtcacccactttgtcagttctgcctggcctgatctccacgcctcatgttcctttttggggtgatcctgtgagaagcctggtgctggcaggtctgggaattcaggagggccttggagtgtgttccctacacacttcactgtgctcttccactctgatctatataagagagcaatttaatgtgaatctattttgaataaaataattaaagcaaatg

SEQ ID NO: 9091 - DNA, 306 bp, Homo sapiens
gtgtgtttgtttttcccattgtacctaaatgatctaaactcagtagcattctgtgttgactggcattttgttcctaaaagcacacactcttcttacctttgttgtaaatttttctctgttgcctaggctggagcgcagtggcataatcatagctcagtgtatcctcgaactcctgacttcaagtgatcctcctacctcagtcttccaagtagctgagactacaagcacacaccaccacacctggctaattttttaaatttttatagagatggcaacttagaccccacctcgacacaataaatacac

SEQ ID NO: 9092 - DNA, 955 bp, Homo sapiens
aagacactcctctccttctttgccccttgtctcaacatttcggagtctgaagtgtctgagacgactgtaagccaggaggggagcatttggtcggcttcccatcctggcattcctacataccagaaaagcactgtcgacggtccatttatttatttatttatgaagagcctaatgtgatgaaatgtgttgtgaaatgacatcctattagccaatatggccactccagttcatttcaccctcattttcccataccaaagtccaccttttagaagaccatgtcacatcgcctctgagagcttagctttgaagtgagctcttttgtgtcttttgatgaacgctccagggcacccaggctggtctctctgccatgccaacctcaccggatcctctcctggactgagtgagagtgacctgctgttgggtgtccaccttggagtagggtgttgtggccatgggacctcccaattcttctttctttggatgtgaacctaactctgccctctaatgatatccctgaactctgaggggaccttgggcatcactgaacctcctctagtcaagaaacaagaaaaaggaggtgctgcttcctccattcagcagatcatgcacaaattactcctagacagaggcttcccacttgaggcaaaggatctttggtccttctgggttcaggttgaacattaatgttcttctctagtgatgcctactttgcggaatacactagtgcaagtcattttggtgctaaatactgcagaaaccaacaccaacgggagagctgtcagccagcttctggggctgcacgagactcaactcagaagtagaagtgagtcagccatgccgggagagtacagggtgcattggaagttaagtagaaaagtggcagggtgaaaagaccagcaaaatttctgattttgctattagttatccacgtggccttggccaaatcagcttattt

SEQ ID NO: 9093 - DNA, 2647 bp, Homo sapiens
taccaatgggagactagcgggccggcgtactggcctggtccagcacctgcggggccctcgggcttggagggctgggccgggcggggaacgggcggggcgggccggaggcggcggcggctgactcgccttctctccggggctgcgaccccgaggcaaccggctgcagatgggagcccgcggagccgaggatgcgggcgggccggggcgcgacgccggcgagggagctgttccgggacgccgccttccccgccgcggactcctcgctcttctgcgacttgtctacgccgctggcccagttccgcgaggacatcacgtggaggcggccccaggagatttgtgccacaccccggctgtttccagatgacccacgggaagggcaggtgaagcaggggctgctgggggattgctggttcctgtgtgcctgcgccgcgctgcagaagagcaggcacctcctggaccaggtcattcctccgggacagccgagctgggccgaccaggagtaccggggctccttcacctgtcgcatttggcagtttggacgctgggtggaggtgaccacagatgaccgcctgccgtgccttgcagggagactctgtttctcccgctgccagagggaggatgtgttctggctccccttactggaaaaggtctacgccaaggtccatgggtcctacgagcacctgtgggccgggcaggtggcggatgccctggtggacctgaccggcggcctggcagaaagatggaacctgaagggcgtagcaggaagcggaggccagcaggacaggccaggccgctgggagcacaggacttgtcggcagctgctccacctgaaggaccagtgtctgatcagctgctgcgtgctcagccccagagcaggtgcccgggagctgggggagttccatgccttcattgtctcggacctgcgggagctccagggtcaggcgggccagtgcatcctgctgctgcggatccagaacccctggggccggcggtgctggcaggggctctggagagaggggggtgaagggtggagccaggtagatgcagcggtagcatctgagctcctgtcccagctccaggaaggggagttctgggtggaggaggaggagttcctcagggagtttgacgagctcaccgttggctacccggtcacggaggccggccacctgcagagcctctacacagagaggctgctctgccatacgcgggcgctgcctggggcctgggtcaagggccagtcagcaggaggctgccggaacaacagcggctttcccagcaaccccaaattctggctgcgggtctcagaaccgagtgaggtgtacattgccgtcctgcagagatccaggctgcacgcggcggactgggcaggccgggcccgggcactggtgggtgacagtcatacttcgtggagcccagcgagcatcccgggcaagcactaccaggctgtgggtctgcacctctggaaggtagagaagcggcgggtcaatctgcctagggtcctgtccatgccccccgtggctggcaccgcgtgccatgcatacgaccgggaggtccacctgcgttgtgagctctcaccgggctactacctggctgtccccagcaccttcctgaaggacgcgccaggggagttcctgctccgagtcttctctaccgggcgagtctcccttagcgccatcagggcagtggccaagaacaccacccccggggcagccctgcctgcgggggagtgggggaccgtgcagctacggggttcttggagagtcggccagacggcggggggcagcaggaactttgcctcataccccaccaacccctgcttccccttctcggtccccgagggccctggcccccgctgcgtccgcatcactctgcatcagcactgccggcccagtgacaccgagttccaccccatcggcttccatatcttccaggtcccagagggtggaaggagccaggacgcacccccactgctgctgcaggagccgctgctgagctgcgtgccacatcgctacgcccaggaggtgagccggctctgcctcctgcctgcaggcacctacaaggttgtgccctccacctacctgccggacacagagggggccttcacagtgaccatcgcaaccaggattgacaggccatccattcacagccaggagatgctgggccagttcctccaagaggtctccgtcatggcagtgatgaaaacctaacagggtggccccctgtgccagctcaggtgactggagcccgagggcctgacaggttcccagcagctgggccggccagccttgcactgtgggggctggtcctgagtcttggcctgcctcccagccctgccagggggctgcggcctaggggtccacgggaagcctccgtcaggagagacgcagccctgggggccagctggtgctgcaaggaagggtgggaagcttgctggcttctgttgcgccactgagacggcagagaccccaggatcccagagcttcccaggatccctcccagatcctctgctgactccatatggaggcctcacacccagagggtagggcagcagatcttctttataactatttattgttcgaatcacttttaggatgtaactttataaataaacatgagcgctgatgatttgcagatcagtcttgctcca

SEQ ID NO: 9094 - DNA, 2475 bp, Homo sapiens
taccaatgggagactagcgggccggcgtactggcctggtccagcacctgcggggccctcgggcttggagggctgggccgggcggggaacgggcggggcgggccggaggcggcggcggctgactcgccttctctccggggctgcgaccccgaggcaaccggctgcagatgggagcccgcggagccgaggatgcgggcgggccggggcgcgacgccggcgagggagctgttccgggacgccgccttccccgccgcggactcctcgctcttctgcgacttgtctacgccgctggcccagttccgcgaggacatcacgtggaggcggccccaggagatttgtgccacaccccggctgtttccagatgacccacgggaagggcaggtgaagcaggggctgctgggggattgctggttcctgtgtgcctgcgccgcgctgcagaagagcaggcacctcctggaccaggtcattcctccgggacagccgagctgggccgaccaggagtaccggggctccttcacctgtcgcatttggcagtttggacgctgggtggaggtgaccacagatgaccgcctgccgtgccttgcagggagactctgtttctcccgctgccagagggaggatgtgttctggctccccttactggaaaaggtctacgccaaggtccatgggtcctacgagcacctgtgggccgggcaggtggcggatgccctggtggacctgaccggcggcctggcagaaagatggaacctgaagggcgtagcaggaagcggaggccagcaggacaggccaggccgctgggagcacaggacttgtcggcagctgctccacctgaaggaccagtgtctgatcagctgctgcgtgctcagccccagagcaggtgcccgggagctgggggagttccatgccttcattgtctcggacctgcgggagctccagggtcaggcgggccagtgcatcctgctgctgcggatccagaacccctggggccggcggtgctggcaggggctctggagagaggggggtgaagggtggagccaggtagatgcagcggtagcatctgagctcctgtcccagctccaggaaggggagttctgggtggaggaggaggagttcctcagggagtttgacgagctcaccgttggctacccggtcacggaggccggccacctgcagagcctctacacagagaggctgctctgccatacgcgggcgctgcctggggcctgggtcaagggccagtcagcaggaggctgccggaacaacagcggctttcccagcaaccccaaattctggctgcgggtctcagaaccgagtgaggtgtacattgccgtcctgcagagatccaggctgcacgcggcggactgggcaggccgggcccgggcactggtgggtgacagtcatacttcgtggagcccagcgagcatcccgggcaagcactaccaggctgtgggtctgcacctctggaaggtagagaagcggcgggtcaatctgcctagggtcctgtccatgccccccgtggctggcaccgcgtgccatgcatacgaccgggaggtccacctgcgttgtgagctctcaccgggctactacctggctgtccccagcaccttcctgaaggacgcgccaggggagttcctgctccgagtcttctctaccgggcgagtctcccttagcctggcccccgctgcgtccgcatcactctgcatcagcactgccggcccagtgacaccgagttccaccccatcggcttccatatcttccaggtcccagagggtggaaggagccaggacgcacccccactgctgctgcaggagccgctgctgagctgcgtgccacatcgctacgcccaggaggtgagccggctctgcctcctgcctgcaggcacctacaaggttgtgccctccacctacctgccggacacagagggggccttcacagtgaccatcgcaaccaggattgacaggccatccattcacagccaggagatgctgggccagttcctccaagaggtctccgtcatggcagtgatgaaaacctaacagggtggccccctgtgccagctcaggtgactggagcccgagggcctgacaggttcccagcagctgggccggccagccttgcactgtgggggctggtcctgagtcttggcctgcctcccagccctgccagggggctgcggcctaggggtccacgggaagcctccgtcaggagagacgcagccctgggggccagctggtgctgcaaggaagggtgggaagcttgctggcttctgttgcgccactgagacggcagagaccccaggatcccagagcttcccaggatccctcccagatcctctgctgactccatatggaggcctcacacccagagggtagggcagcagatcttctttataactatttattgttcgaatcacttttaggatgtaactttataaataaacatgagcgctgatgatttgcagatcagtcttgctcca

SEQ ID NO: 9095 - DNA, 2385 bp, Homo sapiens
taccaatgggagactagcgggccggcgtactggcctggtccagcacctgcggggccctcgggcttggagggctgggccgggcggggaacgggcggggcgggccggaggcggcggcggctgactcgccttctctccggggctgcgaccccgaggcaaccggctgcagatgggagcccgcggagccgaggatgcgggcgggccggggcgcgacgccggcgagggagctgttccgggacgccgccttccccgccgcggactcctcgctcttctgcgacttgtctacgccgctggcccagttccgcgaggacatcacgtggaggcggccccaggagatttgtgccacaccccggctgtttccagatgacccacgggaagggcaggtgaagcaggggctgctgggggattgctggttcctgtgtgcctgcgccgcgctgcagaagagcaggcacctcctggaccaggtcattcctccgggacagccgagctgggccgaccaggagtaccggggctccttcacctgtcgcatttggcagtttggacgctgggtggaggtgaccacagatgaccgcctgccgtgccttgcagggagactctgtttctcccgctgccagagggaggatgtgttctggctccccttactggaaaaggtctacgccaaggtccatgggtcctacgagcacctgtgggccgggcaggtggcggatgccctggtggacctgaccggcggcctggcagaaagatggaacctgaagggcgtagcaggaagcggaggccagcaggacaggccaggccgctgggagcacaggacttgtcggcagctgctccacctgaaggaccagtgtctgatcagctgctgcgtgctcagccccagagcaggtgcccgggagctgggggagttccatgccttcattgtctcggacctgcgggagctccagggtcaggcgggccagtgcatcctgctgctgcggatccagaacccctggggccggcggtgctggcaggggctctggagagaggggggtgaagggtggagccaggtagatgcagcggtagcatctgagctcctgtcccagctccaggaaggggagttctgggtggaggaggaggagttcctcagggagtttgacgagctcaccgttggctacccggtcacggaggccggccacctgcagagcctctacacagagaggctgctctgccatacgcgggcgctgcctggggcctgggtcaagggccagtcagcaggaggctgccggaacaacagcggctttcccagcaaccccaaattctggctgcgggtctcagaaccgagtgaggtgtacattgccgtcctgcagagatccaggctgcacgcggcggactgggcaggccgggcccgggcactggtgggtgacagtcatacttcgtggagcccagcgagcatcccgggcaagcactaccaggctgtgggtctgcacctctggaaggtagagaagcggcgggtcaatctgcctagggtcctgtccatgccccccgtggctggcaccgcgtgccatgcatacgaccgggaggtccacctgcgttgtgagctctcaccgggctactacctggctgtccccagcaccttcctgaaggacgcgccaggggagttcctgctccgagtcttctctaccgggcgagtctcccttaggtcccagagggtggaaggagccaggacgcacccccactgctgctgcaggagccgctgctgagctgcgtgccacatcgctacgcccaggaggtgagccggctctgcctcctgcctgcaggcacctacaaggttgtgccctccacctacctgccggacacagagggggccttcacagtgaccatcgcaaccaggattgacaggccatccattcacagccaggagatgctgggccagttcctccaagaggtctccgtcatggcagtgatgaaaacctaacagggtggccccctgtgccagctcaggtgactggagcccgagggcctgacaggttcccagcagctgggccggccagccttgcactgtgggggctggtcctgagtcttggcctgcctcccagccctgccagggggctgcggcctaggggtccacgggaagcctccgtcaggagagacgcagccctgggggccagctggtgctgcaaggaagggtgggaagcttgctggcttctgttgcgccactgagacggcagagaccccaggatcccagagcttcccaggatccctcccagatcctctgctgactccatatggaggcctcacacccagagggtagggcagcagatcttctttataactatttattgttcgaatcacttttaggatgtaactttataaataaacatgagcgctgatgatttgcagatcagtcttgctcca

SEQ ID NO: 9096 - DNA, 1045 bp, Homo sapiens
taccaatgggagactagcgggccggcgtactggcctggtccagcacctgcggggccctcgggcttggagggctgggccgggcggggaacgggcggggcgggccggaggcggcggcggctgactcgccttctctccggggctgcgaccccgaggcaaccggctgcagatgggagcccgcggagccgaggatgcgggcgggccggggcgcgacgccggcgagggagctgttccgggacgccgccttccccgccgcggactcctcgctcttctgcgacttgtctacgccgctggcccagttccgcgaggacatcacgtggaggcggccccaggtcccagagggtggaaggagccaggacgcacccccactgctgctgcaggagccgctgctgagctgcgtgccacatcgctacgcccaggaggtgagccggctctgcctcctgcctgcaggcacctacaaggttgtgccctccacctacctgccggacacagagggggccttcacagtgaccatcgcaaccaggattgacaggccatccattcacagccaggagatgctgggccagttcctccaagaggtctccgtcatggcagtgatgaaaacctaacagggtggccccctgtgccagctcaggtgactggagcccgagggcctgacaggttcccagcagctgggccggccagccttgcactgtgggggctggtcctgagtcttggcctgcctcccagccctgccagggggctgcggcctaggggtccacgggaagcctccgtcaggagagacgcagccctgggggccagctggtgctgcaaggaagggtgggaagcttgctggcttctgttgcgccactgagacggcagagaccccaggatcccagagcttcccaggatccctcccagatcctctgctgactccatatggaggcctcacacccagagggtagggcagcagatcttctttataactatttattgttcgaatcacttttaggatgtaactttataaataaacatgagcgctgatgatttgcagatcagtcttgctcca

SEQ ID NO: 9097 - DNA, 797 bp, Homo sapiens
taccaatgggagactagcgggccggcgtactggcctggtccagcacctgcggggccctcgggcttggagggctgggccgggcggggaacgggcggggcgggccggaggcggcggcggctgactcgccttctctccggggctgcgaccccgaggcaaccggctgcagatgggagcccgcggagccgaggatgcgggcgggccggggcgcgacgccggcgagggagctgttccgggacgccgccttccccgccgcggactcctcgctcttctgcgacttgtctacgccgctggcccagttccgcgaggacatcacgtggaggcggccccaggagatttgtgccacaccccggctgtttccagatgacccacgggaagggcaggtgaagcaggggctgctgggggattgctggttcctgtgtgcctgcgccgcgctgcagaagagcaggcacctcctggaccaggtgcggggccccttccctgtgtttgtcctggagccggtttctttttgcgtttctccagcctgctgagtaccaggaggccttgcgaaagcagagctgtgccgcagccggatctcctgctgtgttgggggaaggcaggagagttccaaggcagaggctgaggactgcactctgtccctctgctgcaggggggggtgccttggcctcgccagaaggctccatcagggaggttcgccctgctctgtgctctcctgacccccggactccatggagtcagatcaccacgtttagaataaagagacaaatgtgccagctcacaggaggacggggctggctggc

SEQ ID NO: 9098 - DNA, 531 bp, Homo sapiens
  misc_feature (1)..(1): n is a, c, g, or t
  misc_feature (11)..(11): n is a, c, g, or t
  misc_feature (24)..(25): n is a, c, g, or t
naatcgagctntgtctttttttgnncccccccccgaactgggagataaaactctgtggttttaatcttctcattttagaggctatatggatatacatccaaatgactggattttaaaatcacttggaagagtttgtgctcagtgtcctgtggtgtgaacacgcttcattcaacctgggcccttgggagagatgctgagtggttcccgggctgtccccactccacaccatggcagtgaagagctgctgaagtacatgcttcatagtccttgcgtctctctgtgagtacattcctagaagtggggttattgggtcaaagagtaaatgcatctctaatttggctaaagatattgccaaatccacctgcctgggggtttgtaccaccttagagatcagtgatcaatgggtgatatccgaggacgtctttctattgtggtcagactcttggattttgacctgactaatggaggagaaatggtgttgcagtgaacttttgatttgtgtttctctttttatgatcgttttgagcttaa

SEQ ID NO: 9099 - DNA, 2328 bp, Homo sapiens
atccaggtgtgcgttagagttctctgcagaccgcggtgcctgtggagcactcagctgtggccacaccgcggccgggacactggagtagcgccgggtggtgcttatatcacgctcgccttttgcttctccctgtgcatggcaggtcattcctccgggacagccgagctgggccgaccaggagtaccggggctccttcacctgtcgcatttggcagtttggacgctgggtggaggtgaccacagatgaccgcctgccgtgccttgcagggagactctgtttctcccgctgccagagggaggatgtgttctggctccccttactggaaaaggtctacgccaaggtccatgggtcctacgagcacctgtgggccgggcaggtggcggatgccctggtggacctgaccggcggcctggcagaaagatggaacctgaagggcgtagcaggaagcggaggccagcaggacaggccaggccgctgggagcacaggacttgtcggcagctgctccacctgaaggaccagtgtctgatcagctgctgcgtgctcagccccagagcaggtgcccgggagctgggggagttccatgccttcattgtctcggacctgcgggagctccagggtcaggcgggccagtgcatcctgctgctgcggatccagaacccctggggccggcggtgctggcaggggctctggagagaggggggtgaagggtggagccaggtagatgcagcggtagcatctgagctcctgtcccagctccaggaaggggagttctgggtggaggaggaggagttcctcagggagtttgacgagctcaccgttggctacccggtcacggaggccggccacctgcagagcctctacacagagaggctgctctgccatacgcgggcgctgcctggggcctgggtcaagggccagtcagcaggaggctgccggaacaacagcggctttcccagcaaccccaaattctggctgcgggtctcagaaccgagtgaggtgtacattgccgtcctgcagagatccaggctgcacgcggcggactgggcaggccgggcccgggcactggtgggtgacagtcatacttcgtggagcccagcgagcatcccgggcaagcactaccaggctgtgggtctgcacctctggaaggtagagaagcggcgggtcaatctgcctagggtcctgtccatgccccccgtggctggcaccgcgtgccatgcatacgaccgggaggtccacctgcgttgtgagctctcaccgggctactacctggctgtccccagcaccttcctgaaggacgcgccaggggagttcctgctccgagtcttctctaccgggcgagtctcccttagcgccatcagggcagtggccaagaacaccacccccggggcagccctgcctgcgggggagtgggggaccgtgcagctacggggttcttggagagtcggccagacggcggggggcagcaggaactttgcctcataccccaccaacccctgcttccccttctcggtccccgagggccctggcccccgctgcgtccgcatcactctgcatcagcactgccggcccagtgacaccgagttccaccccatcggcttccatatcttccaggtcccagagggtggaaggagccaggacgcacccccactgctgctgcaggagccgctgctgagctgcgtgccacatcgctacgcccaggaggtgagccggctctgcctcctgcctgcaggcacctacaaggttgtgccctccacctacctgccggacacagagggggccttcacagtgaccatcgcaaccaggattgacaggccatccattcacagccaggagatgctgggccagttcctccaagaggtctccgtcatggcagtgatgaaaacctaacagggtggccccctgtgccagctcaggtgactggagcccgagggcctgacaggttcccagcagctgggccggccagccttgcactgtgggggctggtcctgagtcttggcctgcctcccagccctgccagggggctgcggcctaggggtccacgggaagcctccgtcaggagagacgcagccctgggggccagctggtgctgcaaggaagggtgggaagcttgctggcttctgttgcgccactgagacggcagagaccccaggatcccagagcttcccaggatccctcccagatcctctgctgactccatatggaggcctcacacccagagggtagggcagcagatcttctttataactatttattgttcgaatcacttttaggatgtaactttataaataaacatgagcgctgatgatttgcagatcagtcttgctcca

SEQ ID NO: 9100 - DNA, 1885 bp, Homo sapiens
cggggttgacgtctgctggtgctcccagacccggctctgacctgagactgcaggtctttctgccttgccgtgtgcctcattggccaaaggaaagcaacagagtctgcagccagggcaggacccgcaggaggggcctggacccggggggctcctggcagcgccgtgcctttctgaggcaaggaggtagagccagcggctgaggacctgtcagggccagtcccagctctgcagcttgctgtgtgacctggcacacatcctctccctgcctccctcagtctcttcccctgcaagacggggtcctgacacggatctcatgggattgctctgaggcccaggcagtcccaggctcaaccactggttcacaaagtgtgttgtttccaggaagaacagatgggggcgcctgagggcaaagggcctgagtgtgggtcgaggatatgccggctgctcgctcaggggctgggttttcatcttgtgtgtcttgacagggtgtgacacttggcaccacactgttccctgtcccttcatggatgtggcccacatgatgttcctttcctcttgcaaaagaagttgctggaaggcccactgtccagcagcccccaggttgcctgggccacggtgcctttgtgggcccagctacaaggaggacttgcaggctcgtgtctgggacagatactggcgccagggccaagtgaagcccgggattggtagagaagcggcgggtcaatctgcctagggtcctgtccatgccccccgtggctggcaccgcgtgccatgcatacgaccgggaggtccacctgcgttgtgagctctcaccgggctactacctggctgtccccagcaccttcctgaaggacgcgccaggggagttcctgctccgagtcttctctaccgggcgagtctcccttagcgccatcagggcagtggccaagaacaccacccccggggcagccctgcctgcgggggagtgggggaccgtgcagctacggggttcttggagagtcggccagacggcggggggcagcaggaactttgcctcataccccaccaacccctgcttccccttctcggtccccgagggccctggcccccgctgcgtccgcatcactctgcatcagcactgccggcccagtgacaccgagttccaccccatcggcttccatatcttccaggtcccagagggtggaaggagccaggacgcacccccactgctgctgcaggagccgctgctgagctgcgtgccacatcgctacgcccaggaggtgagccggctctgcctcctgcctgcaggcacctacaaggttgtgccctccacctacctgccggacacagagggggccttcacagtgaccatcgcaaccaggattgacaggccatccattcacagccaggagatgctgggccagttcctccaagaggtctccgtcatggcagtgatgaaaacctaacagggtggccccctgtgccagctcaggtgactggagcccgagggcctgacaggttcccagcagctgggccggccagccttgcactgtgggggctggtcctgagtcttggcctgcctcccagccctgccagggggctgcggcctaggggtccacgggaagcctccgtcaggagagacgcagccctgggggccagctggtgctgcaaggaagggtgggaagcttgctggcttctgttgcgccactgagacggcagagaccccaggatcccagagcttcccaggatccctcccagatcctctgctgactccatatggaggcctcacacccagagggtagggcagcagatcttctttataactatttattgttcgaatcacttttaggatgtaactttataaataaacatgagcgctgatgatttgcagatcagtcttgctcca

SEQ ID NO: 9101 - DNA, 669 bp, Homo sapiens
ccgcccatccattcgggcaataacagcttctggtgctggacatgggctcattgctccttctccaagccctctgaggacatcaaaagcgtggacgcatcactttccaccatcttgctgcccactgtccctccatcctgaggcctcctaagcacatgtgtggggtggcaggcacactgctgatagctgtggatgcggccgtgacatccttcacccctgcccccatggcatgcatgatccattagggaggaccgtctgcacaaaggtaatccattgactcagacagggggttcatagaagaacaggtgagagtggcagggggggtattccttgaccagctgagggtcagccaagggcaggaaaggggctgggcaccctcagggaattgaaagaagctctctgtgcctgcagtgcggggagtgggcttggagaatatggcaagagctgaggctggagatgtaagcaggggccttaagtgttgtttaaggagcctgagtcttatctcctgggcaattgggagccactacatagtttaaagcagggcctaacatacatatgtttgaaatctttctctggctgaagtctcgaggatgaattggaagtagaggaccaactaaaaagttgttgcacgacattaaggtggtgtcctgggttaggtgggaggtgatggag

SEQ ID NO: 9102 - DNA, 1200 bp, Homo sapiens
ccgcccatccattcgggcaataacagcttctggtgctggacatgggctcattgctccttctccaagccctctgaggacatcaaaagcgtggacgcatcactttccaccatcttgctgcccactgtccctccatcctgaggcctcctaagcacatgtgtggggtggcaggcacactgctgatagctgtggatgcggccgtgacatccttcacccctgcccccatggcatgcatgatccattagggaggaccgtctgcacaaaggtctcttgccctgtgcagcttcctgcagactggacttgcaaagtccagcctgtatggctggagttcccatgcctgccaatctcctgtcgactgcgagtcagctccgatacttcaccagattcagccacctgggggagctggaagtgaatctcatcttagctgagccttctgatgagactgcagccccagctgacacctggattgcagactcatgaaagacctgaaactctaccaacagccacctgggggagctggaagtgaatctcctcgtagctgagccttctgatgagactgcagccccggctgacacctggattgcagactcatgaaagacctgaaactctaccaacagccacctgggggagctggaagtgaatctcctcgtagctgagccttctgatgagactgcagccccggctgacacctggattgcagactcatgaaagaccctgagcagaggacccagtttggcagagcccgaattcctgacccacaggaactgggagataaaactctgtggttttaatcttctcattttagagtgctcagtgtcctgtggtgtgaacacgcttcattcaacctgggcccttgggagagatgctgagtggttcccgggctgtccccactccacaccatggcagtgaagagctgctgaagtacatgcttcatagtccttgcgtctctctgtgagtacattcctagaagtggggttattgggtcaaagagtaaatgcatctctaatttggctaaagatattgccaaatccacctgcctgggggtttgtaccaccttagagatcagtgatcaatgggtgatatccgaggacgtctttctattgtggtcagactcttggattttgacctgactaatggaggagaaatggtgttgcagtgaacttttgatttgtgtttctctttttatgatcgttttgagcttaa

SEQ ID NO: 9103 - DNA, 458 bp, Homo sapiens
ctccacaggatgcatacgaggtccccgcggtcccggccgacatacctgttggggttcttagttgggcagcttcctcctccgttctctctattcccctcctaggtctcttgccctgtgcagcttcctgcagactggacttgcaaagtccagcctgtatggctggagttcccatgcctgccaatctcctgtcgactgcgagtcagctccgatacttcaccagattcaggtgagagttttggttttttgacaagcccacttcatcagcagggcatgcatttctgccagggggctcatgatatctggtggtctctttgtgaggccagcagccaccaatgatcacgaatgtggcaggaagctgccaagagaccccccagtgggtgattcctgcctcctgctgtcatgcaattccctcctgaagggtggctggacttactcacttataacaaacaatacagtaa

SEQ ID NO: 9104 - DNA, 406 bp, Homo sapiens
gctatatggatatacatccaaatgactggattttaaaatcacttggaagagtttggtaggttcatattgtcaacccataatgcaagtcagttagtttcattttgctttcaattttaagaattccttttacaagttaatttaattaaattaagtaattacacaaacatttgacatgagtctaaatccaaatctagaaaccaagatatggtcacagaagtccgtccctatccccatcccatttccacctgtttcctacaggtaacagtttaatttaaagcaaattttgtggcttatctttccatttgtaaaacatacagctgatggctccatctaaaaacacatcaattgtctatatgtacataaacatgctttttttcatttacaaatacattctggagatgaccat

SEQ ID NO: 9105 - DNA, 837 bp, Homo sapiens
attggccaaaggaaagcaacagagtctgcagccagggcaggacccgcaggaggggcctggacccggggggctcctggcagcgccgtgcctttctgaggcaaggaggtagagccagcggctgaggacctgtcagggccagtcccagctctgcagcttgctgtgtgacctggcacacatcctctccctgcctccctcagtctcttcccctgcaagacggggtcctgacacggatctcatgggattgctctgaggcccaggcagtcccaggctcaaccactggttcacaaagtgtgttgtttccaggaagaacagatgggggcgcctgagggcaaagggcctgagtgtgggtcgaggatatgccggctgctcgctcaggggctgggttttcatcttgtgtgtcttgacagggtgtgacacttggcaccacactgttccctgtcccttcatggatgtggcccacatgatgttcctttcctcttgcaaaagaagttgctggaaggcccactgtccagcagcccccaggttgcctgggccacggtgcctttgtgggcccagctacaaggaggacttgcaggctcgtgtctgggacagatactggcgccagggccaagtgaagcccgggattggtgggcatctctagctggtccctgagagagggtggagggtgctgacaggccttggcgctttcatctgtcaactccagaggcccttgtgcttgcagcagggaggtcaaggccagggcgtctgaccccggccgctcctccacactgagcctcctgcacgtgctcacaggtagagaagcggcgggtcaatctgcctagggtcctgtccatgccc

SEQ ID NO: 9106 - DNA, 2694 bp, Homo sapiens
taccaatgggagactagcgggccggcgtactggcctggtccagcacctgcggggccctcgggcttggagggctgggccgggcggggaacgggcggggcgggccggaggcggcggcggctgactcgccttctctccggggctgcgaccccgaggcaaccggctgcagatgggagcccgcggagccgaggatgcgggcgggccggggcgcgacgccggcgagggagctgttccgggacgccgccttccccgccgcggactcctcgctcttctgcgacttgtctacgccgctggcccagttccgcgaggacatcacgtggaggcggccccaggagatttgtgccacaccccggctgtttccagatgacccacgggaagggcaggtgaagcaggggctgctgggggattgctggttcctgtgtgcctgcgccgcgctgcagaagagcaggcacctcctggaccaggtcattcctccgggacagccgagctgggccgaccaggagtaccggggctccttcacctgtcgcatttggcagtttggacgctgggtggaggtgaccacagatgaccgcctgccgtgccttgcagggagactctgtttctcccgctgccagagggaggatgtgttctggctccccttactggaaaaggtctacgccaaggtccatgggtcctacgagcacctgtgggccgggcaggtggcggatgccctggtggacctgaccggcggcctggcagaaagatggaacctgaagggcgtagcaggaagcggaggccagcaggacaggccaggccgctgggagcacaggacttgtcggcagctgctccacctgaaggaccagtgtctgatcagctgctgcgtgctcagccccagagcaggtgcccgggagctgggggagttccatgccttcattgtctcggacctgcgggagctccagggtcaggcgggccagtgcatcctgctgctgcggatccagaacccctggggccggcggtgctggcaggggctctggagagaggggggtgaagggtggagccaggtagatgcagcggtagcatctgagctcctgtcccagctccaggaaggggagttctgggtggaggaggaggagttcctcagggagtttgacgagctcaccgttggctacccggtcacggaggccggccacctgcagagcctctacacagagaggctgctctgccatacgcgggcgctgcctggggcctgggtcaagggccagtcagcaggaggctgccggaacaacagcggctttcccagcaaccccaaattctggctgcgggtctcagaaccgagtgaggtgtacattgccgtcctgcagagatccaggctgcacgcggcggactgggcaggccgggcccgggcactggtgggtgacagtcatacttcgtggagcccagcgagcatcccgggcaagcactaccaggctgtgggtctgcacctctggaagggtgtgacacttggcaccacactgttccctgtcccttcatggatgtggcccacatgatgttcctttcctcttgcaaaagaagttgctggaaggcccactgtccagcagcccccaggttgcctgggccacggtgcctttgtgggcccagctacaaggaggacttgcaggctcgtgtctgggacagatactggcgccagggccaagtgaagcccgggattggtagagaagcggcgggtcaatctgcctagggtcctgtccatgccccccgtggctggcaccgcgtgccatgcatacgaccgggaggtccacctgcgttgtgagctctcaccgggctactacctggctgtccccagcaccttcctgaaggacgcgccaggggagttcctgctccgagtcttctctaccgggcgagtctcccttagcctggcccccgctgcgtccgcatcactctgcatcagcactgccggcccagtgacaccgagttccaccccatcggcttccatatcttccaggtcccagagggtggaaggagccaggacgcacccccactgctgctgcaggagccgctgctgagctgcgtgccacatcgctacgcccaggaggtgagccggctctgcctcctgcctgcaggcacctacaaggttgtgccctccacctacctgccggacacagagggggccttcacagtgaccatcgcaaccaggattgacaggccatccattcacagccaggagatgctgggccagttcctccaagaggtctccgtcatggcagtgatgaaaacctaacagggtggccccctgtgccagctcaggtgactggagcccgagggcctgacaggttcccagcagctgggccggccagccttgcactgtgggggctggtcctgagtcttggcctgcctcccagccctgccagggggctgcggcctaggggtccacgggaagcctccgtcaggagagacgcagccctgggggccagctggtgctgcaaggaagggtgggaagcttgctggcttctgttgcgccactgagacggcagagaccccaggatcccagagcttcccaggatccctcccagatcctctgctgactccatatggaggcctcacacccagagggtagggcagcagatcttctttataactatttattgttcgaatcacttttaggatgtaactttataaataaacatgagcgctgatgatttgcagatcagtcttgctcca

SEQ ID NO: 9107 - DNA, 2182 bp, Homo sapiens
taccaatgggagactagcgggccggcgtactggcctggtccagcacctgcggggccctcgggcttggagggctgggccgggcggggaacgggcggggcgggccggaggcggcggcggctgactcgccttctctccggggctgcgaccccgaggcaaccggctgcagatgggagcccgcggagccgaggatgcgggcgggccggggcgcgacgccggcgagggagctgttccgggacgccgccttccccgccgcggactcctcgctcttctgcgacttgtctacgccgctggcccagttccgcgaggacatcacgtggaggcggccccaggagatttgtgccacaccccggctgtttccagatgacccacgggaagggcaggtgaagcaggggctgctgggggattgctggttcctgtgtgcctgcgccgcgctgcagaagagcaggcacctcctggaccaggtcattcctccgggacagccgagctgggccgaccaggagtaccggggctccttcacctgtcgcatttggcagtttggacgctgggtggaggtgaccacagatgaccgcctgccgtgccttgcagggagactctgtttctcccgctgccagagggaggatgtgttctggctccccttactggaaaaggtctacgccaaggtccatgggtcctacgagcacctgtgggccgggcaggtggcggatgccctggtggacctgaccggcggcctggcagaaagatggaacctgaagggcgtagcaggaagcggaggccagcaggacaggccaggccgctgggagcacaggacttgtcggcagctgctccacctgaaggaccagtgtctgatcagctgctgcgtgctcagccccagagcaggtgcccgggagctgggggagttccatgccttcattgtctcggacctgcgggagctccagggtcaggcgggccagtgcatcctgctgctgcggatccagaacccctggggccggcggtgctggcaggggctctggagagaggggggtgaagggtggagccaggtagatgcagcggtagcatctgagctcctgtcccagctccaggaaggggagttctgggtggaggaggaggagttcctcagggagtttgacgagctcaccgttggctacccggtcacggaggccggccacctgcagagcctctacacagagaggctgctctgccatacgcgggcgctgcctggggcctgggtcaagggccagtcagcaggaggctgccggaacaacagcggctttcccagcaaccccaaattctggctgcgggtctcagaaccgagtgaggtgtacattgccgtcctgcagagatccaggctgcacgcggcggactgggcaggccgggcccgggcactggtgggtgacagtcatacttcgtggagcccagcgagcatcccgggcaagcactaccaggctgtgggtctgcacctctggaaggtcccagagggtggaaggagccaggacgcacccccactgctgctgcaggagccgctgctgagctgcgtgccacatcgctacgcccaggaggtgagccggctctgcctcctgcctgcaggcacctacaaggttgtgccctccacctacctgccggacacagagggggccttcacagtgaccatcgcaaccaggattgacaggccatccattcacagccaggagatgctgggccagttcctccaagaggtctccgtcatggcagtgatgaaaacctaacagggtggccccctgtgccagctcaggtgactggagcccgagggcctgacaggttcccagcagctgggccggccagccttgcactgtgggggctggtcctgagtcttggcctgcctcccagccctgccagggggctgcggcctaggggtccacgggaagcctccgtcaggagagacgcagccctgggggccagctggtgctgcaaggaagggtgggaagcttgctggcttctgttgcgccactgagacggcagagaccccaggatcccagagcttcccaggatccctcccagatcctctgctgactccatatggaggcctcacacccagagggtagggcagcagatcttctttataactatttattgttcgaatcacttttaggatgtaactttataaataaacatgagcgctgatgatttgcagatcagtcttgctcca

SEQ ID NO: 9108 - DNA, 1315 bp, Homo sapiens
taccaatgggagactagcgggccggcgtactggcctggtccagcacctgcggggccctcgggcttggagggctgggccgggcggggaacgggcggggcgggccggaggcggcggcggctgactcgccttctctccggggctgcgaccccgaggcaaccggctgcagatgggagcccgcggagccgaggatgcgggcgggccggggcgcgacgccggcgagggagctgttccgggacgccgccttccccgccgcggactcctcgctcttctgcgacttgtctacgccgctggcccagttccgcgaggacatcacgtggaggcggccccaggagatttgtgccacaccccggctgtttccagatgacccacgggaagggcaggtgaagcaggggctgctgggggattgctggttcctgtgtgcctgcgccgcgctgcagaagagcaggcacctcctggaccaggtctcttgccctgtgcagcttcctgcagactggacttgcaaagtccagcctgtatggctggagttcccatgcctgccaatctcctgtcgactgcgagtcagctccgatacttcaccagattcagccacctgggggagctggaagtgaatctcatcttagctgagccttctgatgagactgcagccccagctgacacctggattgcagactcatgaaagacctgaaactctaccaacagccacctgggggagctggaagtgaatctcctcgtagctgagccttctgatgagactgcagccccggctgacacctggattgcagactcatgaaagacctgaaactctaccaacagccacctgggggagctggaagtgaatctcctcgtagctgagccttctgatgagactgcagccccggctgacacctggattgcagactcatgaaagaccctgagcagaggacccagtttggcagagcccgaattcctgacccacaggaactgggagataaaactctgtggttttaatcttctcattttagaggtaatttttttgtgtagcaataggtagctgacaatgcacagctaaaataatagataattaaccctaatgctagtttcattcatccatcagggtttgcaaagtagtgatattctacttctgtcttccttcattatttattagcagaaatgtatctataaaaagaagtgttccttcattaactctttggtcatgttgaggtacagtttgcataggaaaggcagggcaaatgcttgattctttcccttcctttcctcatttataaaataatgaactgttttcctggcatctttcaacaatgactaatgagttttt

SEQ ID NO: 9109 - DNA, 2170 bp, Homo sapiens
taccaatgggagactagcgggccggcgtactggcctggtccagcacctgcggggccctcgggcttggagggctgggccgggcggggaacgggcggggcgggccggaggcggcggcggctgactcgccttctctccggggctgcgaccccgaggcaaccggctgcagatgggagcccgcggagccgaggatgcgggcgggccggggcgcgacgccggcgagggagctgttccgggacgccgccttccccgccgcggactcctcgctcttctgcgacttgtctacgccgctggcccagttccgcgaggacatcacgtggaggcggccccaggagatttgtgccacaccccggctgtttccagatgacccacgggaagggcaggtgaagcaggggctgctgggggattgctggttcctgtgtgcctgcgccgcgctgcagaagagcaggcacctcctggaccaggtcattcctccgggacagccgagctgggccgaccaggagtaccggggctccttcacctgtcgcatttggcagtttggacgctgggtggaggtgaccacagatgaccgcctgccgtgccttgcagggagactctgtttctcccgctgccagagggaggatgtgttctggctccccttactggaaaaggtctacgccaaggtccatgggtcctacgagcacctgtgggccgggcaggtggcggatgccctggtggacctgaccggcggcctggcagaaagatggaacctgaagggcgtagcaggaagcggaggccagcaggacaggccaggccgctgggagcacaggacttgtcggcagctgctccacctgaaggaccagtgtctgatcagctgctgcgtgctcagccccagagcaggtgcccgggagctgggggagttccatgccttcattgtctcggacctgcgggagctccagggtcaggcgggccagtgcatcctgctgctgcggatccagaacccctggggccggcggtgctggcaggggctctggagagaggggggtgaagggtggagccaggtagatgcagcggtagcatctgagctcctgtcccagctccaggaaggggagttctgggtggaggaggaggagttcctcagggagtttgacgagctcaccgttggctacccggtcacggaggccggccacctgcagagcctctacacagagaggctgctctgccatacgcgggcgctgcctggggcctgggtcaagggccagtcagcaggaggctgccggaacaacagcggctttcccagcaaccccaaattctggctgcgggtctcagaaccgagtgaggtgtacattgccgtcctgcagagatccaggctgcacgcggcggactgggcaggccgggcccgggcactggtgggtgacagtcatacttcgtggagcccagcgagcatcccgggcaagcactaccaggctgtgggtctgcacctctggaaggtagagaagcggcgggtcaatctgcctagggtcctgtccatgccccccgtggctggcaccgcgtgccatgcatacgaccgggaggtccacctgcgttgtgagctctcaccgggctactacctggctgtccccagcaccttcctgaaggacgcgccaggggagttcctgctccgagtcttctctaccgggcgagtctcccttagcgccatcagggcagtggccaagaacaccacccccggggcagccctgcctgcgggggagtgggggaccgtgcagcctggcccccgctgcgtccgcatcactctgcatcagcactgccggcccagtgacaccgagttccaccccatcggcttccatatcttccaggtcccagagggtggaaggagccaggacgcacccccactgctgctgcaggagccgctgctgagctgcgtgccacatcgctacgcccaggaggtgagccggctctgcctcctgcctgcaggcacctacaaggttgtgccctccacctacctgccggacacagagggggccttcacagtgaccatcgcaaccaggattgacaggactccatatggaggcctcacacccagagggtagggcagcagatcttctttataactatttattgttcgaatcacttttaggatgtaactttataaataaacatgagcgctgatgatttgcagatcagtcttgctcca

SEQ ID NO: 9110 - DNA, 820 bp, Homo sapiens
gtagtgccccgaggggctgtgctgggcacgtgctctgcctgccgaagtgaggaggctgggcacggtgcctgggttccccctgcccaggcccagtttggttctcttcagcgtggagagatgattctgtcccaggagccgggaggagggtgatgattctgtcccaggagctgggaggagggtgggcttgtgggaggggctggctctgtctgtggccgtagctgctgcttagaccctgccagggttcatgaggccaccgtggcgggaggccagcgaggagccgtgtcccacagctgatgcctggtgttttctcactagagaggctgctctgccatacgcgggcgctgcctggggcctgggtcaagggccagtcagcaggaggctgccggaacaacagcggctttcccagcaaccccaaattctggctgcgggtctcagaaccgagtgaggtgtacattgccgtcctgcagagatccaggctgcacgcggcggactgggcaggccgggcccgggcactggtgggtgacagtcatacttcgtggagcccagcgagcatcccgggcaagcactaccaggctgtgggtctgcacctctggaaggtaactcagccccgtctggctcacgctcggttcagcaggtggtgtggaggcccatggaggtctgggttctaggactggctctgccgggacacatgtgactctgccacgggccccaccagtctcccccctccttgggctgttgcacggggttgacgtctgctggtgctcccagacccggctctgacctgagactgcaggtctttctgccttgccgtgtgcctcat

SEQ ID NO: 9111 - DNA, 501 bp, Homo sapiens
tttccagaacaatattctttctacttagaatgtcttaacaaattttgtatattaatagttcccttcctttaatggaaaccctcatgacctgtattctgtttctctttttacgcctgacttctagaggcaagctatagcatctggtagctcccagtgattgcttcctttttggtaggctgtttgttccctgtgaccagtgaacctccctggttaaaatagacatagaaagctgacctagccaggcatggtcgtcacgcctgtaatcccagcactttgggcggatcacaaggtcaaaagatcgagaccatcctggtaaacatggtgaaaccccgtctctactaaaaatacaaaaattagctgcttgtattggcacgtgcctgtaatcccagctactcgggaggctgaggcaggagaatcgcttgaacctgggaggtggagatggcagtgagccgagattgcaccactgcgcttcagcctggcgacagagcgagactccatctc

SEQ ID NO: 9112 - DNA, 542 bp, Homo sapiens
acacacacacatttctccccaaactgtctcagcccccaggcacctactgcaaggactcggggatcgtgcagaggtgcaaaggagtcgtgccctcctcagtcagcacattagccttggctccgaaggtcagcagcagccgcacacagtcaaactgggctcgggcacaggcctcatgcaaggcagcgcgacccccgacacgggcatccagctcagctccctgccggatcaggtgtcgagcacagtctgtgtagcctcgggctgtagcgatggcgaggggtgccgtctgcttggtcttgggggtcagcacccagaaccctagggagagcaaatagttttgggaggtggtgtataagacagggcagggcagggagtggggatgctggttccagctgacagctgacactggccttccctctgcatggtttgctgagcacaaacactgccaggctgtacctgtggaagggggcttattcaagtcctgaagtggaagaataaattggaacagccttttaatacagcttatcaatctgtaacaaaacata

SEQ ID NO: 9113 - DNA, 808 bp, Homo sapiens
atttttagtagtttgagaaatatttaactggaatcaagaaagggatgagaaaattttttgttgttgcaaaatacctaattggaaggatgttttaaaatatgggtacttcacatttttattaatagaaactaaaattgaaaatttcaaggcatcttcattggggaaaagtgaacccaattacaatgaagaggacacattttaattaaaaattaaaaggtacataagacgcatttatctttatgtactcaacacgcttattggagctcctttgaaatacgtagtctataaaatacatcagatcatgtattcatatataataacattgggggtagcattcccaaggttttttttcctaaaattggctttctacattatgtaaaataaggattgtgctttgcaaagctgaagaagtgtatttatctggtgaatttctcagattctttattaggtcagtaaacaccatgaatacccagcagaatgcaatgtttcctcaacttatttgaccatgaaccccttttggtttttcaaaatatctcatacgactagtgccctaaagtagaatttatattcatagttactgggagattttctccctttaaagtgtgaatctaacattatgagtcactttttctgaatatcatgtattacatgtttttgttaaattctacctccatagagtgggcatgttggctcatgcctgtaatctcagcactttgggaatccaaggcaggaggattgcttaaggccaggaacttgagacagactcagcaacatagggaaacccctgtctcaataaaaaataaaaaaa

SEQ ID NO: 9114 - DNA, 423 bp, Homo sapiens
cagtctgatatataggaagcacttaactctttatcctagaaaagatttaaggtgaccttaacatatatgtcagaaaatctttaaaattgtggaaataaaaggttgtataattctgctatcctaaaattactagtatttcaatatattttattttagtcttttcttttagatacaagttttaaaacttttaagtgaagtgtaatatacgtaagtactgcttgatgaatttaaggtgatttctaaagccaggtttgttggggaagaggagtgggatttagtgatttagaaccagaaattggggctgggtgcgatgtctcatgcctataattccagaacttcgggaggccatagtgggagaattgtttgtgccccggagttcaagaccagcctgggcaactcagtgagacgccatctctacaaaag

SEQ ID NO: 9115 - DNA, 436 bp, Homo sapiens
gcagggtcaagaaataataaatctaagtctagcgttggtgggataatgtcggtgtcactaaaagaaatggggaatttggaaggtaaagtaactggaggtaggaatgaacccaagatttactaagcaccttctgtataccaaactcaacactaggagtttatacaatctttaaaacagctctaagagtagatattataattcccttctgccaataataaataataagtgactaaggtgtttttgaagctcaagattgcttgattctgcagtcttgttttaaattttggacatggagagtttggagttctgagatgagggaaggcatctgtcatagtgagagagctgaaaacatggagctcaggacaaaagtcagtgctagagagatcagttggaagagttatctttattgtagtgagacattgaatttttcagtgga

SEQ ID NO: 9116 - DNA, 289 bp, Homo sapiens
acggttaaaaatcaatgcctgctaatgtccctgcaggaaggcagaaacatgaacttcatgaagtctccttctgtttacacgctcattaagaggataaaatgttacttgggttgggtcaggctttttgctgcctctgaggtggtcctgtatgaaaatgtgtgccttcatttgggtatggcctgtgtcacacattatatgcctatggtagttatgaaatgcaaactccacctcttgtctgtgcagtcactgagtgtcctaatatcaaagtaaaactgtgagttgaggccgg

SEQ ID NO: 9117 - DNA, 453 bp, Homo sapiens
caacagtaaccccctgccctgtcctgccagggtaagggtcacgtggcccactctgatgcccaggcctggcccttagtgggaggaggggggcacgcacctgttaagctctcaaagcttctgcttttctgtgaaaatcccaaatcagtgtccagaaagttcctggtgaggcagagaggtgagcattcttcctaggctgcaaagatcaatgggttctatgagcaagggcaacgtacagaaaacacatatggggcaggaatctgtcaggcaggtggcaaagcattgcagactacaaatgcattatgctgtatttaaactttctccctatgactagattcttcagtttctcattttcagctgttacaaacagtattgcagtgaacaatccctttccaatatcttcatgatgttacacaagtgtttttgtaaaataaaagactagatgtaaaattgatg

SEQ ID NO: 9118 - DNA, 722 bp, Homo sapiens
catgacattgagaaatttgcattaactttctgcctattactttcctcatctctaaaaactaacagtacctactatattagtccattctcacactgctatgaagaaatatctgagactgggtaatttataaagaaaagaggtttcattgactcatagttccacaaggctggggaggcctcaggaaacttacaatcatggtggaaggggaagcaaacacatccttcttcacatggtggcaggagagagatgagtgccagcaggggaaatggcagatgcttataaaaccatcagatcgtgtgagactcactctttatcaccgggaacagcatggaagtaactttccccatggattcacttacttttcaccgggtccctcccacaacacatgggtattacaagaactataattccaagatgagatttgggtggggacacagccaaaccatatcacctaccttagagattattatgagtaatttataagatgattcataaagagtatcacagtttctgggaaattatcaacagaaaatagatgagaattattctcataatgactaccaattcagtttccaaaaaaactttgttgctgtatgttttacacatgtaaaacttacctatctcaaatgattccatgattttaataacaacattgagtgagtgcaacaatcatcacaatttattcagttttaacatttttatctgaaagtttttactcactt

SEQ ID NO: 9119 - DNA, 562 bp, Homo sapiens
tttttaaggataaatcacatggatctgcctcttctccataccaagtcatacccagagggcttcctgcgtccagcactaacctcgcacctctccggacacacgaatgggtggtggatggtggagcgcagagctgatgctgcttctcacctgctactcccctgacctgccactccctggtggtctccatccttgagagagtgtcagccttgagggaagcacatggatgtcaggttgttctaaggcaagttactggtggagctccctgagcctgcctgtgccctctgggactgtcgctggactccaatggccagtcctcggagcacattgtccagtgattgcacctgagtgtgccttgggcaggtgtgtctggtcttcaggactcctttgtcgctagagtctgacgctggggccctctttttgtttgtttcgaggcaggtacaggtgacacattcttggatctggtcatctctaggacaaccagcctcagaggagagacattgtctcagcgctctccagctctgagaatgcctgcagatgccttcttctctgataactccatgtc

SEQ ID NO: 9120 - DNA, 458 bp, Homo sapiens
cacagcctcgtttcctctagatcagagagatggcttctggattcatctttccctgcaatccagcttctcctcctggggccctcataatggagactgggatcatcatccaggcttttgcactgggttaggaatttgggagtcatcctggatccatctgcccctgtcaacctttctctgtcaacagatatttactgggcatctccaacagccaggccctgttcatggtgctgaagaacagcatgtataaaacaaccctgccctcacagggcgatcaccagtgacctgtggtgtggagtctccttttacctctgtctcctccttcccactgtcaccatccttggtcctcctctgtcacctggaatactccacttggtaaccagcatgatcttctaacgctagttttacccttgtcagcactttgccgaaaacctcaaataaagacttttttaaaaatgtgc

SEQ ID NO: 9121 - DNA, 470 bp, Homo sapiens
aggtgtctctaaattgattgctgcctctgatagactattctaagccacggccatctcgtggagaaattaaacattctgtgtgaaggacatgcatgtccttaacagaacagtgaagttgctgatgcatttttattctcagccaccctcacggcaccccagtacctaccccatgtcccagcctcatggggccttgctctcatctgcccattagctaatctgggctaagaagatgtactgcacaaaaagaaagaaggaattcaggcttttaaatgaaatgcccaatttgtaactgttggctaccaatgcaattagttagaaggtagttctcagacaggtgggacagttcttctcctaacaagcatgtgtcaaagcatgcttgtttcttctaacgttttgtttttctaaaaaagtgtgctttcttcttctaagaaaatctggcaaataaaatgttattctcctcatgttaactg

SEQ ID NO: 9122 - DNA, 445 bp, Homo sapiens
aaggtccatatgaggtgctccttgcccatttctgtgctgccaaactaaaaggttcactctggattcacacttcttatttaaaggaagttcctacccctgctggaattcagaaacaattagaggcctgaagctaaaatcgacctaggagtggagcagagaacagctaaaggtgaccacacacccaagacccctgggccaggcctggatatcattaagctcccggaaatacctgaaatacttggcttcttatctgttgctttctctatactcctagtttttgtctttcactcccttgcacaacagaattactttaaattctatcttgccctagtgctgtagccagtacctcgtgttatactggaataaatacatctaaaaaagtagagcccgagttggaaacattctcactacttagctaaataaagcattcaccatggaatattcg

SEQ ID NO: 9123 - DNA, 381 bp, Homo sapiens
gagcgccagctggacctgggcaccctcaacaaggtgttcgcgtcacagtggctgaacgccaggcaggtggtgtgcggcaccaagtgtaatacgctgtttgtggtggacgtgcagtcaggccacatcacgcgcatccccctcatgcgggacaaggaggccgggctggcccaggcccaacagggctgacggcatccatgccatcgagctgaatccctccaagacgcttctggccaccggcggcgaaaaccccaacagcctgggccatctaccagctgcccaccctggaccccctgttgcctggggcgaccgccatggccacaaggactggatcttcgcagtcgcctggctgagtgacaccgtagctgtgagcggctcccgcga

SEQ ID NO: 9124 - DNA, 735 bp, Homo sapiens
ctgtacatcaattagcaatttgtttgcatcaaagagattttaaagatggagaccatctctttactttaggcacagttgcacaggacccctaccttggctcgtaagcccagaaactcaatttcagtttacccagaagacatgtcctgataaaactaacaagacgcttaacctattaatgtataatggacatctgctggtccagataagtaagacacttagggaagcaaggttgtaggtcaaagatagtaagcatttaatttgaactgagagaatgagtttagttttttttatggggtggggcttgtgatcagattttttttattgtggtaaaatatacataacataaaatttatcattttaactatttttaagggtaaaattcattggcattcacagtgttgtgcaactatcaccactatttccagaacattttcatcaacccaaatagatattctgtaatcattaagcagtaattcccctttgtctcctcccacagcccctgaatctactttctgtttctataaatttgcctagtctagatacttcatataaatggaatcacgatgtttgtccttttggacttcagtattcttaaaggatatttctgcttttctactctacagattgtctgtttaaataatggttttcaaatatcttttgatggtatgttttatctattaaaaaatttaagtgatatatatatttgtaacatacatgtactctgtactaatatat

SEQ ID NO: 9125 - DNA, 481 bp, Homo sapiens
tttctcttatttggatatctgcaatggtcactggaatgctgatttatattggctagacttattactcccccacttttataaactctactatgaagctcacatatccaactgcctgcatggatctcatgagacaatctggcaattttaactgcacagtttctttaataaagatgactgaatctgtataaaaattttgcttaggccggacttggtggctcatgcctgtaatctcagcactttgggagactgaggtgggaggactgcttgagcccaggagtttgagaccagcctgagcaacacaagatcgagtctctacaaaaattatctgggtgtggtggcacatgcctgtagtcccagccattcgggaggctaaggagggaggactgcttgagcccaggagttccaggttatagcatgccatgattgcaccactgaattccagcctgaatgacagagtaagaccctgtctctaagaggcaaa

SEQ ID NO: 9126 - DNA, 1645 bp, Homo sapiens
acatggtctctgtgtgttctaatccctgttcattctcatttactgtctaaagttgaggagatgggatgtcccagatgatagggctcctgggatttcagacccaagaccagcaggactccagtcacctctaccccagctctccaggacacagcgctcccaactctgagtgacgtcccacctctggtccttgcagcacaaccaacgtgggaatcacaccctccagacctcccacagctccaccccagactgggcgccggccctgcctccatttcagctgtgacaacctcagagccgtgttggcccaagcatgacaaggacgtatgaaaacttccagtacttggagaataaggtgaaagtccaggggtttaaaaatgggccacttcctctccagtccctcctgcagcgtctccgctctgggccctgccatctcctgctgtccctgggcctcggcctgctgctgctggtcatcatctgtgtggttggattccaaaattccaaatttcagagggacctggtgaccctgagaacagattttagcaacttcacctcaaacactgtggcggagatccaggcactgacttcccagggcagcagcttggaagaaacgatagcatctctgaaagctgaggtggagggtttcaagcaggaacggcaggcagttcattctgaaatgctcctgcgagtccagcagctggtgcaagacctgaagaaactgacctgccaggtggctactctcaacaacaatggtgaggaagcctccactgaagggacctgctgccccgtcaactgggtggagcaccaagacagctgctactggttctctcactctgggatgtcctgggccgaggctgagaagtactgccagctgaagaacgcccacctggtggtcatcaactccagggaggagcagaattttgtccagaaatatctaggctccgcatacacctggatgggcctcagtgaccctgaaggagcctggaagtgggtggatggaacagactatgcgaccggcttccagaactggaagccaggccagccagacgactggcaggggcacgggctgggtggaggcgaggactgtgctcacttccatccagacggcaggtggaatgacgacgtctgccagaggccctaccactgggtctgcgaggctggcctgggtcagaccagccaggagagtcactgagctgcctttggtgggaccacccggccacagaaatggcggtgggaggaggactcttctcacgacctcctcgcaagaccgctctgggagagaaataagcactgggagattggaagcactgctaacattttgaatttttttctctttaattttaaaaagatggtatagtgttcttaagcttttattttttttccaacttttgaaagtcaacttcatgaaggtataatttttacataataaaaatgcactcatttaaagagtagagatgactttgacaaatatgcatgcctaggtgactaccactccgatcgcaatagataacattgccatcgcccccaccagtcccctcatgcctctgggcagtccaaccacttccctgtttccaggccagtgatctacttctttttcactatttattggccttgcctcttctagagcttctagaacttcatataagtgaaa

SEQ ID NO: 9127 - DNA, 1039 bp, Homo sapiens
tccagcgaaaaagtatccacagagagaaaatatcgaggcaaataccgaagcacgaaaacatctccaaactcctcagttgatttaacgaagagctaaagttgagaatcactagtttaaggagttggctgggatgggaagaagtcaccactgcccttctgtcaccgcagaattttgtccagaaatatctaggctccgcatacacctggatgggcctcagtgaccctgaaggagcctggaagtgggtggatggaacagactatgcgaccggcttccagtgagtgcaccctggctttctgtgccaatgtcctccgtcagcgtttcccccagggatctgactggcagcctctcctcccctgaactgaattctactccatctacccttcctagcttgctgttgtcttttcctctcaggaactggaagccaggccagccagacgactggcaggggcacgggctgggtggaggcgaggactgtgctcacttccatccagacggcaggtggaatgacgacgtctgccagaggccctaccactgggtctgcgaggctggcctgggtcagaccagccaggagagtcactgagctgcctttggtgggaccacccggccacagaaatggcggtgggaggaggactcttctcacgacctcctcgcaagaccgctctgggagagaaataagcactgggagattggaagcactgctaacattttgaatttttttctctttaattttaaaaagatggtatagtgttcttaagcttttattttttttccaacttttgaaagtcaacttcatgaaggtataatttttacataataaaaatgcactcatttaaagagtagagatgactttgacaaatatgcatgcctaggtgactaccactccgatcgcaatagataacattgccatcgcccccaccagtcccctcatgcctctgggcagtccaaccacttccctgtttccaggccagtgatctacttctttttcactatttattggccttgcctcttctagagcttctagaacttcatataagtgaaa

SEQ ID NO: 9128 - DNA, 737 bp, Homo sapiens
acatggtctctgtgtgttctaatccctgttcattctcatttactgtctaaagttgaggagatgggatgtcccagatgatagggctcctgggatttcagacccaagaccagcaggactccagtcacctctaccccagctctccaggacacagcgctcccaactctgagtgacgtcccacctctggtccttgcagcacaaccaacgtgggaatcacaccctccagacctcccacagctccaccccagactgggcgccggccctgcctccatttcagctgtgacaacctcagagccgtgttggcccaagcatgacaaggacgtatgaaaacttccagtacttggagaataaggtgaaagtccaggggtttaaaaatgggccacttcctctccagtccctcctgcagcgtctccgctctgggccctgccatctcctgctgtccctgggcctcggcctgctgctgctggtcatcatctgtgtggttggattccaaaattccaaatttcagagggacctggtgaccctgagaacagattttagcaacttcacctcaaacactgtggcggagatccaggcactgacttcccagggcagcagcttggaagaaacgatagcatctctgaaagctgaggtggagggtttcaagcaggaacggcaggcaggggtatctgagctccaggaacacactacgcagaaggcacacctaggccactgtccccactgccatctgtgtgtgtccc

SEQ ID NO: 9129 - DNA, 391 bp, Homo sapiens
agacagggtctggctctgttgcccaggctagagtacagtggggtgattatggctcactgcagcctccgcctcctgggcataaacgattctcccacctcagcctcccgagtagctggaactacaggcacacaacaccacacccagttaatttttgtattttttgtagagacggggttttgccatgttgcccaggctggtcttgaactcctggcctcaagtgatctgcccactctgcctcctaaaatgctgggattacggagtgagccaccacacccggctagcgtgtttcttaagttggcaattttgaagatagaagccatttctttgcccctttgtttctacagttctaatatgtgactgaattggcaaatcaagaaaaggggaagtcagt

SEQ ID NO: 9130 - DNA, 385 bp, Homo sapiens
gttgacctggggggatttccctaaggagcaacgctagctaagatttaattagtgcttactatgtgctaggcacagtttcaaagactttttttgtgttaactcatttaatcctcacaaccactctatgagtgaagtagcattattgccgtcttaccaatgaggaaactgaggcatgaagaagttaggcaagtcatccaagcataagcagttagtatgtggcaggtctgggatatgaacccatgcaatctggattgacatagatattttaaaataacttttttttttttttgagatggagtctcactctgtcacccaggctggagtgcagtgagctgtggctgcatcactgcattccagcctgggtgacagggtgagaccctgactc

SEQ ID NO: 9131 - DNA, 302 bp, Homo sapiens
gcttcttatgtccttttattcttactgtttatcccatctgctttcctttaaatgggcacaatttagactttatatcctaagaattctctttgatgagaccatagccatttctatgcctaatttatgtagtggatacattataaatacaaaaatttaggccaggcgtggtggcacatgcctgtaattccagctcctcaggaggctaaggcataagaatcgcctgaaccttgaagcggaggttgcagtgagctgagatcgagccaccgcactccagcctgggtgactgactgagaccctgtctc

SEQ ID NO: 9132 - DNA, 351 bp, Homo sapiens
ccagtgacctgccacagcagcaaaagaacagactcctatagaatcatcacatacacccttaatcccactgaaattgcattagcatgccaccacatggccacagcgacccctgccccctttcccttgcagtgacaatttactggatcaggccttgcagtgaggggccagcttctgaacttgcagagccaggtacaaaatgaaaatgcaggccagttgttcaaaaggcaggaaaaaagggccattcacgatactaaaataaaaacgtttccctttcttccagtttctctctcgatttgtcaagacatttttgtttgcaacttaatgtcattttaaattattagtgtgaatctt

SEQ ID NO: 9133 - DNA, 555 bp, Homo sapiens
tgaaaagctatggagaactatgataggaggagtgtgagctaaacgcaatgaactgggggaaacttagcaaggtctgttcagatttctctctgtatccttctttggaggtcagcatgtttcctccccccgtagatacggagggcacttctcacatgagggtcttaccacctgctttgggtgagggtcagaaagtccttcctaggtttcgtgacctgcctcaggagagaagggttggggaaggtcagagagatgttcctgcacaagctgcttctcaaattctttcagcttcaaatattcagtgtgcccaggtgccacattttggggtagcatgtcctgaaccttgtcaaaactatatggatgttttaatatagttttaaaataaaatgaagtcaaaagttggggggaagtagtctctaaaaattgaaagcagccgagcactgtgactcacagctgtaaccccagcatttcgtgaggccaaggtgggaggatcgcttgaagccaagagttcgataccagccttggaaacagccagaccccatctctacaaaaaaagaa

SEQ ID NO: 9134 - DNA, 391 bp, Homo sapiens
acaatcttaccgactgggggaaaaatgcttagttacaatttttaggggggaattactgtcatgctgctgagaaatggatcctgtcttttttgaccttccttccttcctgaacgtcctctgctaatgttatttctgtgattcaaatactgccaagcacagcacaagtttttgctggaattgactttagaatggacatgtgagtgtttataataaggaaacagattctttttttcataggctctgtacttaaaatatttattatcctgaataaccatatacccccaaaaaagtacagtttggctactgtattaaaatttgaaaatatcctgcattacatgtttagtagctcagaggccacttttattaaatgtaaagaccaaaacttctgtga

SEQ ID NO: 9135 - DNA, 701 bp, Homo sapiens
tttaaaggtagcaaatctttgttgagtaacagagtccagctaaaagatttaaactgtgcagggcatttgttgtttcctgaacagaaaggccaagatatggtggtttcaggatgcgttggagctgatggttttgtcatggacccaggctcttttcattgcccctctgccagccccactacatggcctacccccttgatttggtcaacaagtgcacaggaagattgctgttccatcacaggtgttaaaagctttagacaaattaaatttaacgcagtttagttgagcaaagaatgattctagaatcaggcagtccctagaaccagaataggttctgagtgacttggggctgccacgtggtcagataacatttatggacagcaaaaagaaagtgttgcacagaaaatgaaagtgaggtgcagaaacagctggattggttacagctgggccgtggccttttttgagtctgctctaaacaactggccacatttggttggctaaagctcagctacgagagtagtttacacatcaaaaagtctgtttacgcatcagagtaggttaccattcactatgtatggagatgagacacctttaggccaaacttaaaatatgtacgaaggcagttttaggccaagcttaacttaacagaggcatcacgtgacaatgtcctaagcagagggtaagaaagatgatagcaaaaaaaa

SEQ ID NO: 9136 - DNA, 396 bp, Homo sapiens
aattgcagtaatttgagaccaatttttccccattacccttttgagataaccctctgattaaattagctattattaaaataaagtggcttcctcttcatgttattagtagggtaccagttttttggtttttttttttcatacatggctaatttcacatttataaatggtgaagtgtgtattgttgaccttttgaagcaagcaactttctgacttaagattacttggattatcattcctgcttgtttgccttctttaggttaatagtatttgttttactttgctttattttgtgcagtgtgattttttttatgaccttctattgagtgattgccaaatagaacagcgtatgatttatggatactaataactaaaatatatatgaattgcaggctgata

SEQ ID NO: 9137 - DNA, 416 bp, Homo sapiens
gcaacagagcaagaccctgtctcaaaaaaatatatatatttttttttaattagctggacatggtggtccatacctgtagtcctagctactcaggaggatgaagcaggaggatctcttgagcccaggaattcaagtctgcagtgagctatgatcttacacaaattttttttaaattaaaaaaaaaattttctgtaatctcagtatctctccaattctgtgtgttcatccattcatttctgtgtatacttagagagatgtgtggaatggtactccactaatattaacaccttttctttctgggtaatgggacattggttgatttattccttttactattttgtgcttttatgtatttcttacatttttcatggaagcatgctttattttataaaaattaaattatttgcttaaataag

SEQ ID NO: 9138 - DNA, 328 bp, Homo sapiens
agggcagcatctctagtgagggggccagggcttctatttccttcattaaaaaatgaaacagcagacctgattccatatttagagattacacttagttgccactgtgggtgtgcaggcaccaaccaaacccagttggcaccgttgtcttttctctgcaatgatgtattgaatttaataatggaggtatatgaaattcagagtgattggaactgaaggtttaggggctttgtgtaaaattgatatgtaagggatttggaagtaggtgagggattcttccccaatacttattcaattttggagtcaaataaccaagcatttacaaatagcc

SEQ ID NO: 9139 - DNA, 394 bp, Homo sapiens
tccctcccgcaaagtgacatgtaccaaatcttgcagccaacaagctatctttgttggacagaattatcctacaaggattagacagatcatagacaaggacagacagccccaggaagttgaggcatttaaggggaagatattgtatcaaaggcatccccaatccatgccccacagggatcctgtaccacatctaaaccccacttgtcagcgtcaagtcaccctggtgtgtccagctgtcccaattagtggcaaaagcactgtgttcagtgatgtgcctttactaactggacacaaaatgcattggaagtatttgcagggaggcaaatctccccccacaaaataattcactacttgttgagaatcttgattctccctaataaatgttctaataaga

SEQ ID NO: 9140 - DNA, 703 bp, Homo sapiens
ttagtttctgccctcaaggggaagggattaacctgggtgtgcacaccagggggtggggaaacttcccattctattaatgcgtttaggttatttagaccaatgtctcattaattttaaaaaaattaaaaataggccaggcgcaatggctcacgcctgtaatcccaactttaggaggtgaaaggatcacttgaggccaggagttaaagacgaacgtgggcaacacagtgagatcccatctctacaaaaagtaaaatacatttacaataaaaatctacaagttctgacccataggagagtggaaaactcaaaggctgcttttgtcctgaaagaatttgcctattctaataaaacagctgaggttgaaacggctcagcctctgaaaggggtctgacccttccttgagcccttgcctccagtgacaatctcccaagctaagggagaaaaggaaccaaaagtctgcactcctctctacctctagcagtgcagggagcgaaggaaagacaagggaagaaacccttcagattttcagatcaaattcacatcactggccatccaagaaatcttaagctctgcgtttatcgtcaaccatttctgcatgagggaagcaaacagtccttgctgaaggaaggtgcctgcatcctgggcctcggaacccactgaaataatttagcgaagtgcataataaaaataatatttgccctta

SEQ ID NO: 9141 - DNA, 406 bp, Homo sapiens
aaccaaaagaatgttaactcataaattatcattttaggatataatttatttaaagtagtctaagttattttcatttatcagagcagttttactttgagttatgaggattcgagattgagtaaatcactattcttgtgataggttccttcccttggatatttgaatgcttcccacataataaagcacatggaaaggtttatatctacccttaagggaacctagggagaaagagatggatgtgtgagagatgtacataaataatagtgtatggtgaaggataccaggagtacaatgtagtctcatgagatataacttctaaataagggtataggagaccaagcatggtagctcatgcctgtaattccagtaccttgggaggccaaggcaggcggattgcttgagccta

SEQ ID NO: 9142 - DNA, 446 bp, Homo sapiens
gagcatcctgagcatcgatggtgagaagctacaggaggccgagcggctgttgacgcccaggaccgtgggcagcaccttgcagggggaaaccggcttcctccggtctcccagaagaagagttcaggccttctctcctctctccaggcctccagctcttccccatccccgctctcagcggaggactggcttctgttttcactgaagaaatcacagcctcctgagaggacttccccagacgcagccctcccctgtacccgctcctcctccacatccccaccttccatgcccagggcagcaaaccaccccccatctgcttggggatgtcaacaggctccctgtttcctgaatcttcagtttctccttcctgcttgattcccatccacaaacttaccattatgtttcttgtctttaaaagaaaaataaaatttttgctttttatccaaaaa

SEQ ID NO: 9143 - DNA, 2052 bp, Homo sapiens
catcgaaatacctgcagttcccaaatacatctggcctcacagggttgttggggcttaaatgtgcaaatacgagtaaagaggtgagagcggagcctgacagcgcacctgctgggcagggtctccaacactgcagcattttgggggaagctctcctactgggtggggtctttgtacagcagcagcatttcaaggtgggctgatccttctcatctggggaagccagggctgggcaggtgcctgagcctcatgagggtctcagtctagatgttgggccctattctccctgctgccttgggcttggagatgctcacaggtgagttctcatttgtgaagaggtctgtcttcctgaggaagcaggggaccctcacctgtgaaccaagtgtgccatgggagctgctccatgtccaggtccaggtctcctggtctgcagggaacggcacaagagggctggcctaggccaggaggatgtgatctgtcctagaagggggctgacctgcttgctgaccccgcttgctgctgcctggctgacctgactcagccacggctgttccgagggcccttctgagtacgaacttccagttggaggatctgggtgaagacccagctgcttgagatagcagcctctggctaggcccttggcgtggccaagccaatcaggcaggtttagagcctggtgcccctagacaggtcctgcaaccaagaacaggggtagccttcaaaggccagccctgccttccaaccaccgctccacagcgagggaaaccaaggctcttagggcaggaggcttgtccgagattagcacctgcgtgctccaggctctgagttctgtcccctcagctgtccggcccctgggtgctcactttaatctcaagtcattcatcttactattaaacgtgagcccagaaatattgttgtaatggagaacgatgcctgcgagtctccaaagccttccctcggaacggttccattaaatctctcctgctcagaaccacccaatccaattcatggagcgccacgtggtctacagcacagctggttagggccagcggaggtttatttatagctgggctcctggctgcctggtaaccggccattgccacctttaaagagtcttgggatattatctacctctattcagcttgaaatcgggcatgcagtgccttgggctggggctggcgataattaaatttctatcatgcacaattatggatgcaaagaatgaatgacatcccactggcatgtgaggattcgggcagcttctggactgaaatacagacttcataattgctccatccagattgggacaaagactgtggttgggagaacatgcctgaacaaagaaaaatgactctgcaggaccaaagttcttgacactaattgatctgccaaaaggggaagaatgagtccagctagaatccaggactaaccagcgggtgagcttcaaggaacaaagggcttccgctgggtcagcccacgagagggagctgcctgcaggtacctgggagggcacagccaccgtgtctgttccttgggagcagggctccttggaaggcagcgccagctccagaaaggccactgttccccctcccacccaccccaggtggcaactgcccctgcaggtcacggtcccagggcctcgctcggccggcctagagagagaaaagggaagatgcccaattagctggacgcccatggccccagggctgggggaccttgggttatcctgaaagaaggacaatgaccacctgcaaaggacgatttcaagtggagcctggaggaggcggcaaatagctcagtccgcactcaactcccttcccagccgtctggtggaaggtgaggagcaaaagctcatgctgctgaggcctggggccacccaggcaccggcctccccgtgctgagcagagacagcagccccctagctgcaggagtgtgccccgatgcgcacctgccgactttccttctgatgcagacatggtccccactggggcaaggctgcagttttcttttaaaaaacagatctttcaaaataaaaggggccttgaagaagaaaaa

SEQ ID NO: 9144 - DNA, 772 bp, Homo sapiens
gcgtgcctgtaatcccagctactcgagaggctgaggtgggagaatcgctggaacctgggaggcagaggttgcagtgagctgagattatgccactgggtaacagagggagactccgtctcaaaaaaaataaggtttgaaaatcactagtttaggctaagtgcagcttatgtttaggtgttaaccaggaagaagtaaggatccttgtgtagctctcagtgcaatattagatatgcttttcttagtggaaatgaaagttttgcattcactagtgtaactgatacattagtcatcactttgggttatgttcaggttttggttcccgaacattataaagtagcaaagtttacacctgcagttgaaggaaagtaggacacactatgacacactagatcctcacttggagtagtttaaaatgtaatctggacaagttggacttagaggctagctttttcttctggcttatctgtgcctgttcagaggtagctgggttgtcttttgcttatctaaaacaggcttatctttttgtttgttttgtctttctttcagatgatactagtaaatgcttttctgctttttttctgcccgtaaaaatacagactatatggtgccatccttgatgtggtagctctgcagaactaccatagacaagctccactaattcttggtgtgccagatcctgcagactttaccttgagcctgctaaactgggactgtcatctgttgggtgatgccattgcactccagcctgggcaacaagagtgaaactgtctca

SEQ ID NO: 9145 - DNA, 638 bp, Homo sapiens
aaacctacatcctgtttaggtggaaagtatctgagacttgagcacagccatagtctcatccaggtatgacatgtgccactgtgtctgaaattcctgagcaccgagggccgcttcaggcaccaggcactttgccaacctgagagctgtatggggctggactgtctagtctaactaggcagtgaaccctgtcctgaacagagcttgtttgttcataaagcactctaaagcagtgacttttaaatcttgatctgtgcataatctcactcctcccaaagagtcatcaagggagagcaaacacccaagggtaacgttggctcacgttcattttgttgttgttgttgaatttttgcttcctcctatgactaagcagaaagagagaaaagcagtgtttgggggcctcttctcaggctgtgtttaaacccaggtcacttccctcaacaggaaaatggattttgacaggccatcttgcttagagatttccctaatcacaccataattaatgccaaatggtttctttgctaaccttagtagcacttgaataattaacttttactcttttctttttttaaaagatacctgcgaatccactgaaaagtacattaaacaaaacagtatagttttggttccccaaatgtgga

SEQ ID NO: 9146 - DNA, 384 bp, Homo sapiens
tttttttagttgatattttattttattgacttctctcaaacagattctattcactcttctatgcacaatttcagcctgcttggttctttaaatcaattgctaaattagaaagaaggcactgctacaagataactagaagtgttagcttgatcacaaaggtcgcgaaacgaaagctgtaaaatataaagccagcctgagcaacatagacagacctcatatctaggaaaaaaaaaaaaattagctgggagtggtggtgcatgcctgtggcccagctacttgggaggcagaggtgggaggattacttgggcctgggaggtggaggcagcagtgagccatgtttgtgccactgtattccagcccagacgacagagtgagaccctgtct

SEQ ID NO: 9147 - DNA, 899 bp, Homo sapiens
actgtaaagtgcaatgtgaaatcaaagattatagtcattgtataatttggcttggaggctatgaaatgtctttttttctttttggtattttacattattcacattttagaataacaagaacacccaagaattacccctaaaacagagaccctgtatttaatcctactttgatcagagaagtagaatttataacaggttagctaaaattgggagcatgccttaaaacttaaagattgtatgcatatatgtgtatatgttataaacgtgaaatatatttgacacacacattcacatataaattgttaaaaactgaaggcagaatggaactaatatatgtaacagagaaaaacaataaattttatgaacttgttttatatttgcatatcaagagtcaagtatgatgtttctttaagttgactttttttacttcattatttttaggaataaatgtaagattttacaaatcttttatttccccacaagatctgaagtttggtatttttgcattatgacagttgttgagactaggattttaagctaggatatgattatatttcctatataactaaaaattttgtttcataaattttaaaataattatttttgactatgaacattagtccaaatttaatatttgacacagttcataccagcttgctacaataatgataatttattagtctttctgttatttaaagaataaaaacatgcttataaaagacttttaatgaaatgttgcctttttaaaataattatacttgcacatgaaaataaaatataaagtcaataatagtccttgtagcccaatgggaattgattctgtttattgtctgtaccattttgctaccagttacattgaactgctttaaaataaataataaaattatttctaatgatga

SEQ ID NO: 9148 - DNA, 435 bp, Homo sapiens
gaaaatacttctgataattggcacctaccttgcaaaattaacaacttccttatcccttttgtgaatttcatatttgtttcagaaaatccaagtgtttcaaatattcataaattccagggtttaatgtcgttttagtaattagaagttcataatggagagagaaaacagcagatttcttatactgtttccagtatgtgattcatacatgacaggtcacctgttaaaagctaagtgaaattgccattatactcaagtggcaggatatattcctgactgacgcagaatgaaagggtgtgatttaaagggccagatagaaactgtgtttctagtagttacttgaagagacagcatattttcactttagtctaaaatattgtgatagaaaagagaaataaatgtacatggaaataaaacttgtaaaaatactgagcaaaa

SEQ ID NO: 9149 - DNA, 582 bp, Homo sapiens
gggatattaacatatcatttacaggcatagttaataatcatgggcaggcatggtggctcacacctgtaatcccatcactttagaaggccaaggagggcagattgcttgagctcaggagtttgaggctagcctgggcaacatggcaaaaccctgtctctacaaaaaatacaaaagtaaaccgggtgtggtggtgcatgcctgtggttccagctactccggggctgaggtgggagggttgcttgagtgagggaggtcgaggctgcagtgagccagatggtgccattgcactccagcctgggcaacagagccagaccctgtctcaaaaaaaaaaaaataataataataagcggacacagtgtgcctgtaatcccagctactcgggtggctgaggcaggagaattgcttgaaatcaggtggtggttgcagtgagccgagatcacaccactgcactccagcccgggtgacagagcaagactccgtcataaatgaataaataaataaataaataataagtaacgatccactgtggcttcctggaaacatccatgttcacagctggggtctggtcagtctgcatagtgg

SEQ ID NO: 9150 - DNA, 462 bp, Homo sapiens
tcagcaccttcattcagatctcaggtacagtagaactggctgtgaaatgtgggtgaagcacacctacagtgaaatctctacagtattctctcctttggggttgaacagcagcagtctcagtcttttctgaatgataaacctaatgaaaaggcaggtggcaacactgaagcttggggaaggagtgctcagaggagaaggatgtcctgggaagtgtgctgcactgggtgtcatgccaggcgagcctcaggcccacccctgcggccttagcaactttggggacaagtcaggtaccctccttgtgcctttaattccttctagtgctgttgggaacaagattggctgttggagccaatcttggagggccttttcagtgtagatattgtatgattattcaagtaaattagagagaaacttagacattttaatttttctgcttaccttttactttattaaactgaattt

SEQ ID NO: 9151 - DNA, 811 bp, Homo sapiens
tgatgaggaatctgccagtagtcttatggagctcctttgcctgtaatgagtcacttttctcttgctggtttgaaaattctgtagttgtctttgatttttgacattttgactataatgtcttgttctagacctttttggatttattctgtttgggcttcatgaatctggatgttcatttccatgcccagatttgggaattattgagtcatttttttaattagggtttttaccgctttctctttctcttctcctctgggccttccataatgtatatattggtttgatggagtaccatgatttccttaagatttcttcacttcttttcattattttttcattttgctgttctggctgtaatttcaaattgcccatcctcgagttttcaaattctgtcttctgcttgataaaagtttgctgttgaacctctcttgcgattttttaaatccagttattctttaataaaatccaattttctagtattttaaaaatttaattatatttattttattttatgttatttttaagatgaggtcttgctgtgtttgttgcccagagctggagtgcagtggtgtgagcatagctcactgcagattcaaactccggggctcaagcaatcctcctgcctcagtcttctgagtagctgggactacaggcatacactaccatgcctgtctatcaaaaaaaaatttttttatacaaggggtcttgctgtgtcacccaggctggtcttaaaatcctggcttcaagcagtcttcccacttcagcctcttgagtagctgggattacaggtgtgagccactgtgcctggcta

SEQ ID NO: 9152 - DNA, 1041 bp, Homo sapiens
gaactcctggcctcaactgattcacccacctaggcctcccaaagtgctgggataacaggcataaaccactgtgcctggccagttaactgtctaaaatggatttgtctacctttctattgtaagtacagccttacaaatattattgaatccttgataatgtatactcaaacagtacctcaaagttaacattctaaacatttgtagaattctgtcaatggagaaagaacagaccaattgagtaggatgtctctgtagaccctcagaaaaattcctggaagttttaacaaaagatgcttatttatgattactttttctctccaaaagtttgttttccctcctaaatttcagatgaggattctcagcttttgggctgatttttggactcttcatgtcaacaacctttcctttccctcttgatcattggtcatctcttattagtgctagtagccagcatgaaccccaaagacagaagtggaggcagtggttagcagggcagcacttggttggtctggcctcctgagcttagcacccatggacaaagctttacctgctggaggtcagatgactatggaatgtctttgaaggttctgctctgagatcacagcctttaagaattatccttactgggtataaagtttatttcattgtatctctaggagctggaccaccaggaggcagtcattctgtggggtctcaggcaatgtcttgtctacaacactgtctgtctagcttggcaggaactagttgtctcattctttgctattattttcctagtgagacagtactttgaagagggcagagagaaatccccaaagaggcagcgtccctcattggtggggccatgtggtccctctctttgggaagagaggtagagtctttcacagcatcagttgtcttaagaatgcatttgtggccaggtgtggtggctcatgcctgtaatcctggcactttgggaggccagggcaggaggattgcttgagcccgggagttaagagactggcctgggcaatatggtgagaccttgtctctacaaaaaaaaaa

SEQ ID NO: 9153 - DNA, 393 bp, Homo sapiens
  misc_feature (317)..(317): n is a, c, g, or t
  misc_feature (357)..(357): n is a, c, g, or t
  misc_feature (371)..(371): n is a, c, g, or t
atgcattaagtgatgacagaatggagaattaagattccatttttgttttttaaaattaaaaaaaattatatatggagacaagggtctagaaggatatattccatttaaatcgttaatagtagcaactgatgtcttctccggagagttggatgaatgaataattaatgttatctttagaaagtgggatggttaagccaccacacccggccagggtaaagttttttcttaaggagtattttgaggctaggtgtggtggctcacacctgtaaatcccagtactttggggaggccaagccaaggaggagaggatccacttngagcccaggagttccaaggacccagcctggggaccaaccntagggggagacctncgtctcttaacaattaaatttt

SEQ ID NO: 9154 - DNA, 933 bp, Homo sapiens
cttttgtcttccaggtggaaccagtccaacttacgtgtgcttaatgtattaggcagagaaagaaagagagagagcgggagcgagagagcacaagtggtcctttcggcagtcaaaactttggctttaaaactctcattcacgtttcccaacagcagtatatttttgccttctcattcaaagagttttggctaaaccttaattgtgttctgtctttcagtgattcacataccctccttctttaggttgatgtagtcatagtcttcactactattcagtacgttagttttatcaatattgcaatagtgttcagatcttttacacatgttagatgtgtggtgttttggggaaatgtgagctacaaagcatctttggggttgttttgaggaactacccatcatttatagccttactctaattacaaaatgcagttcaggttctagattgccaccattctagagtgtggcacacaccattctagggcgtgattcatttggatgttggaaactcaatgtctgttgtttgtatagtgttgatgtgtaaaatgctttaaaaatatgttctgttagttagaaatcttacaatgttgttcatactattaatcaacatttttggttattcagtaaaactttactatcctcaggccctccgtgttcttatttaaagccgctgtattatggcctgcttttctatgctacagattttcagaactactcaattctggtctatatatgtggtagtgcaatcagggaggtatttttgggggtatatggggtacacatctctttaaattcaggtagctatttacagtgaaaagccagttgtggcagttgtgctcagagtaggtgttgattttttattactgtatacatggataattctggatccagtatgtgatgtgttgcagaaaaataaataaaatgtgttcatcatctt

SEQ ID NO: 9155 - DNA, 516 bp, Homo sapiens
gcagctcccctgtccccggacaaatacttctcttccccatcctcccaatttaggtaaatcatcatttttatcaggttaatatacagtatttatattatttatagctgagtcacatagtaaactgcagttacttttatttcccaggattaataattagtattttgtttgcatagtgttccatgtacctattatttccaccccagactccttatcagaactatggatctcctctgggctggttcagacacacgtcaggtcacttacttgtttcattttcccttggagccttctctcctagagccctctatcatctggctcctcccaggacggagtgcactctaggcctgctgcccaactctcatcctggaatttgcatttaccatcagcctggaattcccttcacctttctctttcatagtagatcctctgttttttaaattccatgtcttcttcctttcttgccttggtggagtacattcataacagtttcttgagaaagggagcatgagcagtaaa

SEQ ID NO: 9156 - DNA, 489 bp, Homo sapiens
taaaagaatgatgaaaattgaccctctccagacaaacctatagagacttccactacctgctagaagatgcctaagcttctccatctggtgagatgctgtgatctgctcacccctcattcagtcaggaaaaggacaccttgcaaatccctgacttgttttgctggctgtgggcacacctagacaccagcaaggaagagaatagaaggcaaattctccccaaaccggctactgctttgaacacccttaactatcctagacccttctggtctcaatctttgaaactttataagttcttccagctatgccaggtttcttgaacttctgctaatagccttgtctaatagtctcgactggctgacattaaattcaagtataaatcttggaattcaaactcaagaatcacttgaacccaggagacagaggttgcagtgagccgagatcgtgccattgcactccagtctgggcaacaagagcaaaactccgtctcaa

SEQ ID NO: 9157 - DNA, 760 bp, Homo sapiens
ctctatatgtctcctgttgcaggttgttggatctttccagatcaccacaccacatcacccagccactctgcccaatgggagggcagacagtgttccagtgtaggaggaaggggtgtaaggtgcgggcagtttgtgaggagggcaccaacgagagctactgtgagaaagtctgcatggtcaaaaagtggattaccaagaacaaagcatcataatgttgtccagtggaccccagggtcatctggatgaaatgaatacttttagggcaaaatggctgatactgcttccttgataaccacatatagaaaactgacaactgtttagaacaaagccaaagatgaaaccaaatataaaaccactgatgaaaactaagtgaaaaatataagcaaaatagaagaaaaataaggtcgttatttcaagaaaacgaaagacagtcaatgctgttctttgtattcacatacaatttggttcacaccaaaatgtgagttgttctctatgagatgttattaaatgttcctaagaagactcgctttagaaaaaaacagtattcctaaggcatgtccaatctgtctcttttcttaattgctatagttctactttattattataatgtattcagcattaaaattcattatttcccaataagcttgactttatcttataatgaatacaactgtcttcttggtgatttttataggagatattatggaaatattttattaacagaagtaaataaagtgtcatatcatttggcttttcagcc

SEQ ID NO: 9158 - DNA, 363 bp, Homo sapiens
ctgtaatcccaacagtttgggaggccaaggcaggaggaacacttgagattaggagttcgagactagcctgagaaacataacaagactgtctctctacaaaacataaaaaaaattagctgagcatggtgacatgcgcctgtagtcctagctacttggaaggctgaggcaggaggactgcttgagcctaggaagtcgagatggcagtgagcggtgattgcaccactgcactccagcctgggttgcagagtgacaccctgcctcaaaaatgaataagaattaaagagatgaggccggatgcctcggtatttttggcgctgcgatcgcgacactgcactccagcttggggtgacaagactgtgtcaa

SEQ ID NO: 9159 - DNA, 1258 bp, Homo sapiens
gaagactcatgtacatatttagcaaattttggtttcttacatgtgcctgtcatgactgtaattcattatgactgctccaggaagggctaatggggccaatatattattgcctgtcatgtggcacatccatgttaaggggctgaggcgtccctggcacggaatgcagagccctgagctagggcatcagcagaagctgagatagagatattggtcatggttgactgaggagccaattaaaacctgtttatgcctagtgttccattattggaacactaagcatgtgggagttatttatatcctactgctcaaggtcatcgccaaggtgtgattggaaaaattcaaaaaattgcaacctcaggcataaatgggttaaggacatcccaagcccaagtggtacgtgcctcactcagaactgacgggccgagttctatctaggtgtgtcttccagaacctgtttacggctaactggataactgagagacttgtcatttctaaagacatttaagttgctccagggatttctgaaaaaagacacaggcttcttcctagagccagccctatataacatgcccacaagggcaacagttatcacagttcatacacacctttcatgtcctgtctcactcactcctcacagccatcctaggagatacatattgttttcatcctgcatttacagaaaaagaaatgaaaacagagagcttaaataatttgccacagtaatgtcgaaactaggcctttgaaccaaggcagtctagggtaaaatatagtttcaaagtatgaataagaattggtatttgtgttatctttgagtaagaaactgtccgatatgaatcacaacgtgggtgaatgtagtattttcctgaagtgtgaaagacttaaaaaaaagaatcacattgttcagaggtgctcaatggaaagaaaaggaaatgaacaagtttgttaaaagataaaaaataaaaaaaattccataccttgataatccttgaaatatcttttgcagaaatacaaatcaactgaaagacatgaaggtagattaggtcctacaggccagtgtgggacagggttgtgtaggtgtgcatttcaaacacatttattattcagaagtggtgcagataacgcttagattacaccgaagaatttagggagggtgggggatgaaggtctgttagtaaccagaaacacattagttgggcatcagtaaggggcaacataaaggaatggttcccctcaaaaacgaacaaaccaaattttatac

SEQ ID NO: 9160 - DNA, 960 bp, Homo sapiens
tctaaggccaaccggcgtatgaaggagaaacacctatgtctgggggcaggaatctgaggccaatttgtgctgacttctcaaagctggagcaaacggaaaatctcttatttgtttgtgacgggccgagttctatctaggtgtgtcttccagaacctgtttacggctaactggataactgagagacttgtcatttctaaagacatttaagttgctccagggatttctgaaaaaagacacaggcttcttcctagagccagccctatataacatgcccacaagggcaacagttatcacagttcatacacacctttcatgtcctgtctcactcactcctcacagccatcctaggagatacatattgttttcatcctgcatttacagaaaaagaaatgaaaacagagagcttaaataatttgccacagtaatgtcgaaactaggcctttgaaccaaggcagtctagggtaaaatatagtttcaaagtatgaataagaattggtatttgtgttatctttgagtaagaaactgtccgatatgaatcacaacgtgggtgaatgtagtattttcctgaagtgtgaaagacttaaaaaaaagaatcacattgttcagaggtgctcaatggaaagaaaaggaaatgaacaagtttgttaaaagataaaaaataaaaaaaattccataccttgataatccttgaaatatcttttgcagaaatacaaatcaactgaaagacatgaaggtagattaggtcctacaggccagtgtgggacagggttgtgtaggtgtgcatttcaaacacatttattattcagaagtggtgcagataacgcttagattacaccgaagaatttagggagggtgggggatgaaggtctgttagtaaccagaaacacattagttgggcatcagtaaggggcaacataaaggaatggttcccctcaaaaacgaacaaaccaaattttatac

SEQ ID NO: 9161 - DNA, 416 bp, Homo sapiens
gtaagtcctctaaatataaactttcagagttaacaacactttctaaggctgaagataaaaattctagaagtttctctttgttctgccaaattcaacaatggataattactcaaagctaacagacacttttgaagaagtcttaaaatacaactattctatacaatatactgccagcaagaaaattatcagcctgtaaagaggttcaggataaccaagtaaaggagactatacagtaagtgtttttccattccaaaaggatgttagaatgagacatctccatcctagaaaaccctatggaacggaaacctcattttcttactaatctcctgctgctttgaaattggaagcaatttccttttaaaataatattagtttgctgacatctttctattccattttcatactgatttcaattt

SEQ ID NO: 9162 - DNA, 423 bp, Homo sapiens
ttctttaagatccgaacacaagcagaatctttgatgtcccccatttcaatctaaaacccaaatatttgtaagtacgcagaacaaacctactcactcagagattctaaataaaaattcaggtgtctgtttgagactggaaatgagaatttaaaggcttctcactggttctaacgcacctactcagtcttatgttacaggtcctagacccaacccatggatcgcctggcaggactctggaaggagccataggttaggcaaatttccatgaagcaaaagtaaagcaagctgtgttctggcatctcagaaggtgtgaatccttgatccttctctaagggaaatacgaatgtagcctcataaaaatctagaaattcatgtttgaaatgagaactacaaaaactgaagaaacagaaaggcaaaaaaaaa

SEQ ID NO: 9163 - DNA, 684 bp, Homo sapiens
actaacacattgatcattcttgaatcaccttcacaattttaggtgcaactgtgggccatttatactgtttacatttaatatttctagtagacttacatttttatttaaaaggccatatgtttaaaaataaagctttgtatattactgtaatttggaactagcgtcatttattatgcatagaagataattgaaaaaatatacaataaacaaggcaaaatagattcaagtttagctagataaccatgaccttccaaagactctgagcctgaggtctgttctctgtttaaaatggcatttagcaaataatatagacatatgaaagaccacaattaagtctttcttcttaaggtaataagcaattactgaaagggatttggaaaggaaataagcttctccttatttaattcaacattttaaaattcaataagccacatcagctatgccaaacaccatctttgtacaacctcaaaccatctaatataccaacctgaaccactgatacttccaccataggaagagggacatttgttcttgcagaagttcttctgttctcaatcccttagttgcaggtaaacacactgaacttggattgggtgatgctaatccctaagcagaaagtatgttggtactctgttttcccacactgtaattattaagttcttacctggtagctgcacagatgca

SEQ ID NO: 9164 - DNA, 291 bp, Homo sapiens
atgatattcacaaactgatgcttgtttatggggcacatttagttgtaacactaaagaggaaagaaagaaaacggtttccacaagttaggatagtggctacttctgggggagggaaggagatggaatagggggacacacaggggctgctgggagggggctgaatactattctagacctggtggtggttatatgggtgttcaatttataatgacaattgaatgacacatatatgttttctttactcctctgcatgtatgacgtagctcacaaataaaatagcaacaagaacta

SEQ ID NO: 9165 - DNA, 419 bp, Homo sapiens
taatttcccgtgcacgcttgtacaaggctgtatgtgcagcggtggttgttgcagcattgttttgatgacaaaagaatagaaacaacctaaactttaccagtaaggtaccggtttttaaaatatggaaaatacattggagtatacaattaaaaaataatgatttggccgggtttgatggctcacacctataatcccagcactttgggaggccgaggtgggcggatcacctgaggttgggagttcgagaccagcctgaccaacatgaagaaaccccgtctctactaaaaatacaaaattagccggatgtggtggtgcgtgcctgtaatcccagctacttgggaggctgaggcaggagaatcgcttgaatccaggaggcagaggttgcagtgagccgagatcgtgccattgcactccagcct

SEQ ID NO: 9166 - DNA, 378 bp, Homo sapiens
acttataagctcaaaagtctaccagaagggaagaaaattggagaagtggacaggcagttatatgaaacggacaagagacaaatggcaaaaagcaatcaaggaagaagacagccggtcacttctatgtggaggcttctacctctgcagccatgggttcaagccccgcctgagggaaagtgggcactctgcattcactgagtcgctgcagtgttgctgggcagcaactcagtatactacgtatattaaaaaacaaaaccttacaaaagtttatgtacccattggtatcaattctacttctaggaatttatcctaagtaaacaaaagtcctaaagttttatatataagtatgttgattgcactattgcttacaatagatat

SEQ ID NO: 9167 - DNA, 556 bp, Homo sapiens
ttttgaaacagagtctcgctctgtcgcccaggctggagacaaggagactgcataaaattacttcaaaggctcttttcagctccaagagtttttattctaaataaaaacaaaacaaacaaaaaccactaataaataactaagaagtccctcttctatttttttaaatatccaaccaggcagtacaacttagtagctaaaagtacgggtttgatactactttctcttgagtaaatctggacaaattacttaactctacttgcctctgtttagaataagagtacctattttgtaagattactgtgaagattaaatgatacttcatttaatctttaacgatacttaacgatactttgttaagtatttaaaaccagtgtctgacacatgaatgtgtttaaaactagcagcttaacaaggaaagaaaaaggaaaggtggagatgggagaaaggcaaggaatgaaacctaaatgtgcggcttgttttcattatgtgtacccaagcctcaaccaaagcattgctggctgttgctggccagaggctgggttcccttggcaaccag

SEQ ID NO: 9168 - DNA, 825 bp, Homo sapiens
catggtggcatgtgcctgtagtcccagctactcggagaagggagaagctgagggggaggatcgcttgtgccagggaggttgaggctgcagtgagctgtaatccaacactgcactccagcctgtgtgacagagcaagaccctatctcaaaaaattatgattatatttctaccaatgagagcttttcaacaacgatgtcctaagaactgatgagctcccctattaatggaggtattcaaagagaacttgaaagatcatttgtcaggagaatgatagaaaacattcctgtaattggatggcaggctggagacaaggagactgcataaaattacttcaaaggctcttttcagctccaagagtttttattctaaataaaaacaaaacaaacaaaaaccactaataaataactaagaagtccctcttctatttttttaaatatccaaccaggcagtacaacttagtagctaaaagtacgggtttgatactactttctcttgagtaaatctggacaaattacttaactctacttgcctctgtttagaataagagtacctattttgtaagattactgtgaagattaaatgatacttcatttaatctttaacgatacttaacgatactttgttaagtatttaaaaccagtgtctgacacatgaatgtgtttaaaactagcagcttaacaaggaaagaaaaaggaaaggtggagatgggagaaaggcaaggaatgaaacctaaatgtgcggcttgttttcattatgtgtacccaagcctcaaccaaagcattgctggctgttgctggccagaggctgggttcccttggcaaccag

SEQ ID NO: 9169 - DNA, 494 bp, Homo sapiens
atattaatcaatcacagcacctctgagcccagagatgtcctcggaatctttcacacactgctcctgacagccaaacctacccgtcagtgggagctgaagtttgcaatttctgtactaacctgtatggcctttctaaaatggagacattaccaaggaatcaatctattaacagctgaaaacaaaccttgtgtgagctccagtcttatctgcctaggagggaagagcgtggtagattgcaggctgtgtgaagcacagcactcccatggcgacctcacggatcataactagagtctacactcagcacacaggcaacacagggccgttacccttgaaaagtgtaaaaatctagacgaagttaatgaggagactttttttttaagctgctatattttgtctaattcatatatgctacattttattctaaaaatagttattctactctttggcactaagtttggtgatggatataaaatagtgatcaataaacagttgtt

SEQ ID NO: 9170 - DNA, 675 bp, Homo sapiens
ctcactgaatctgccttagtgagaatgtcattaccttattgcttatattaatgcagatgtctttctctgccctccttgtttccagattgtaccatcataatcaacccttcatagggcttcctatcagagcagaggttctaatgactctctattccctgcaggatgaagtgcaaactctttagtatggcctgtgttttccatgactcgcccctgcctacatccatggcttcatctactacctttcccctcacaatggtctctccttagtagatagtgaaatattagtgtactattctttttacatgaaaatgacatagtgaaagagaaggactagtttagcctgtctttgcaggaaagattgaagaataaaataatgacatactttgaagttaacagacatggatttgaaccctagatttgccatgaaatgtctgaatgcctttggtcaatttacataatggcagaaagccttacaaattcctagtgaagattaaactcaataacgcgggcaaagtgcttaacaaaattgctggaacatagtacacctctacatgctcaataaatgggagttaattaccttttttacctccccttcccttcccaaatagtatgcattaccttttaaattttaaattgagaagtttacagttgaattaaaaaatgcaatgaatcaca

SEQ ID NO: 9171 - DNA, 371 bp, Homo sapiens
tcattctcctgcctcagcctcctgagtagctgggactacaggcgcccaccaccacacctggctagttttttctatttttggtagagatggggtttcaccgtgttagccagggtggtctcgatctcctgacctcatgatctgcccaccttggcctcccaaagtgctaggattacaggagtgagccaccgcgcccggcccagctaaactagaatttttaaaaagtcactgtatttcttgcaaggtaagggttaagtggcatgttttttgtttgtttgtttgtttttttgttgtttgtttgtttttttgagacggagtttcactcttgtcgcccaggctggagtgcaatggcatgatcttggctcactgcaacc

SEQ ID NO: 9172 - DNA, 344 bp, Homo sapiens
aaatgtctgcattaaaggaagcaactaggaaaatcaacgcccaggagagctggggctgttgaaaactgcaggaggtatttctgctgaaagtagggccgaccctattcagccagctcttgtcattccagttgaagagaggccatttgacattctagaggtggcagcatgcaaacatttaaaaccgttgagagaatacagcacaccagggagactattattatgactatcaggaggataataccaagagttgagagtaagtatgctccttatccagggtcaccataaaccaaacctcctaaactcaaatagattaaacaatgagctaaagagtctactcacttaac

SEQ ID NO: 9173 - DNA, 462 bp, Homo sapiens
gcaaaaataattcacttctaggatggtaactgcaaggaaatctgggaaatatagtttttaactttccaaatttatagtacaaggaggcaaacttgaaagaaattggaattgatctgagtaccaatctaccttacctacccaaaatttcacctccataaacatagtgcatctattttttcaaatcttttatgtattttagcagtgttttaaaaaccttctgaaggtcatgtgcattctttaatagatggattcccggatgttatagtttttattcttaatctctttcctattttagtcattgcaaatgtcttctcctggtgtgttaaatccatcatactcttgttaaatagaaacataaatttttgaccctgagttgatctagttgtcgatttacagaatatacaaaagacaaaattcagattataggaaatgagaggacaaataaactccaagggaacgaaa

SEQ ID NO: 9174 - DNA, 331 bp, Homo sapiens
ttatcacctcacctgtgagctgtgaccatgtatatgtcacaatttcacctgtgggcaggaaccagacatgagagtcctatcacctgggtgctggccaatagatgaaaaaagattcaaggaagacacatttgctttttattcactcatcacttcccatcactatgctgaccagagtcaatgtgagcagagttgagaatagcagttttctggcaggagagccacttctcagcgaaaaatgacacactcaaagtataaatctttcatggaaggctcacatattttcagcaaattaagcatatgcatgaataaaattcttgtggtgaaataaaga

SEQ ID NO: 9175 - DNA, 291 bp, Homo sapiens
acccctggctgagtattcaggtgatgtgactctcctgcctggttctgcccacagccaatagatgaaaaaagattcaaggaagacacatttgctttttattcactcatcacttcccatcactatgctgaccagagtcaatgtgagcagagttgagaatagcagttttctggcaggagagccacttctcagcgaaaaatgacacactcaaagtataaatctttcatggaaggctcacatattttcagcaaattaagcatatgcatgaataaaattcttgtggtgaaataaaga

SEQ ID NO: 9176 - DNA, 397 bp, Homo sapiens
tcagttctccaacttggctacacattgtgaccacccagagagatttagaaagtactaatgtctgggttccacccacagagatccttacttaactggtctggggtatggctcaggcaatagaattttggaaagctccccaagtgattctactatgcagccaaggtggagagtcactgtcctgaagtcatcagaggttgccacctactcctcccacaaaggtggctcctcttgtcaccttgcaccacttgcaagcaattagggatgtacatttacatgattttaaaagtcttatgatgtccgattaaaactaacaaaacttgaatttcttgtatcagttatcattcactcttctcaacaaccgtgtgaaagtaagtttattgttcccatatgacacacg

SEQ ID NO: 9177 - DNA, 619 bp, Homo sapiens
gtgtttcaatgcctctgggttggtttagatgtcggagtaatatgtgttccaatcactagacatatggaaacatggtgacaggtatctctctgtagtggggaatattttgggagctcacaaagcactctcccactagcaatggagagacttacactggtttgatgaggacaagactaaaaagcacctgtgtggagcagaagaaaaaattttttaaatacctaaacaattagctaaccagaccctaggaagaattgatgcctataatttctcagatagaaacccattactgctatgtggttaaagcaaaacgaaaatcccattactgctcattgggttaaagtagagaggagcttaagaaaacatacaactgtcaatcagaaaacctagaatgtgacattgtttttgccactgtttctctccccttggtttatcaacttctcttggccttcattttcttatccatgaaatcaaaggtcatgattatagtgtattatatacactaatacactaacataatatatactatatatagatactaaataatttctattattgtactcacttctaataatattacattataaatataaattatatgtgtatttaaaaactcatttag

SEQ ID NO: 9178 - DNA, 473 bp, Homo sapiens
atgagtctcctcttttctattttgattcccgtcagtcttttctccctttctgctagaacaatctttctgaaaggcaaatcctttcatgccgctcttctgtgtaaagccctgtcatgcttcccattgccagcagcaaacagtgaacctcctttggtgtgatttctgaggaggtcattcatgatctggcctctgccgctctccccagctctggttccctcctcttttcctgcacttgctctttcctgcacactccaagctgcatctctctctccactcttctggccaactcctactcagccttcaggtcaaatacctgacttgctctaggaaacctttcccaatcccataagactggatcaggtgttccttttctgtttttcctgggtttatcccaatcaaagcactttatccctgttttgtaattgcctgcttacttttttgtctcctccattaaactttgatatctttgaaga

SEQ ID NO: 9179 - DNA, 506 bp, Homo sapiens
cattgcatgctgcaaagaaatctttagtgaaggaaagactcaatcaatgagacaaacttcattgttgtcctcctttaagaaattgccacagccactccagccttcagcagtcaccacctggatcagtccacagccatcaacattgaggcaggacccgccaccagcaaaaagattacaactccctgaaagctcacatgatcattagcattttttagcaatgaaatattttaaagttaaggtatgtacactgttttttagaataatactgcatacttaatagactatagtataatataaacataacatttatatgtactgggaaaccagaaactttgtgtgactcactttattgtgatattagctttattgtggtggtctggaacagaacctacaatagctccaaggtatgcctgtaaattaaaatgataggatactgtttctcacattagagtaggaaaattgaaaaagcctgaccaatatggtgtaatcccatctctgctgggaaa

SEQ ID NO: 9180 - DNA, 409 bp, Homo sapiens
ttcctttatcttaagttttataaacattcagatttgcctctgtgctttcattcttttttaacagctttatgagataaaattcgcataccataagattcacccatttaaagtatacaacagtaaggggagccaggcatggtggctcatgcctgtgaatcccagcactttgggaggctgagggtggatcacttgagttcaggagttcaagaccagtctggccaacatggtgaaaccctgtctctaccaaaaatacaaaaactagccaggtgtggtggcacacgcctatagtcccagctactcaggaggctgagtcatgagaatcgtttgaacccgggaggtggaggttgtagtgagccagatctcaccactgcactccagcctgggtgacagagccagactccatctcaaa

SEQ ID NO: 9181 - DNA, 331 bp, Homo sapiens
aagcaggcctaacagcatccagaagccctcctcgtgtttccttccagttactacccctctctcccaagggtgactgctatcccaacttccagcagcatagcctgttttttgtcatttggcatatataaatgaaaaatattatatatactatatatatagtatatatgtataaataaatagtttatatatgtctagatatctcatagtgtatatactgtatatattacatattgtatacactatatgacatgtactatatatctataataatgtagatagtatatatctatatatactagtatactatatacaataaatggaataatgcaga

SEQ ID NO: 9182 - DNA, 337 bp, Homo sapiens
ggatgagcagagattgctagtaatctaggaatgggcaacctagatggctcacaagcgccaggaagaggctctgctaggctagtcatgtgtagttccttctttcagtctcaacaacccgatctagtcagtgcaacataggccatcttgacgcttaatatttttcagatagttttcttatttaccaggaaaacaaattgtcatatttgttcatgtttgtgttctttgatttatcatcatttaaaatatgatattcacttggataaaagaatcagctacaaatacatttttcttacctttctgaaaccaagttggttgctaagatatgaatgagacctgt

SEQ ID NO: 9183 - DNA, 1023 bp, Homo sapiens
aaaaatattggggattgggttattgattaaatgattgacattggcgtgtgccatagaaaatggatcaatacaatatttacctgttttttaaggatcctttgtagtataggtaaacaaactattgtttataaactgtcaataagtgtagaaggtttctcgatgctttaaggttgagtttagcaacagtatgatacatagttgttagtttttgtttagtgatacaaggcagttcctcattttgacagttgccttttcttttttccctaaatcactagctctcaagcttttaaatctcccaaaatgtcccaaatcctgggccacacctttgccacacttctcaaatgagaatctctgggagggccccaggtactgcggtggcactgacagcattgtactgggggctgctggttccctgtcagatgttttaagtcagattggctagcatagtcacagctgctgacggtgtctttattcatggatgctcagtacagcagttgctagtttcaaatagacaacttccaggaggcattaaaaaaaaattatatgactagaaacaggagggaaggcatgcagatagatttgtcttcccatgggaagtaggccatataagttaaatctctctctgtatcatatccttttttactatcttcagagtctttttcactacctgaaattctcttatttgctttgttttgtctccctgcactaaaacaagctgttagagcaggagccccgttcatgccccgtgctgtatccctagtgtctttagcacaacacctgaaccaggaaaggtgctcagaacatacttcatgcatgagtgctaaataagcctctcttctcctctctcctcacctcaggtgatccacccacctctgcctcccaaagtgctgggattacagacgtgagccactgcgcctggctcctgctagatttttggtacaaatgtaataatgtatgtccattcatgataattgggaaaatgcaaaaaaaatagaaatagaaaaagaagaaaaaaatccttca

SEQ ID NO: 9184 - DNA, 421 bp, Homo sapiens
gtctccctgcactaaaacaagctgttagagcaggagccccgttcatgccccgtgctgtatccctagtgtctttagcacaacacctgaaccaggaaaggtgctcagaacatacttcatgcatgagtgctaaataagcctctcttctcctctctcctcacctgaggtcaggagttcgagactagccttgccaacgcagtgaaaccccatctctattaaaaatacacacacacacacacacacacacacacgcgcgcgcgcgcgcgcgcaaaatagccaggtgtagtggtgcatgcctgtagtcccagctacctgggaggctgaggcaggagaatcactttaacccaggaagtggaggttgcagtgagccgagatcgtgccattagactccagcctgggtgacaagagtgaaactccctctcag

SEQ ID NO: 9185 - DNA, 491 bp, Homo sapiens
taaaaattcttctagtgacttttccttaatctacaaagaactcctagaatctatgagaaaacaaaagaatatctcagcagaaaaatggctaaataaaatacagactggctgataagcctaaagagatctttgactttattagtaatcaaagaattgcaaataaaattataatagtattttattttttcactgataagatttgtcaaaattatggaaattgttaaaacacagttttagcaaatatgtggtaaacacacctgtgtactttcggtaggaatagaaattgagtctgggcaatatagtgagaccttgtctctactacaaagaaaaaaattagccaagcatagtggtgcacacctgtagtcccggctactctggagactgagcggggagggttgcttgagtccagatcggggttacagtgagatatgattgtgccaccacactccatcctgggtatctgagtgaggctttgtctcaaaaaaaaaaaa

SEQ ID NO: 9186 - DNA, 675 bp, Homo sapiens
gtttaaatggtgtgggtgattccacccactggtggatgtgagaaccatatgctcagaagtgggtgggatgggagggaggtgtgtacctcctggagggtcggtcactctggttcctgttggctgttcatggcgtgagcatcctgctgtgctgagggtgaggcacatgtttaaatgtgtatttatgcaaagtggtccctaaacagaagccccctacttcctctggtgcctgatggaggaggcagctttctgttccggcccaggaggaaactctccctggatggtgatggggaaacagtacatcaggttccaggcagagccttccttaggagttgccaagggtgtttttgactcattgggtgccataagcattgactgtagaacctaaattccaagaaaggtatgactctgctacttccaaaggccaggagtgggaaaaggcacattccttccttatatcctggaagcacccagatattcttcatgtcccatgggcttagtgtggaggaaaaaaatctatgatcctttgagcattatttagtgctcagttaatacatttattaaatgaatagtttattaaaagtaaacatttttctaaatatatacgaactactttcacaactaaaaaatgaaaaaataaagggaaaaatgaaaataaaatgaaatttaatgcttttt

SEQ ID NO: 9187 - DNA, 1217 bp, Homo sapiens
gtttaaatggtgtgggtgattccacccactggtggatgtgagaaccatatgctcagaagtgggtgggatgggagggaggtgtgtacctcctggagggtcggtcactctggttcctgttggctgttcatggcgtgagcatcctgctgtgctgagggtgaggcacatgtttaaatgtgtatttatgcaaagtggtccctaaacagaagccccctacttcctctggtgcctgatggaggaggcagctttctgttccggcccaggaggaaactctccctggatggtgatggggaaacagtacatcaggttccaggcagagccttccttaggagttgccaagggtgtttttgactcattgggtgccataagcattgactgtagaacctaaattccaagaaaggtatgactctgctacttccatcagcaacgggtacttgtcatcacctggagcgtgaagggccacatgtattgtttggaaggccatctggagcctacattctagtaggagagggaagaaacagatgtagccaaccacagtatgaggtggaaacataaaattacaaagggaaaagaagagaatgacttacagttagatcactggtccttagcctggttgctcattggattcacctggggagtttttagtcgtctcatgccagccccgttgcacccaggaccagtcaaatcagaatctgtgagggcatagtcagggagcatgagtaggagattccagtgtgcagccaaagttgagagctagggaacagatgggggtggggtggagaggcaggccaacaagttgcaagtaattcaaatctccattggaaggggcttctcacagagcaaggcggcagctccagggctctctagtcctttccctcagctatcctctgccactgccatgcagatggcaagatggccaaggcagcccctgccccagcatcccatgctcaggacagtacccaaaggccaggagtgggaaaaggcacattccttccttatatcctggaagcacccagatattcttcatgtcccatgggcttagtgtggaggaaaaaaatctatgatcctttgagcattatttagtgctcagttaatacatttattaaatgaatagtttattaaaagtaaacatttttctaaatatatacgaactactttcacaactaaaaaatgaaaaaataaagggaaaaatgaaaataaaatgaaatttaatgcttttt

SEQ ID NO: 9188 - DNA, 301 bp, Homo sapiens
aattatcattacattatatactctcatagtcaagctacttcttattttttatttttatctcataaaatatcaacaccttgaaatcaagaactgtacttcatatctcttagagtagtaagagagtattaagctcttagagtagatcttaataactatttagctgactgaatcaacctgagtcatattaaattgaattccctctgccatctggtggcatttggctctttggcagagaagactagtctagaagttgtaatcactgaagacaattaagttggtaaacttaatatatatgcatctt

SEQ ID NO: 9189 - DNA, 395 bp, Homo sapiens
tttttttgagacggagtttcgctcatgttgcccaggctggagcgcaatggtgcaatctctgctcaccacaacctccacctcccagattcaagcgattctcctgcctcagcctcccgaatagctaggattacaggcatgcgccaccatgcccggctaattttgtaattttagtagagatggggtttctccacatttatcaggctggtattgaacttccgacctcaggtgatccgcccgccttggcctcccaaagtgctgggattacaggcgtgagccaccgcgcccagctgatgttgtacttttaataggatggtcagggtatacctcactgagaggatgacaatttcaggagaattctaaggagtcaaaggagtgagccatatgtatatgtggag

SEQ ID NO: 9190 - DNA, 988 bp, Homo sapiens
tttttttttgttctgagccaccaacgtaatttatgtctaagaagatactctagagatatggcggcaataataaaatcaaaatttttcttataggccaggcagggtggcttatgcctataatcccagcactttgggaggccgaggtgggcagattacttgagcccaggagttcaagtgctcctgagcaaggagttcaagtgcagcctaagcgacatggtgaaaccccatcactaaaaaaaataaaaaatttttctaatcaactccacaaccttttacatattaaacatacaatgctcaaaaaagattcttcaagtttgtttagatgtctaacttaaaattttctagtaaatgtaagggctagtactgttcctgtacccctaaaggtaatttacctacattcccacaggaaccactgaaagaaccccaacttggagtactgcaacccaaatgttccaagaacatccataattaaatcttcccaagacacatataccttaaacaccttctcatggaatgtcatgaaattcttgaacccactttccaccccctaagccctatctctgtcccatcttcctccttttattaagttcccggaaaaaaacagcaatggagggaccacagggaccaccacacacacctgattaagggaaacttcccttaggctgccatgccccattctgcataagtagagaatgaatctatgttgacagagggaagagaacctaactaaaaaggggaaaggtcaaagaagggagaaaggaattactttagttgatagagaaagtgaaaaatcaaatttatcaggtgcaggttcctatgggccatcatctgagaatataatcatgtctgaaaatttgtccggaacatggcaataagcaaagattgctgttattactgctacattaacaaaaaaaaggaaaataatgtaaataaaactatgtataagcatgtaacctgcattttttcgctgggttcacagtttcttgag

SEQ ID NO: 9191 - DNA, 465 bp, Homo sapiens
ggagagagccatcagtcattctcatctcttgaatttcatggcctcattgcttccttcccacctgtaatcacagctgtgcctgtgtgacaaacactagagtgctagtgatggtttatgggtttcaaggctacagtgttgcagactctgcctggctcccttggattacctagactgggggaagccttaagccctctcatgacgacatggaagtagccctgtggacagctacacatggaaaaactgaggttctcagtcaacaactggtatcaacttgccagccatgtgaatgagccactttgaaagtatagctcccagctcagccaggccttcagatgactgcagcccccacatctggcatcaatcacctaagccttcgagtgggaaatgtacagccaagcccttctagaaaccctgatctgcagaatctatgatcacaataaattactgctttatgacatgaaaaaa

SEQ ID NO: 9192 - DNA, 1277 bp, Homo sapiens
  misc_feature (936)..(936): n is a, c, g, or t
actaagtgagcatttgttcctgactctcaaagaggatggtttggagttctcttacgtttcctggtatttcccaagtctcttgggttggttggaaggctgtggctggtctcagtttggttactcaatgcccaggaggggctgagcaccagccatatcttttgctttggttcacatgatgatacctgcttttctcaggcctgctagaggcatccaacgccctggtttgtaaatagcaacctaaaggcgtattttggcactggtctggggacattccccatctctcatcccttttcccccttcacagatggtggtgggcttcgctctacaaagaggactctgatgttactcttgagcttatgagccagagagctgaaaaccgcaggcttgttgtgttaagttacaaggaaaatggatttggtaattaaaattagaagaaacacaccttcaaacttcaacttctttaaaagaaaaaaaaaactgtcctatcttgttctgtaaaatattagaacgctttgttttacaaaaaatgatgagagaattcttccacatgtacttctgtgcttagaacatttttacggacctaagcgctggagacgttgctgcatgtcggctgggtttttttttcatacacccgagcacggaaaaactaacgcaaaattgtattttcttacctagtggaaatctgaaatgactgcaaattcctagtgaatgtacaggtttgctttcgtgtccctcttctggttgctttagaagtgacgtgtaatttctgaacccatgtttcatctgtataaaagaacatctgcaccagtttttctcctgcccctcagaagagccaaactttgagttttatgtctgtttgtcattgataaatttcaataaatctttttatacaatttttttggggatggcttctttgagtccaacaggccattgatnttttcaagatgcattccagatgaactgctaggtgagggggaagcttcatttttgttacctgatagaatagcttttcttatgagatatatataatgtgatactatgttggatattttggtcttaaagcaagactcagtggtgtatcttcattaaaagcttcctttaaaaaagttacagagttactaaaaaaacaagtacccaaacaatcaagttgggccaaccttggaaccttgttttgaatatctttcattgttttgttgtcgtatcgtaaaaagaatgtatggttgaaaactcaggaatgttttataaaacaaattatttcacaaaaaaaatccaaaaaa

SEQ ID NO: 9193 - DNA, 482 bp, Homo sapiens
tgagacttaaagggatgcatgtgtccctatacagtggcaaaaactggtatgacagaagtgatgttttaagctatgttatcctttagttggacatacactggacccacagagctagagtacctggcaggctcttgctggacaatgtttgctgaatcagagaaagtgggctttgttggcatttgcatgtgaaatactgtgcacatacctcaagatctttgctgttccccccctaaagctactagctatgctggaaacagtgaaggggtcagccagacctggggtcaccttgtcctggggtcccaagccaggcctcctgtcaggttcatctgtctctgttccacctgcactcacacccagtcttgctgctgagagatggagcatccacatcctgaatcctgcctccttcccttgacacacttctatggtgggtgcctgcccaactttttcttaataggactaaattccaaattaaaaaaaaaatt

SEQ ID NO: 9194 - DNA, 349 bp, Homo sapiens
ctctgggtggttctggcagtcacctgttctcatatgtctactggggccaagcccaggcttggctgtgagtgctcaggtgctgtggggggttcctctcagtggtgttgtatttccctctgagtcaggacccaacccaagccccttaattaggtgactgtgaagagctgccatcatgttcttctcgcaagagagctgtgcttcaggtatgaagtatttcagtgacgggtgaagtcagttttcttctgcccagctcttcttccttttttcttttccccgtgggagagcatcttaaccttggagctgaagatcaaaagcacagcgcaatgaacatatgtcctatcactacaat

SEQ ID NO: 9195 - DNA, 862 bp, Homo sapiens
cgggtgtgctgagctagcactcagtgggggcggctactgctcatgtgattgtggagtagacagttggaagaagtacccagtccatttggagagttaaaactgtgcctaacagaggtgtcctctgacttttcttctgcaagctccatgttttcacatcttccctttgactgtgtcctgctgctgctgctgctactacttacaaggtcctcagaagtggaatacagagcggaggtcggtcagaatgcctatctgccctgcttctacaccccagccgccccagggaacctcgtgcccgtctgctggggcaaaggagcctgtcctgtgtttgaatgtggcaacgtggtgctcaggactgatgaaagggatgtgaattattggacatccagatactggctaaatggggatttccgcaaaggagatgtgtccctgaccatagagaatgtgactctagcagacagtgggatctactgctgccggatccaaatcccaggcataatgaatgatgaaaaatttaacctgaagttggtcatcaaaccaggtgagtggacatttgcatgccatctttatgaataagatttatctgtggatcatattaaaggtactgattgttctcatctctgacttccctaattatagccctggaggagggccactaagacctaaagtttaacaggccccattggtgatgctcagtgatatttaacaccttctctctgttttaaaactcatgggtgtgcctgggcgtggtggctcacacctctaatcccagcactttgggaggctgaggccggtggatcatgaggtcaggaattcgagaccagcctggccaacatagtaaaaccttgtctccactaaaaataca

SEQ ID NO: 9196 - DNA, 1930 bp, Homo sapiens
cgggtgtgctgagctagcactcagtgggggcggctactgctcatgtgattgtggagtagacagttggaagaagtacccagtccatttggagagttaaaactgtgcctaacagaggtgtcctctgacttttcttctgcaagctccatgttttcacatcttccctttgactgtgtcctgctgctgctgctgctactacttacaaggtcctcagaagtggaatacagagcggaggtcggtcagaatgcctatctgccctgcttctacaccccagccgccccagggaacctcgtgcccgtctgctggggcaaaggagcctgtcctgtgtttgaatgtggcaacgtggtgctcaggactgatgaaagggatgtgaattattggacatccagatactggctaaatggggatttccgcaaaggagatgtgtccctgaccatagagaatgtgactctagcagacagtgggatctactgctgccggatccaaatcccaggcataatgaatgatgaaaaatttaacctgaagttggtcatcaaaccagccaaggtcacccctgcaccgactctgcagagagacttcactgcagcctttccaaggatgcttaccaccaggggacatggcccagcagagacacagacactggggagcctccctgatataaatctaacacaaatatccacattggccaatgagttacgggactctagattggccaatgacttacgggactctggagcaaccatcagaataggcatctacatcggagcagggatctgtgctgggctggctctggctcttatcttcggcgctttaattttcaaatggtattctcatagcaaagagaagatacagaatttaagcctcatctctttggccaacctccctccctcaggattggcaaatgcagtagcagagggaattcgctcagaagaaaacatctataccattgaagagaacgtatatgaagtggaggagcccaatgagtattattgctatgtcagcagcaggcagcaaccctcacaacctttgggttgtcgctttgcaatgccatagatccaaccaccttatttttgagcttggtgttttgtctttttcagaaactatgagctgtgtcacctgactggttttggaggttctgtccactgctatggagcagagttttcccattttcagaagataatgactcacatgggaattgaactgggacctgcactgaacttaaacaggcatgtcattgcctctgtatttaagccaacagagttacccaacccagagactgttaatcatggatgttagagctcaaacgggcttttatatacactaggaattcttgacgtggggtctctggagctccaggaaattcgggcacatcatatgtccatgaaacttcagataaactagggaaaactgggtgctgaggtgaaagcataacttttttggcacagaaagtctaaaggggccactgattttcaaagagatctgtgatccctttttgttttttgtttttgagatgtggcaggagctcccagggaaaaaggaagtgcatttgattggtgtgtattggccaagttttgcttgttgtgtgcttgaaagaaaatatctctgaccaacttctgtattcgtggaccaaactgaagctatatttttcacagaagaagaagcagtgacggggacacaaattctgttgcctggtggaaagaaggcaaaggccttcagcaatctatattaccagcgctggatcctttgacagagagtggtccctaaacttaaatttcaagacggtataggcttgatctgtcttgcttattgttgccccctgcgcctagcacaattctgacacacaattggaacttactaaaaatttttttttactggttaaaacaaccaaacacacaaaccaaaactaaactaaacacaaaaaaaaaaaacgaca

SEQ ID NO: 9197 - DNA, 2496 bp, Homo sapiens
gtttctgaaagtgaggttctgagaccagccacttcagcaacacttgagaacttgttagaaataaaagttctcaggctctaccacaggccaactgagtcaggaactctagcagttgagcccagcaatctgtgttttcgcaaggcttcccagtgattctgatggccttcacatctgagaagcattgtcacagcgaatcatcctccaaacaggactgcagcagtagcttcctctttattctgtaagacatggcttgcagttttcctgaaatggagtaacctcactcaccgcttgagtcttggctctccttctctctctatgcagggtcctcagaagtggaatacagagcggaggtcggtcagaatgcctatctgccctgcttctacaccccagccgccccagggaacctcgtgcccgtctgctggggcaaaggagcctgtcctgtgtttgaatgtggcaacgtggtgctcaggactgatgaaagggatgtgaattattggacatccagatactggctaaatggggatttccgcaaaggagatgtgtccctgaccatagagaatgtgactctagcagacagtgggatctactgctgccggatccaaatcccaggcataatgaatgatgaaaaatttaacctgaagttggtcatcaaaccagccaaggtcacccctgcaccgactctgcagagagacttcactgcagcctttccaaggatgcttaccaccaggggacatggcccagcagagacacagacactggggagcctccctgatataaatctaacacaaatatccacattggccaatgagttacgggactctagattggccaatgacttacgggactctggagcaaccatcagaataggcatctacatcggagcagggatctgtgctgggctggctctggctcttatcttcggcgctttaattttcaaatggtattctcatagcaaagagaagatacagaatttaagcctcatctctttggccaacctccctccctcaggattggcaaatgcagtagcagagggaattcgctcagaagaaaacatctataccattgaagagaacgtatatgaagtggaggagcccaatgagtattattgctatgtcagcagcaggcagcaaccctcacaacctttgggttgtcgctttgcaatgccatagatccaaccaccttatttttgagcttggtgttttgtctttttcagaaactatgagctgtgtcacctgactggttttggaggttctgtccactgctatggagcagagttttcccattttcagaagataatgactcacatgggaattgaactgggacctgcactgaacttaaacaggcatgtcattgcctctgtatttaagccaacagagttacccaacccagagactgttaatcatggatgttagagctcaaacgggcttttatatacactaggaattcttgacgtggggtctctggagctccaggaaattcgggcacatcatatgtccatgaaacttcagataaactagggaaaactgggtgctgaggtgaaagcataacttttttggcacagaaagtctaaaggggccactgattttcaaagagatctgtgatccctttttgttttttgtttttgagatggagtcttgctctgttgcccaggctggagtgcaatggcacaatctcggctcactgcaagctccgcctcctgggttcaagcgattctcctgcctcagcctcctgagtggctgggattacaggcatgcaccaccatgcccagctaatttgttgtatttttggtagagacagggtttcaccatgttggccagtgtggtctcaaactcctgacctcatgatttgcctgcctcggcctcccaaagcactgggattacaggcgtgagccaccacatccagccagtgatccttaaaagattaagagatgactggactaggtctaccttgatcttgaagattcccttggaatgttgagatttaggcttatttgagcactacctgcccaactgtcagtgccagtgcatagcccttcttttgtctcccttatgaagactgccctgcagggctgagatgtggcaggagctcccagggaaaaaggaagtgcatttgattggtgtgtattggccaagttttgcttgttgtgtgcttgaaagaaaatatctctgaccaacttctgtattcgtggaccaaactgaagctatatttttcacagaagaagaagcagtgacggggacacaaattctgttgcctggtggaaagaaggcaaaggccttcagcaatctatattaccagcgctggatcctttgacagagagtggtccctaaacttaaatttcaagacggtataggcttgatctgtcttgcttattgttgccccctgcgcctagcacaattctgacacacaattggaacttactaaaaatttttttttactggttaaaacaaccaaacacacaaaccaaaactaaactaaacacaaaaaaaaaaaacgaca

SEQ ID NO: 9198 - DNA, 1765 bp, Homo sapiens
agtgttattgtgtgttctcagtttaagatagcagatcatctcagcagtaagcacactgacagaattgagttccagaaaggaagcagtttcaggttcttagcacatgtccaaatccatgcaagtgggagaaagttccaatgcacactttccatgcttccgagtctaggtctcgtggtgaatattcagcaatcattcatgagaaagaatgtattttgttgtatgacagaagggtttaccaagcaaactgtggtaagcatagtatcgaatatgttgcatgtccattttagaaaacagagcccagtcatcagctaatacaaatgatttcccagagcagtgtttgtttcaagcttctgtcaaatagtttggcttttctgcagggtccctgtaacttccccacaaatgtacttctttgttaattcacttattgttatggtgtggctcaggaacaggtctcaggatggagagcagcatacaacctgaacaaagctttttcttgtgctctgaagggtcctgagacgtgagggggatgccttccatgaggatttttatctcagtgaagtgcgagtggtacccacctgtattgtcgttaacatgattattggcatgtttttgactctcatttttcacaagggtgcagtggggccatggaccatcccatgggatggtccataactgtatgttatatggaaatagtgtgggaataatgggttttccatgaaaggttgtgatgcttctggagatgggggcataaacgtgttcattcttgttgagcagcattgtgttaaaccaaattgtgtgaagtggaggtcacctggaccactcctgggaaatgctccagaacaccagtctgttccttctagaaatttgttctctgtatttatttttattttttattttgaggcagtgtctcacccatcctgtctcccaggctggagtgcagtggtgcgatctcggctcactgcaacctctgcctcctgggtttaagcaattctcctgcctctgcctcccaagtagctgagattacaggcacctgccaccacacctggctaattttcgtatttttagtagagaaggagtttcaccatgttggccaggctggtctcaaactcctgatctcagttgatccacctgccttggactcccaaagtgctgagattacaggtgtgagccactgtgcccagcctgttctctgtatcttaaatcaactctgtgccaaagcagttctgtcccctgactcccacccctacccaccaaaaagtggtagacatgaagggcaggtaagggaacagaaaatgtctccttgcagctatatatattttaaacgaactgtgtaataagtatgagctaaggagacagaaagacagtagatgagaaaagaagagtacctatacctacaaggggcaaaatgaatgcaatccttcatttgataagagagaactgaaagagaatattatttttctacaataaagcaagctgtcctctcaggataaagtggaatttcgacatggattatggacttcttccaactcccattgacattgcttcttaccacacatggggaagggctgcctttcctgaaaggggaagaaggcactgtcctttcagacaaagtttgtacaaattcctgaactgcagatttgctaatgtgaccgcgtatacttatattcataatttaagtgattgtttatggtcagatacatattgttaaacttgaaaatgttttattacattacatcaaataaagtctatttgtagctgaaaaaac

SEQ ID NO: 9199 - DNA, 4558 bp, Homo sapiens
  misc_feature (7)..(9): n is a, c, g, or t
ggcacgnnngccgcgtccggggccggctggtgcgcgagacgccgccgagagttgtgaagggcgcgggtggggggcgctgccggcctcgtgggtacgttcgtgccgcgtctgtcccagagctggggccgcaggagcggaggcaagaggggcactatggcagacaaagttaggaggcagaggccgaggaggcgagtctgttgggccttggtggctgtgctcttggcagacctgttggcactgagtgatacactggcagtgatgtctgtggacctgggcagtgagtccatgaaggtggccattgtcaaacctggagtgcccatggaaattgtcttgaataaggaatctcggaggaaaacaccggtgatcgtgaccctgaaagaaaatgaaagattctttggagacagtgcagcaagcatggcgattaagaatccaaaggctacgctacgttacttccagcacctcctggggaagcaggcagataacccccatgtagctctttaccaggcccgcttcccggagcacgagctgactttcgacccacagaggcagactgtgcactttcagatcagctcgcagctgcagttctcacctgaggaagtgttgggcatggttctcaattattctcgttctctagctgaagattttgcagagcagcccatcaaggatgcagtgatcaccgtgccagtcttcttcaaccaggccgagcgccgagctgtgctgcaggctgctcgtatggctggcctcaaagtgctgcagctcatcaatgacaacaccgccactgccctcagctatggtgtcttccgccggaaagatattaacaccactgcccagaatatcatgttctatgacatgggctcaggcagcaccgtatgcaccattgtgacctaccagatggtgaagactaaggaagctgggatgcagccacagctgcagatccggggagtaggatttgaccgtaccctggggggcctggagatggagctccggcttcgagaacgcctggctgggcttttcaatgagcagcgcaagggtcagagagcaaaggatgtgcgggagaacccgcgtgccatggccaagctgctgcgtgaggctaatcggctcaaaaccgtcctcagtgccaacgctgaccacatggcacagattgaaggcctgatggatgatgtggacttcaaggcaaaagtgactcgtgtggaatttgaggagttgtgtgcagacttgtttgagcgggtgcctgggcctgtacagcaggccctccagagtgccgaaatgagtctggatgagattgagcaggtgatcctggtgggtggggccactcgggtccccagagttcaggaggtgctgctgaaggccgtgggcaaggaggagctggggaagaacatcaatgcagatgaagcagccgccatgggggcagtgtaccaggcagctgcgctcagcaaagcctttaaagtgaagccatttgtcgtccgagatgcagtggtctaccccatcctggtggagttcacgagggaggtggaggaggagcctgggattcacagcctgaagcacaataaacgggtactcttctctcggatggggccctaccctcaacgcaaagtcatcacctttaaccgctacagccatgatttcaacttccacatcaactacggcgacctgggcttcctggggcctgaagatcttcgggtatttggctcccagaatctgaccacagtgaagctaaaaggggtgggtgacagcttcaagaagtatcctgactacgagtccaagggcatcaaggctcacttcaacctggatgagagtggcgtgctcagtctagacagggtggagtctgtatttgagacactggtagaggacagcgcagaagaggaatctactctcaccaaacttggcaacaccatttccagcctgtttggaggcggtaccacaccagatgccaaggagaatggtactgatactgtccaggaggaagaggagagccctgcagaggggagcaaggacgagcctggggagcaggtggagctcaaggaggaagctgaggccccagtggaggatggctctcagcccccaccccctgaacctaagggagatgcaacccctgagggagaaaaggccacagaaaaagaaaatggggacaagtctgaggcccagaaaccaagtgagaaggcagaggcagggcctgagggcgtcgctccagccccagagggagagaagaagcagaagcccgccaggaagcggcgaatggtagaggagatcggggtggagctggttgttctggacctgcctgacttgccagaggataagctggctcagtcggtgcagaaacttcaggacttgacactccgagacctggagaagcaggaacgggaaaaagctgccaacagcttggaagcgttcatatttgagacccaggacaagctgtaccagcccgagtaccaggaagtgtccacagaggagcagcgtgaggagatctctgggaagctcagcgccgcatccacctggctggaggatgagggtgttggagccaccacagtgatgttgaaggagaagctggctgagctgaggaagctgtgccaagggctgttttttcgggtagaggagcgcaagaagtggcccgaacggctgtctgccctcgataatctcctcaaccattccagcatgttcctcaagggggcccggctcatcccagagatggaccagatcttcactgaggtggagatgacaacgttagagaaagtcatcaatgagacctgggcctggaagaatgcaactctggccgagcaggctaagctgcccgccacagagaagcctgtgttgctctcaaaagacattgaagctaagatgatggccctggaccgagaggtgcagtatctgctcaataaggccaagtttaccaagccccggccccggcctaaggacaagaatgggacccgggcagagccacccctcaatgccagtgccagtgaccagggggagaaggtcatccctccagcaggccagactgaagatgcagagcccatttcagaacctgagaaagtagagactggatccgagccaggagacactgagcctttggagttaggaggtcctggagcagaacctgaacagaaagaacaatcgacaggacagaagcggcctttgaagaacgacgaactataacccccacctctgttttccccattcatctccacccccttcccccaccacttctatttatttaacatcgagggttgggggaggggttggtcctgccctcggctggagttcctttctcacccctgtgatttggaggtgtggagaaggggaagggagggacagctcactggttccttctgcagtacctctgtggttaaaaatggaaactgttctcctccccagccccactccctgttccctacccatataggccctaaatttgggaaaaatcactattaatttctgaatcctttgcctgtgggtaggaagagaatggctgccagtggctgatgggtcccggtgatgggaagggtatcaggttgctggggagtttccactcttctctggtgattgttccttccctcccttcctctcccaccatgcgatgagcatcctttcaggccagtgtctgcagagcctcagttaccaggtttggtttctgagtgcctatctgtgctctttcctccctctgcgggcttctcttgctctgagcctcccttccccattcccatccagctcctttccccctgggtttccttggcttcctgcagcaaattgggcagttctctgccccttgcctaaaagcctgtacctctggattggcggaagtaaatctggaaggattctcactcgtatttcccacccctagtggccagaggagggaggggcacagtgaagaagggagcccaccacctctccgaagaggaaagccacgtagagtggttggcatggggtgccagcatcgtgcaagctctgtcataatctgcatcttcccagcagcctggtaccccaggttcctgtaactccctgcctcctcctctcttctgctgttctgctcctcccagacagagcctttccctcaccccctgaccccctgggctgaccaaaatgtgctttctactgtgagtccctatcccaagatcctggggaaaggagagaccatggtgtgaatgtagagatgccacctccctctctctgaggcaggcctgtggatgaaggaggagggtcagggctggccttcctctgtgcatcactctgctaggttgggggcccccgacccaccatacctacgcctagggagcccgtcctccagtattccgtctgtagcaggagctagggctgctgcctcagctccaagacaagaatgaacctggctgtgtcagtcattttgtcttttcctttttttttttttttttgccacattggcagagatggacctaagggtcccacccctcaccccacccccacctcttctgtatgtttgaattctttcagtagctgttgatgctggttggacaggtttgagtcaaattgtactttgctccattgttaattgagaaactgtttcaataaaatattcttttctaca

SEQ ID NO: 9200 - DNA, 1575 bp, Homo sapiens
  misc_feature (7)..(9): n is a, c, g, or t
ggcacgnnngccgcgtccggggccggctggtgcgcgagacgccgccgagagtggcactatggcagacaaagttaggaggcagaggccgaggaggcgagtctgttgggccttggtggctgtgctcttggcagacctgttggcactgagtgatacactggcagtgatgtctgtggacctgggcagtgagtccatgaaggtggccattgtcaaacctggagtgcccatggaaattgtcttgaataaggaatctcggaggaaaacaccggtgatcgtgaccctgaaagaaaatgaaagattctttggagacagtgcagcaagcatggcgattaagaatccaaaggctacgctacgttacttccagcacctcctggggaagcaggcagataacccccatgtagctctttaccaggcccgcttcccggagcacgagctgactttcgacccacagaggcagactgtgcactttcagatcagctctcctttctcacccctgtgatttggaggtgtggagaaggggaagggagggacagctcactgtttccactcttctctggtgattgttccttccctcccttcctctcccaccatgcgatgagcatcctttcaggccagtgtctgcagagcctcagttaccaggtttggtttctgagtgcctatctgtgctctttcctccctctgcgggcttctcttgctctgagcctcccttccccattcccatccagctcctttccccctgggtttccttggcttcctgcagcaaattgggcagttctctgccccttgcctaaaagcctgtacctctggattggcggaagtaaatctggaaggattctcactcgtatttcccacccctagtggccagaggagggaggggcacagtgaagaagggagcccaccacctctccgaagaggaaagccacgtagagtggttggcatggggtgccagcatcgtgcaagctctgtcataatctgcatcttcccagcagcctggtaccccaggttcctgtaactccctgcctcctcctctcttctgctgttctgctcctcccagacagagcctttccctcaccccctgaccccctgggctgaccaaaatgtgctttctactgtgagtccctatcccaagatcctggggaaaggagagaccatggtgtgaatgtagagatgccacctccctctctctgaggcaggcctgtggatgaaggaggagggtcagggctggccttcctctgtgcatcactctgctaggttgggggcccccgacccaccatacctacgcctagggagcccgtcctccagtattccgtctgtagcaggagctagggctgctgcctcagctccaagacaagaatgaacctggctgtgtcagtcattttgtcttttcctttttttttttttttttgccacattggcagagatggacctaagggtcccacccctcaccccacccccacctcttctgtatgtttgaattctttcagtagctgttgatgctggttggacaggtttgagtcaaattgtactttgctccattgttaattgagaaactgtttcaataaaatattcttttctaca

SEQ ID NO: 9201 - DNA, 387 bp, Homo sapiens
tcatgtcttctctttgaccttgttagcagggtcctcaggactttggggctggttagagtgcgagaagcagtgtgttgggtgggccccttgtttgtgataagagaagccaagatgtgtgtgtttccaggatccatccctttattgattctggcagcttgtgtgagtagggatctggctttcaaaacccaccttaaggccagggaagggaaacaatcagactccctcgttcttgcctttttaacatggggtatatatagcacccccacctcttctgtatgtttgaattctttcagtagctgttgatgctggttggacaggtttgagtcaaattgtactttgctccattgttaattgagaaactgtttcaataaaatattcttttctaca

SEQ ID NO: 9202 - DNA, 343 bp, Homo sapiens
  misc_feature (343)..(343): n is a, c, g, or t
gcttggagcctctcctggtctcacccacaggcctggaagaatgcaactctggccgagcaggctaagctgcccgccacagagaagcctgtgttgctctccaataaggccaagtttaccaagccccggccccggcctaaggacaagaatgggacccgggcagagccacccctcaatgccagtgccagtgaccagggggagaaggtcatccctccagcaggccagactgaagatgcagagcccatttcagaacctgagaaagtagagactggtgagttggagcccatggttgagcacgtggatgttgcattagcccaggggtaggcctggcaggcacgcctgtttn

SEQ ID NO: 9203 - DNA, 4637 bp, Homo sapiens
  misc_feature (117)..(117): n is a, c, g, or t
agcggaaggggtagcgggggtggatggaggtgcgggccggccacccctcctaggggagacagcgtgcgagctccgggggcgggtcgggagcgcaagggagggccgcgcggacgccgngcgctcggcctcgcaccggggggcacgcagctcggcccccggtctgtccccacttgctggggcgggccgggatccgtttccgggagtgggagccgccgccttcgtcaggggcactatggcagacaaagttaggaggcagaggccgaggaggcgagtctgttgggccttggtggctgtgctcttggcagacctgttggcactgagtgatacactggcagtgatgtctgtggacctgggcagtgagtccatgaaggtggccattgtcaaacctggagtgcccatggaaattgtcttgaataaggaatctcggaggaaaacaccggtgatcgtgaccctgaaagaaaatgaaagattctttggagacagtgcagcaagcatggcgattaagaatccaaaggctacgctacgttacttccagcacctcctggggaagcaggcagataacccccatgtagctctttaccaggcccgcttcccggagcacgagctgactttcgacccacagaggcagactgtgcactttcagatcagctcgcagctgcagttctcacctgaggaagtgttgggcatggttctcaattattctcgttctctagctgaagattttgcagagcagcccatcaaggatgcagtgatcaccgtgccagtcttcttcaaccaggccgagcgccgagctgtgctgcaggctgctcgtatggctggcctcaaagtgctgcagctcatcaatgacaacaccgccactgccctcagctatggtgtcttccgccggaaagatattaacaccactgcccagaatatcatgttctatgacatgggctcaggcagcaccgtatgcaccattgtgacctaccagatggtgaagactaaggaagctgggatgcagccacagctgcagatccggggagtaggatttgaccgtaccctggggggcctggagatggagctccggcttcgagaacgcctggctgggcttttcaatgagcagcgcaagggtcagagagcaaaggatgtgcgggagaacccgcgtgccatggccaagctgctgcgtgaggctaatcggctcaaaaccgtcctcagtgccaacgctgaccacatggcacagattgaaggcctgatggatgatgtggacttcaaggcaaaagtgactcgtgtggaatttgaggagttgtgtgcagacttgtttgagcgggtgcctgggcctgtacagcaggccctccagagtgccgaaatgagtctggatgagattgagcaggtgatcctggtgggtggggccactcgggtccccagagttcaggaggtgctgctgaaggccgtgggcaaggaggagctggggaagaacatcaatgcagatgaagcagccgccatgggggcagtgtaccaggcagctgcgctcagcaaagcctttaaagtgaagccatttgtcgtccgagatgcagtggtctaccccatcctggtggagttcacgagggaggtggaggaggagcctgggattcacagcctgaagcacaataaacgggtactcttctctcggatggggccctaccctcaacgcaaagtcatcacctttaaccgctacagccatgatttcaacttccacatcaactacggcgacctgggcttcctggggcctgaagatcttcgggtatttggctcccagaatctgaccacagtgaagctaaaaggggtgggtgacagcttcaagaagtatcctgactacgagtccaagggcatcaaggctcacttcaacctggatgagagtggcgtgctcagtctagacagggtggagtctgtatttgagacactggtagaggacagcgcagaagaggaatctactctcaccaaacttggcaacaccatttccagcctgtttggaggcggtaccacaccagatgccaaggagaatggtactgatactgtccaggaggaagaggagagccctgcagaggggagcaaggacgagcctggggagcaggtggagctcaaggaggaagctgaggccccagtggaggatggctctcagcccccaccccctgaacctaagggagatgcaacccctgagggagaaaaggccacagaaaaagaaaatggggacaagtctgaggcccagaaaccaagtgagaaggcagaggcagggcctgagggcgtcgctccagccccagagggagagaagaagcagaagcccgccaggaagcggcgaatggtagaggagatcggggtggagctggttgttctggacctgcctgacttgccagaggataagctggctcagtcggtgcagaaacttcaggacttgacactccgagacctggagaagcaggaacgggaaaaagctgccaacagcttggaagcgttcatatttgagacccaggacaagctgtaccagcccgagtaccaggaagtgtccacagaggagcagcgtgaggagatctctgggaagctcagcgccgcatccacctggctggaggatgagggtgttggagccaccacagtgatgttgaaggagaagctggctgagctgaggaagctgtgccaagggctgttttttcgggtagaggagcgcaagaagtggcccgaacggctgtctgccctcgataatctcctcaaccattccagcatgttcctcaagggggcccggctcatcccagagatggaccagatcttcactgaggtggagatgacaacgttagagaaagtcatcaatgagacctgggcctggaagaatgcaactctggccgagcaggctaagctgcccgccacagagaagcctgtgttgctctcaaaagacattgaagctaagatgatggccctggaccgagaggtgcagtatctgctcaataaggccaagtttaccaagccccggccccggcctaaggacaagaatgggacccgggcagagccacccctcaatgccagtgccagtgaccagggggagaaggtcatccctccagcaggccagactgaagatgcagagcccatttcagaacctgagaaagtagagactggatccgagccaggagacactgagcctttggagttaggaggtcctggagcagaacctgaacagaaagaacaatcgacaggacagaagcggcctttgaagaacgacgaactataacccccacctctgttttccccattcatctccacccccttcccccaccacttctatttatttaacatcgagggttgggggaggggttggtcctgccctcggctggagttcctttctcacccctgtgatttggaggtgtggagaaggggaagggagggacagctcactggttccttctgcagtacctctgtggttaaaaatggaaactgttctcctccccagccccactccctgttccctacccatataggccctaaatttgggaaaaatcactattaatttctgaatcctttgcctgtgggtaggaagagaatggctgccagtggctgatgggtcccggtgatgggaagggtatcaggttgctggggagtttccactcttctctggtgattgttccttccctcccttcctctcccaccatgcgatgagcatcctttcaggccagtgtctgcagagcctcagttaccaggtttggtttctgagtgcctatctgtgctctttcctccctctgcgggcttctcttgctctgagcctcccttccccattcccatccagctcctttccccctgggtttccttggcttcctgcagcaaattgggcagttctctgccccttgcctaaaagcctgtacctctggattggcggaagtaaatctggaaggattctcactcgtatttcccacccctagtggccagaggagggaggggcacagtgaagaagggagcccaccacctctccgaagaggaaagccacgtagagtggttggcatggggtgccagcatcgtgcaagctctgtcataatctgcatcttcccagcagcctggtaccccaggttcctgtaactccctgcctcctcctctcttctgctgttctgctcctcccagacagagcctttccctcaccccctgaccccctgggctgaccaaaatgtgctttctactgtgagtccctatcccaagatcctggggaaaggagagaccatggtgtgaatgtagagatgccacctccctctctctgaggcaggcctgtggatgaaggaggagggtcagggctggccttcctctgtgcatcactctgctaggttgggggcccccgacccaccatacctacgcctagggagcccgtcctccagtattccgtctgtagcaggagctagggctgctgcctcagctccaagacaagaatgaacctggctgtgtcagtcattttgtcttttcctttttttttttttttttgccacattggcagagatggacctaagggtcccacccctcaccccacccccacctcttctgtatgtttgaattctttcagtagctgttgatgctggttggacaggtttgagtcaaattgtactttgctccattgttaattgagaaactgtttcaataaaatattcttttctaca

SEQ ID NO: 9204 - DNA, 4760 bp, Homo sapiens
  misc_feature (117)..(117): n is a, c, g, or t
agcggaaggggtagcgggggtggatggaggtgcgggccggccacccctcctaggggagacagcgtgcgagctccgggggcgggtcgggagcgcaagggagggccgcgcggacgccgngcgctcggcctcgcaccggggggcacgcagctcggcccccggtctgtccccacttgctggggcgggccgggatccgtttccgggagtgggagccgccgccttcgtcaggggcactatggcagacaaagttaggaggcagaggccgaggaggcgagtctgttgggccttggtggctgtgctcttggcagacctgttggcactgagtgatacactggcagtgatgtctgtggacctgggcagtgagtccatgaaggtggccattgtcaaacctggagtgcccatggaaattgtcttgaataaggaatctcggaggaaaacaccggtgatcgtgaccctgaaagaaaatgaaagattctttggagacagtgcagcaagcatggcgattaagaatccaaaggctacgctacgttacttccagcacctcctggggaagcaggcagataacccccatgtagctctttaccaggcccgcttcccggagcacgagctgactttcgacccacagaggcagactgtgcactttcagatcagctctgagtgctctgttggggaaggtggtctcggcaacgctgctgggctcctcattggtgtgtgttcctgattgtcctgccttaatgcctggctttccttggctccaactaccttccttcccctcaggcagctgcagttctcacctgaggaagtgttgggcatggttctcaattattctcgttctctagctgaagattttgcagagcagcccatcaaggatgcagtgatcaccgtgccagtcttcttcaaccaggccgagcgccgagctgtgctgcaggctgctcgtatggctggcctcaaagtgctgcagctcatcaatgacaacaccgccactgccctcagctatggtgtcttccgccggaaagatattaacaccactgcccagaatatcatgttctatgacatgggctcaggcagcaccgtatgcaccattgtgacctaccagatggtgaagactaaggaagctgggatgcagccacagctgcagatccggggagtaggatttgaccgtaccctggggggcctggagatggagctccggcttcgagaacgcctggctgggcttttcaatgagcagcgcaagggtcagagagcaaaggatgtgcgggagaacccgcgtgccatggccaagctgctgcgtgaggctaatcggctcaaaaccgtcctcagtgccaacgctgaccacatggcacagattgaaggcctgatggatgatgtggacttcaaggcaaaagtgactcgtgtggaatttgaggagttgtgtgcagacttgtttgagcgggtgcctgggcctgtacagcaggccctccagagtgccgaaatgagtctggatgagattgagcaggtgatcctggtgggtggggccactcgggtccccagagttcaggaggtgctgctgaaggccgtgggcaaggaggagctggggaagaacatcaatgcagatgaagcagccgccatgggggcagtgtaccaggcagctgcgctcagcaaagcctttaaagtgaagccatttgtcgtccgagatgcagtggtctaccccatcctggtggagttcacgagggaggtggaggaggagcctgggattcacagcctgaagcacaataaacgggtactcttctctcggatggggccctaccctcaacgcaaagtcatcacctttaaccgctacagccatgatttcaacttccacatcaactacggcgacctgggcttcctggggcctgaagatcttcgggtatttggctcccagaatctgaccacagtgaagctaaaaggggtgggtgacagcttcaagaagtatcctgactacgagtccaagggcatcaaggctcacttcaacctggatgagagtggcgtgctcagtctagacagggtggagtctgtatttgagacactggtagaggacagcgcagaagaggaatctactctcaccaaacttggcaacaccatttccagcctgtttggaggcggtaccacaccagatgccaaggagaatggtactgatactgtccaggaggaagaggagagccctgcagaggggagcaaggacgagcctggggagcaggtggagctcaaggaggaagctgaggccccagtggaggatggctctcagcccccaccccctgaacctaagggagatgcaacccctgagggagaaaaggccacagaaaaagaaaatggggacaagtctgaggcccagaaaccaagtgagaaggcagaggcagggcctgagggcgtcgctccagccccagagggagagaagaagcagaagcccgccaggaagcggcgaatggtagaggagatcggggtggagctggttgttctggacctgcctgacttgccagaggataagctggctcagtcggtgcagaaacttcaggacttgacactccgagacctggagaagcaggaacgggaaaaagctgccaacagcttggaagcgttcatatttgagacccaggacaagctgtaccagcccgagtaccaggaagtgtccacagaggagcagcgtgaggagatctctgggaagctcagcgccgcatccacctggctggaggatgagggtgttggagccaccacagtgatgttgaaggagaagctggctgagctgaggaagctgtgccaagggctgttttttcgggtagaggagcgcaagaagtggcccgaacggctgtctgccctcgataatctcctcaaccattccagcatgttcctcaagggggcccggctcatcccagagatggaccagatcttcactgaggtggagatgacaacgttagagaaagtcatcaatgagacctgggcctggaagaatgcaactctggccgagcaggctaagctgcccgccacagagaagcctgtgttgctctcaaaagacattgaagctaagatgatggccctggaccgagaggtgcagtatctgctcaataaggccaagtttaccaagccccggccccggcctaaggacaagaatgggacccgggcagagccacccctcaatgccagtgccagtgaccagggggagaaggtcatccctccagcaggccagactgaagatgcagagcccatttcagaacctgagaaagtagagactggatccgagccaggagacactgagcctttggagttaggaggtcctggagcagaacctgaacagaaagaacaatcgacaggacagaagcggcctttgaagaacgacgaactataacccccacctctgttttccccattcatctccacccccttcccccaccacttctatttatttaacatcgagggttgggggaggggttggtcctgccctcggctggagttcctttctcacccctgtgatttggaggtgtggagaaggggaagggagggacagctcactggttccttctgcagtacctctgtggttaaaaatggaaactgttctcctccccagccccactccctgttccctacccatataggccctaaatttgggaaaaatcactattaatttctgaatcctttgcctgtgggtaggaagagaatggctgccagtggctgatgggtcccggtgatgggaagggtatcaggttgctggggagtttccactcttctctggtgattgttccttccctcccttcctctcccaccatgcgatgagcatcctttcaggccagtgtctgcagagcctcagttaccaggtttggtttctgagtgcctatctgtgctctttcctccctctgcgggcttctcttgctctgagcctcccttccccattcccatccagctcctttccccctgggtttccttggcttcctgcagcaaattgggcagttctctgccccttgcctaaaagcctgtacctctggattggcggaagtaaatctggaaggattctcactcgtatttcccacccctagtggccagaggagggaggggcacagtgaagaagggagcccaccacctctccgaagaggaaagccacgtagagtggttggcatggggtgccagcatcgtgcaagctctgtcataatctgcatcttcccagcagcctggtaccccaggttcctgtaactccctgcctcctcctctcttctgctgttctgctcctcccagacagagcctttccctcaccccctgaccccctgggctgaccaaaatgtgctttctactgtgagtccctatcccaagatcctggggaaaggagagaccatggtgtgaatgtagagatgccacctccctctctctgaggcaggcctgtggatgaaggaggagggtcagggctggccttcctctgtgcatcactctgctaggttgggggcccccgacccaccatacctacgcctagggagcccgtcctccagtattccgtctgtagcaggagctagggctgctgcctcagctccaagacaagaatgaacctggctgtgtcagtcattttgtcttttcctttttttttttttttttgccacattggcagagatggacctaagggtcccacccctcaccccacccccacctcttctgtatgtttgaattctttcagtagctgttgatgctggttggacaggtttgagtcaaattgtactttgctccattgttaattgagaaactgtttcaataaaatattcttttctaca

SEQ ID NO: 9205 - DNA, 5037 bp, Homo sapiens
  misc_feature (117)..(117): n is a, c, g, or t
agcggaaggggtagcgggggtggatggaggtgcgggccggccacccctcctaggggagacagcgtgcgagctccgggggcgggtcgggagcgcaagggagggccgcgcggacgccgngcgctcggcctcgcaccggggggcacgcagctcggcccccggtctgtccccacttgctggggcgggccgggatccgtttccgggagtgggagccgccgccttcgtcaggggcactatggcagacaaagttaggaggcagaggccgaggaggcgagtctgttgggccttggtggctgtgctcttggcagacctgttggcactgagtgatacactggcagtgatgtctgtggacctgggcagtgagtccatgaaggtggccattgtcaaacctggagtgcccatggaaattgtcttgaataaggaatctcggaggaaaacaccggtgatcgtgaccctgaaagaaaatgaaagattctttggagacagtgcagcaagcatggcgattaagaatccaaaggctacgctacgttacttccagcacctcctggggaagcaggcagataacccccatgtagctctttaccaggcccgcttcccggagcacgagctgactttcgacccacagaggcagactgtgcactttcagatcagctcgcagctgcagttctcacctgaggaagtgttgggcatggttctcaattattctcgttctctagctgaagattttgcagagcagcccatcaaggatgcagtgatcaccgtgccagtcttcttcaaccaggccgagcgccgagctgtgctgcaggctgctcgtatggctggcctcaaagtgctgcagctcatcaatgacaacaccgccactgccctcagctatggtgtcttccgccggaaagatattaacaccactgcccagaatatcatgttctatgacatgggctcaggcagcaccgtatgcaccattgtgacctaccagatggtgaagactaaggaagctgggatgcagccacagctgcagatccggggagtaggatttgaccgtaccctggggggcctggagatggagctccggcttcgagaacgcctggctgggcttttcaatgagcagcgcaagggtcagagagcaaaggatgtgcgggagaacccgcgtgccatggccaagctgctgcgtgaggctaatcggctcaaaaccgtcctcagtgccaacgctgaccacatggcacagattgaaggcctgatggatgatgtggacttcaaggcaaaagtgactcgtgtggaatttgaggagttgtgtgcagacttgtttgagcgggtgcctgggcctgtacagcaggccctccagagtgccgaaatgagtctggatgagattgagcaggtgatcctggtgggtggggccactcgggtccccagagttcaggaggtgctgctgaaggccgtgggcaaggaggagctggggaagaacatcaatgcagatgaagcagccgccatgggggcagtgtaccaggcagctgcgctcagcaaagcctttaaagtgaagccatttgtcgtccgagatgcagtggtctaccccatcctggtggagttcacgagggaggtggaggaggagcctgggattcacagcctgaagcacaataaacgggtactcttctctcggatggggccctaccctcaacgcaaagtcatcacctttaaccgctacagccatgatttcaacttccacatcaactacggcgacctgggcttcctggggcctgaagatcttcgggtatttggctcccagaatctgaccacagtgaagctaaaaggggtgggtgacagcttcaagaagtatcctgactacgagtccaagggcatcaaggctcacttcaacctggatgagagtggcgtgctcagtctagacagggtggagtctgtatttgagacactggtagaggacagcgcagaagaggaatctactctcaccaaacttggcaacaccatttccagcctgtttggaggcggtaccacaccagatgccaaggagaatggtactgatactgtccaggaggaagaggagagccctgcagaggggagcaaggacgagcctggggagcaggtggagctcaaggaggaagctgaggccccagtggaggatggctctcagcccccaccccctgaacctaagggagatgcaacccctgagggagaaaaggccacagaaaaagaaaatggggacaagtctgaggcccagaaaccaagtgagaaggcagaggcagggcctgagggcgtcgctccagccccagagggagagaagaagcagaagcccgccaggaagcggcgaatggtagaggagatcggggtggagctggttgttctggacctgcctgacttgccagaggataagctggctcagtcggtgcagaaacttcaggacttgacactccgagacctggagaagcaggaacgggaaaaagctgccaacagcttggaagcgttcatatttgagacccaggacaagctgtaccagcccgagtaccaggaagtgtccacagaggagcagcgtgaggagatctctgggaagctcagcgccgcatccacctggctggaggatgagggtgttggagccaccacagtgatgttgaaggagaagctggctgagctgaggaagctgtgccaagggctgttttttcgggtagaggagcgcaagaagtggcccgaacggctgtctgccctcgataatctcctcaaccattccagcatgttcctcaagggggcccggctcatcccagagatggaccagatcttcactgaggtggagatgacaacgttagagaaagtcatcaatgagacctgggcctggaagaatgcaactctggccgagcaggctaagctgcccgccacagagaagcctgtgttgctctcaaaagacattgaagctaagatgatggccctggaccgagaggtgcagtatctgctcaataaggccaagtttaccaagccccggccccggcctaaggacaagaatgggacccgggcagagccacccctcaatgccagtgccagtgaccagggggagaaggtcatccctccagcaggccagactgaagatgcagagcccatttcagaacctgagaaagtagagactggatccgagccaggagacactgagcctttggagttaggaggtcctggagcagaacctgaacagaaagaacaatcgacaggacagaagcggcctttgaagaacgacgaactataacccccacctctgttttccccattcatctccacccccttcccccaccacttctatttatttaacatcgagggttgggggaggggttggtcctgccctcggctggagttcctttctcacccctgtgatttggaggtgtggagaaggggaagggagggacagctcactggttccttctgcagtacctctgtggttaaaaatggaaactgttctcctccccagccccactccctgttccctacccatataggccctaaatttgggaaaaatcactattaatttctgaatcctttgcctgtgggtaggaagagaatggctgccagtggctgatgggtcccggtgatgggaagggtatcaggttgctggggagtttccactcttctctggtgattgttccttccctcccttcctctcccaccatgcgatgagcatcctttcaggccagtgtctgcagagcctcagttaccaggtttggtttctgagtgcctatctgtgctctttcctccctctgcgggcttctcttgctctgagcctcccttccccattcccatccagctcctttccccctgggtttccttggcttcctgcagcaaattgggcagttctctgccccttgcctaaaagcctgtacctctggattggcggaagtaaatctggaaggattctcactcgtatttcccacccctagtggccagaggagggaggggcacagtgaagaagggagcccaccacctctccgaagaggaaagccacgtagagtggttggcatggggtgccagcatcgtgcaagctctgtcataatctgcatcttcccagcagcctggtaccccaggttcctgtaactccctgcctcctcctctcttctgctgttctgctcctcccagacagagcctttccctcaccccctgaccccctgggctgaccaaaatgtgctttctactgtgagtccctatcccaagatcctggggaaaggagagaccatggtgtgaatgtagagatgccacctccctctctctgaggcaggcctgtggatgaaggaggagggtcagggctggccttcctctgtgcatcactctgctaggttgggggcccccgacccaccatacctacgcctagggagcccgtcctccagtattccgtctgtagcaggagctagggctgctgcctcagctccaagacaagaatgaacctggctgtgtcagtcattttgtcttttcctttttttttttttttttgccacattggcagagatggacctaagggtcccacccctcaccccacccccacctcttctgtatgtttgaattctttcagtagctgttgatgctggttggacaggtttgagtcaaattgtactttgctccattgttaattgagaaactgtttcaataaaatattcttttctacaaaaaaaaagaaaaaaaaaaaaaaaaaaaaaaagggggggacgccaaaaagacttcaccggaggggccaaagaaagaggagacacaagctactgggcaacaagggggcaccaaaaagaggaccgcgaaagaaaagaagagacagggcggacagctaacaccaagtgcacacacgggggaacacaggctgacaacggagacaacacgggggagcgagacacacaaccgcggcgagaggacacctcatgtgtggcacaaaacacactgagagaacttaaaaagggccctaaggggaacgcttaacagatctcacaaccgtgatatagtgtttcacagaagggggaaattgtcggggctgtaaaaggtgtgccatacggataatattttggagaattttatcag

SEQ ID NO: 9206 - DNA, 4989 bp, Homo sapiens
  misc_feature (117)..(117): n is a, c, g, or t
agcggaaggggtagcgggggtggatggaggtgcgggccggccacccctcctaggggagacagcgtgcgagctccgggggcgggtcgggagcgcaagggagggccgcgcggacgccgngcgctcggcctcgcaccggggggcacgcagctcggcccccggtctgtccccacttgctggggcgggccgggatccgtttccgggagtgggagccgccgccttcgtcaggggcactatggcagacaaagttaggaggcagaggccgaggaggcgagtctgttgggccttggtggctgtgctcttggcagacctgttggcactgagtgatacactggcagtgatgtctgtggacctgggcagtgagtccatgaaggtggccattgtcaaacctggagtgcccatggaaattgtcttgaataaggaatctcggaggaaaacaccggtgatcgtgaccctgaaagaaaatgaaagattctttggagacagtgcagcaagcatggcgattaagaatccaaaggctacgctacgttacttccagcacctcctggggaagcaggcagataacccccatgtagctctttaccaggcccgcttcccggagcacgagctgactttcgacccacagaggcagactgtgcactttcagatcagctcgcagctgcagttctcacctgaggaagtgttgggcatggttctcaattattctcgttctctagctgaagattttgcagagcagcccatcaaggatgcagtgatcaccgtgccagtcttcttcaaccaggccgagcgccgagctgtgctgcaggctgctcgtatggctggcctcaaagtgctgcagctcatcaatgacaacaccgccactgccctcagctatggtgtcttccgccggaaagatattaacaccactgcccagaatatcatgttctatgacatgggctcaggcagcaccgtatgcaccattgtgacctaccagatggtgaagactaaggaagctgggatgcagccacagctgcagatccggggagtaggatttgaccgtaccctggggggcctggagatggagctccggcttcgagaacgcctggctgggcttttcaatgagcagcgcaagggtcagagagcaaaggatgtgcgggagaacccgcgtgccatggccaagctgctgcgtgaggctaatcggctcaaaaccgtcctcagtgccaacgctgaccacatggcacagattgaaggcctgatggatgatgtggacttcaaggcaaaagtgactcgtgtggaatttgaggagttgtgtgcagacttgtttgagcgggtgcctgggcctgtacagcaggccctccagagtgccgaaatgagtctggatgagattgagcaggtgatcctggtgggtggggccactcgggtccccagagttcaggaggtgctgctgaaggccgtgggcaaggaggagctggggaagaacatcaatgcagatgaagcagccgccatgggggcagtgtaccaggcagctgcgctcagcaaagcctttaaagtgaagccatttgtcgtccgagatgcagtggtctaccccatcctggtggagttcacgagggaggtggaggaggagcctgggattcacagcctgaagcacaataaacgggtactcttctctcggatggggccctaccctcaacgcaaagtcatcacctttaaccgctacagccatgatttcaacttccacatcaactacggcgacctgggcttcctggggcctgaagatcttcgggtatttggctcccagaatctgaccacagtgaagctaaaaggggtgggtgacagcttcaagaagtatcctgactacgagtccaagggcatcaaggctcacttcaacctggatgagagtggcgtgctcagtctagacagggtggagtctgtatttgagacactggtagaggacagcgcagaagaggaatctactctcaccaaacttggcaacaccatttccagcctgtttggaggcggtaccacaccagatgccaaggagaatggtactgatactgtccaggtgagttcaggatggagccagggaagcatggaggacggtgggggatgcaggtagtagccgcagaggaagggggtgagggtaggccacccctgcccctgttgtgttaaccattcactccccaggatcctctgggctctgagctgtttcttgactggtgctcccaaggcccattcccctcattgcagatgctcttcctttgtccagctagattgccacagtccaagcaggccattgaccgtttccatacagcagtcacctgtatggaacccccatggggtcggcggtgccgagccaggcctgcctggaggctctgctcctgatcgttccctggggcgcctgtggtgtttcccaggaggaagaggagagccctgcagaggggagcaaggacgagcctggggagcaggtggagctcaaggaggaagctgaggccccagtggaggatggctctcagcccccaccccctgaacctaagggagatgcaacccctgagggagaaaaggccacagaaaaagaaaatggggacaagtctgaggcccagaaaccaagtgagaaggcagaggcagggcctgagggcgtcgctccagccccagagggagagaagaagcagaagcccgccaggaagcggcgaatggtagaggagatcggggtggagctggttgttctggacctgcctgacttgccagaggataagctggctcagtcggtgcagaaacttcaggacttgacactccgagacctggagaagcaggaacgggaaaaagctgccaacagcttggaagcgttcatatttgagacccaggacaagctgtaccagcccgagtaccaggaagtgtccacagaggagcagcgtgaggagatctctgggaagctcagcgccgcatccacctggctggaggatgagggtgttggagccaccacagtgatgttgaaggagaagctggctgagctgaggaagctgtgccaagggctgttttttcgggtagaggagcgcaagaagtggcccgaacggctgtctgccctcgataatctcctcaaccattccagcatgttcctcaagggggcccggctcatcccagagatggaccagatcttcactgaggtggagatgacaacgttagagaaagtcatcaatgagacctgggcctggaagaatgcaactctggccgagcaggctaagctgcccgccacagagaagcctgtgttgctctcaaaagacattgaagctaagatgatggccctggaccgagaggtgcagtatctgctcaataaggccaagtttaccaagccccggccccggcctaaggacaagaatgggacccgggcagagccacccctcaatgccagtgccagtgaccagggggagaaggtcatccctccagcaggccagactgaagatgcagagcccatttcagaacctgagaaagtagagactggatccgagccaggagacactgagcctttggagttaggaggtcctggagcagaacctgaacagaaagaacaatcgacaggacagaagcggcctttgaagaacgacgaactataacccccacctctgttttccccattcatctccacccccttcccccaccacttctatttatttaacatcgagggttgggggaggggttggtcctgccctcggctggagttcctttctcacccctgtgatttggaggtgtggagaaggggaagggagggacagctcactggttccttctgcagtacctctgtggttaaaaatggaaactgttctcctccccagccccactccctgttccctacccatataggccctaaatttgggaaaaatcactattaatttctgaatcctttgcctgtgggtaggaagagaatggctgccagtggctgatgggtcccggtgatgggaagggtatcaggttgctggggagtttccactcttctctggtgattgttccttccctcccttcctctcccaccatgcgatgagcatcctttcaggccagtgtctgcagagcctcagttaccaggtttggtttctgagtgcctatctgtgctctttcctccctctgcgggcttctcttgctctgagcctcccttccccattcccatccagctcctttccccctgggtttccttggcttcctgcagcaaattgggcagttctctgccccttgcctaaaagcctgtacctctggattggcggaagtaaatctggaaggattctcactcgtatttcccacccctagtggccagaggagggaggggcacagtgaagaagggagcccaccacctctccgaagaggaaagccacgtagagtggttggcatggggtgccagcatcgtgcaagctctgtcataatctgcatcttcccagcagcctggtaccccaggttcctgtaactccctgcctcctcctctcttctgctgttctgctcctcccagacagagcctttccctcaccccctgaccccctgggctgaccaaaatgtgctttctactgtgagtccctatcccaagatcctggggaaaggagagaccatggtgtgaatgtagagatgccacctccctctctctgaggcaggcctgtggatgaaggaggagggtcagggctggccttcctctgtgcatcactctgctaggttgggggcccccgacccaccatacctacgcctagggagcccgtcctccagtattccgtctgtagcaggagctagggctgctgcctcagctccaagacaagaatgaacctggctgtgtcagtcattttgtcttttcctttttttttttttttttgccacattggcagagatggacctaagggtcccacccctcaccccacccccacctcttctgtatgtttgaattctttcagtagctgttgatgctggttggacaggtttgagtcaaattgtactttgctccattgttaattgagaaactgtttcaataaaatattcttttctaca

SEQ ID NO: 9207 - DNA, 3319 bp, Homo sapiens
tacgagtccaagggcatcaaggctcacttcaacctggatgagagtggcgtgctcagtctagacagggtggagtctgtatttgagacactggtagaggtgctgctgaaggccgtgggcaaggaggagctggggaagaacatcaatgcagatgaagcagccgccatgggggcagtgtaccaggcagctgcgctcagcaaagcctttaaagtgaagccatttgtcgtccgagatgcagtggtctaccccatcctggtggagttcacgagggaggtggaggaggagcctgggattcacagcctgaagcacaataaacgggtactcttctctcggatggggccctaccctcaacgcaaagtcatcacctttaaccgctacagccatgatttcaacttccacatcaactacggcgacctgggcttcctggggcctgaagatcttcgggtatttggctcccagaatctgaccacagtgaagctaaaaggggtgggtgacagcttcaagaagtatcctgactacgagtccaagggcatcaaggctcacttcaacctggatgagagtggcgtgctcagtctagacagggtggagtctgtatttgagacactggtagaggacagcgcagaagaggaatctactctcaccaaacttggcaacaccatttccagcctgtttggaggcggtaccacaccagatgccaaggagaatggtactgatactgtccaggaggaagaggagagccctgcagaggggagcaaggacgagcctggggagcaggtggagctcaaggaggaagctgaggccccagtggaggatggctctcagcccccaccccctgaacctaagggagatgcaacccctgagggagaaaaggccacagaaaaagaaaatggggacaagtctgaggcccagaaaccaagtgagaaggcagaggcagggcctgagggcgtcgctccagccccagagggagagaagaagcagaagcccgccaggaagcggcgaatggtagaggagatcggggtggagctggttgttctggacctgcctgacttgccagaggataagctggctcagtcggtgcagaaacttcaggacttgacactccgagacctggagaagcaggaacgggaaaaagctgccaacagcttggaagcgttcatatttgagacccaggacaagctgtaccagcccgagtaccaggaagtgtccacagaggagcagcgtgaggagatctctgggaagctcagcgccgcatccacctggctggaggatgagggtgttggagccaccacagtgatgttgaaggagaagctggctgagctgaggaagctgtgccaagggctgttttttcgggtagaggagcgcaagaagtggcccgaacggctgtctgccctcgataatctcctcaaccattccagcatgttcctcaagggggcccggctcatcccagagatggaccagatcttcactgaggtggagatgacaacgttagagaaagtcatcaatgagacctgggcctggaagaatgcaactctggccgagcaggctaagctgcccgccacagagaagcctgtgttgctctcaaaagacattgaagctaagatgatggccctggaccgagaggtgcagtatctgctcaataaggccaagtttaccaagccccggccccggcctaaggacaagaatgggacccgggcagagccacccctcaatgccagtgccagtgaccagggggagaaggtcatccctccagcaggccagactgaagatgcagagcccatttcagaacctgagaaagtagagactggatccgagccaggagacactgagcctttggagttaggaggtcctggagcagaacctgaacagaaagaacaatcgacaggacagaagcggcctttgaagaacgacgaactataacccccacctctgttttccccattcatctccacccccttcccccaccacttctatttatttaacatcgagggttgggggaggggttggtcctgccctcggctggagttcctttctcacccctgtgatttggaggtgtggagaaggggaagggagggacagctcactggttccttctgcagtacctctgtggttaaaaatggaaactgttctcctccccagccccactccctgttccctacccatataggccctaaatttgggaaaaatcactattaatttctgaatcctttgcctgtgggtaggaagagaatggctgccagtggctgatgggtcccggtgatgggaagggtatcaggttgctggggagtttccactcttctctggtgattgttccttccctcccttcctctcccaccatgcgatgagcatcctttcaggccagtgtctgcagagcctcagttaccaggtttggtttctgagtgcctatctgtgctctttcctccctctgcgggcttctcttgctctgagcctcccttccccattcccatccagctcctttccccctgggtttccttggcttcctgcagcaaattgggcagttctctgccccttgcctaaaagcctgtacctctggattggcggaagtaaatctggaaggattctcactcgtatttcccacccctagtggccagaggagggaggggcacagtgaagaagggagcccaccacctctccgaagaggaaagccacgtagagtggttggcatggggtgccagcatcgtgcaagctctgtcataatctgcatcttcccagcagcctggtaccccaggttcctgtaactccctgcctcctcctctcttctgctgttctgctcctcccagacagagcctttccctcaccccctgaccccctgggctgaccaaaatgtgctttctactgtgagtccctatcccaagatcctggggaaaggagagaccatggtgtgaatgtagagatgccacctccctctctctgaggcaggcctgtggatgaaggaggagggtcagggctggccttcctctgtgcatcactctgctaggttgggggcccccgacccaccatacctacgcctagggagcccgtcctccagtattccgtctgtagcaggagctagggctgctgcctcagctccaagacaagaatgaacctggctgtgtcagtcattttgtcttttcctttttttttttttttttgccacattggcagagatggacctaagggtcccacccctcaccccacccccacctcttctgtatgtttgaattctttcagtagctgttgatgctggttggacaggtttgagtcaaattgtactttgctccattgttaattgagaaactgtttcaataaaatattcttttctaca

SEQ ID NO: 9208 - DNA, 2849 bp, Homo sapiens
agcggtgtgagtcgatgagcattgggcagtctgattctgcaatcatcagtgcctgggcatcccctgtcgcttcaacctggatgagagtggcgtgctcagtctagacagggtggagtctgtatttgagacactggtagaggacagcgcagaagaggaatctactctcaccaaacttggcaacaccatttccagcctgtttggaggcggtaccacaccagatgccaaggagaatggtactgatactgtccaggaggaagaggagagccctgcagaggggagcaaggacgagcctggggagcaggtggagctcaaggaggaagctgaggccccagtggaggatggctctcagcccccaccccctgaacctaagggagatgcaacccctgagggagaaaaggccacagaaaaagaaaatggggacaagtctgaggcccagaaaccaagtgagaaggcagaggcagggcctgagggcgtcgctccagccccagagggagagaagaagcagaagcccgccaggaagcggcgaatggtagaggagatcggggtggagctggttgttctggacctgcctgacttgccagaggataagctggctcagtcggtgcagaaacttcaggacttgacactccgagacctggagaagcaggaacgggaaaaagctgccaacagcttggaagcgttcatatttgagacccaggacaagctgtaccagcccgagtaccaggaagtgtccacagaggagcagcgtgaggagatctctgggaagctcagcgccgcatccacctggctggaggatgagggtgttggagccaccacagtgatgttgaaggagaagctggctgagctgaggaagctgtgccaagggctgttttttcgggtagaggagcgcaagaagtggcccgaacggctgtctgccctcgataatctcctcaaccattccagcatgttcctcaagggggcccggctcatcccagagatggaccagatcttcactgaggtggagatgacaacgttagagaaagtcatcaatgagacctgggcctggaagaatgcaactctggccgagcaggctaagctgcccgccacagagaagcctgtgttgctctcaaaagacattgaagctaagatgatggccctggaccgagaggtgcagtatctgctcaataaggccaagtttaccaagccccggccccggcctaaggacaagaatgggacccgggcagagccacccctcaatgccagtgccagtgaccagggggagaaggtcatccctccagcaggccagactgaagatgcagagcccatttcagaacctgagaaagtagagactggatccgagccaggagacactgagcctttggagttaggaggtcctggagcagaacctgaacagaaagaacaatcgacaggacagaagcggcctttgaagaacgacgaactataacccccacctctgttttccccattcatctccacccccttcccccaccacttctatttatttaacatcgagggttgggggaggggttggtcctgccctcggctggagttcctttctcacccctgtgatttggaggtgtggagaaggggaagggagggacagctcactggttccttctgcagtacctctgtggttaaaaatggaaactgttctcctccccagccccactccctgttccctacccatataggccctaaatttgggaaaaatcactattaatttctgaatcctttgcctgtgggtaggaagagaatggctgccagtggctgatgggtcccggtgatgggaagggtatcaggttgctggggagtttccactcttctctggtgattgttccttccctcccttcctctcccaccatgcgatgagcatcctttcaggccagtgtctgcagagcctcagttaccaggtttggtttctgagtgcctatctgtgctctttcctccctctgcgggcttctcttgctctgagcctcccttccccattcccatccagctcctttccccctgggtttccttggcttcctgcagcaaattgggcagttctctgccccttgcctaaaagcctgtacctctggattggcggaagtaaatctggaaggattctcactcgtatttcccacccctagtggccagaggagggaggggcacagtgaagaagggagcccaccacctctccgaagaggaaagccacgtagagtggttggcatggggtgccagcatcgtgcaagctctgtcataatctgcatcttcccagcagcctggtaccccaggttcctgtaactccctgcctcctcctctcttctgctgttctgctcctcccagacagagcctttccctcaccccctgaccccctgggctgaccaaaatgtgctttctactgtgagtccctatcccaagatcctggggaaaggagagaccatggtgtgaatgtagagatgccacctccctctctctgaggcaggcctgtggatgaaggaggagggtcagggctggccttcctctgtgcatcactctgctaggttgggggcccccgacccaccatacctacgcctagggagcccgtcctccagtattccgtctgtagcaggagctagggctgctgcctcagctccaagacaagaatgaacctggctgtgtcagtcattttgtcttttcctttttttttttttttttgccacattggcagagatggacctaagggtcccacccctcaccccacccccacctcttctgtatgtttgaattctttcagtagctgttgatgctggttggacaggtttgagtcaaattgtactttgctccattgttaattgagaaactgtttcaataaaatattcttttctaca

SEQ ID NO: 9209 - DNA, 4257 bp, Homo sapiens
  misc_feature (117)..(117): n is a, c, g, or t
agcggaaggggtagcgggggtggatggaggtgcgggccggccacccctcctaggggagacagcgtgcgagctccgggggcgggtcgggagcgcaagggagggccgcgcggacgccgngcgctcggcctcgcaccggggggcacgcagctcggcccccggtctgtccccacttgctggggcgggccgggatccgtttccgggagtgggagccgccgccttcgtcaggggcactatggcagacaaagttaggaggcagaggccgaggaggcgagtctgttgggccttggtggctgtgctcttggcagacctgttggcactgagtgatacactggcagtgatgtctgtggacctgggcagtgagtccatgaaggtggccattgtcaaacctggagtgcccatggaaattgtcttgaataaggaatctcggaggaaaacaccggtgatcgtgaccctgaaagaaaatgaaagattctttggagacagtgcagcaagcatggcgattaagaatccaaaggctacgctacgttacttccagcacctcctggggaagcaggcagataacccccatgtagctctttaccaggcccgcttcccggagcacgagctgactttcgacccacagaggcagactgtgcactttcagatcagctcgcagctgcagttctcacctgaggaagtgttgggcatggttctcaattattctcgttctctagctgaagattttgcagagcagcccatcaaggatgcagtgatcaccgtgccagtcttcttcaaccaggccgagcgccgagctgtgctgcaggctgctcgtatggctggcctcaaagtgctgcagctcatcaatgacaacaccgccactgccctcagctatggtgtcttccgccggaaagatattaacaccactgcccagaatatcatgttctatgacatgggctcaggcagcaccgtatgcaccattgtgacctaccagatggtgaagactaaggaagctgggatgcagccacagctgcagatccggggagtaggatttgaccgtaccctggggggcctggagatggagctccggcttcgagaacgcctggctgggcttttcaatgagcagcgcaagggtcagagagcaaaggatgtgcgggagaacccgcgtgccatggccaagctgctgcgtgaggctaatcggctcaaaaccgtcctcagtgccaacgctgaccacatggcacagattgaaggcctgatggatgatgtggacttcaaggcaaaagtgactcgtgtggaatttgaggagttgtgtgcagacttgtttgagcgggtgcctgggcctgtacagcaggccctccagagtgccgaaatgagtctggatgagattgagcaggtgatcctggtgggtggggccactcgggtccccagagttcaggaggtgctgctgaaggccgtgggcaaggaggagctggggaagaacatcaatgcagatgaagcagccgccatgggggcagtgtaccaggcagctgcgctcagcaaagcctttaaagtgaagccatttgtcgtccgagatgcagtggtctaccccatcctggtggagttcacgagggaggtggaggaggagcctgggattcacagcctgaagcacaataaacgggtactcttctctcggatggggccctaccctcaacgcaaagtcatcacctttaaccgctacagccatgatttcaacttccacatcaactacggcgacctgggcttcctggggcctgaagatcttcgggtatttggctcccagaatctgaccacagtgaagctaaaaggggtgggtgacagcttcaagaagtatcctgactacgagtccaagggcatcaaggctcacttcaacctggatgagagtggcgtgctcagtctagacagggtggagtctgtatttgagacactggtagaggacagcgcagaagaggaatctactctcaccaaacttggcaacaccatttccagcctgtttggaggcggtaccacaccagatgccaaggagaatggtactgatactgtccaggaggaagaggagagccctgcagaggggagcaaggacgagcctggggagcaggtggagctcaaggaggaagctgaggccccagtggaggatggctctcagcccccaccccctgaacctaagggagatgcaacccctgagggagaaaaggccacagaaaaagaaaatggggacaagtctgaggcccagaaaccaagtgagaaggcagaggcagggcctgagggcgtcgctccagccccagagggagagaagaagcagaagcccgccaggaagcggcgaatggtagaggagatcggggtggagctggttgttctggacctgcctgacttgccagaggataagctggctcagtcggtgcagaaacttcaggacttgacactccgagacctggagaagcaggaacgggaaaaagctgccaacagcttggaagcgttcatatttgagacccaggacaagctgtaccagcccgagtaccaggaagtgtccacagaggagcagcgtgaggagatctctgggaagctcagcgccgcatccacctggctggaggatgagggtgttggagccaccacagtgatgttgaaggagaagctggctgagctgaggaagctgtgccaagggctgttttttcgggtagaggagcgcaagaagtggcccgaacggctgtctgccctcgataatctcctcaaccattccagcatgttcctcaagggggcccggctcatcccagagatggaccagatcttcactgaggtggagatgacaacgttagagaaagtcatcaatgagacctgggcctggaagaatgcaactctggccgagcaggctaagctgcccgccacagagaagcctgtgttgctctcaaaagacattgaagctaagatgatggccctggaccgagaggtgcagtatctgctcaataaggccaagtttaccaagccccggccccggcctaaggacaagaatgggacccgggcagagccacccctcaatgccagtgccagtgaccagggggagaaggtcatccctccagcaggccagactgaagatgcagagcccatttcagaacctgagaaagtagagactggatccgagccaggagacactgagcctttggagttaggaggtcctggagcagaacctgaacagaaagaacaatcgacaggacagaagcggcctttgaagaacgacgaactataacccccacctctgttttccctcccttcctctcccaccatgcgatgagcatcctttcaggccagtgtctgcagagcctcagttaccaggtttggtttctgagtgcctatctgtgctctttcctccctctgcgggcttctcttgctctgagcctcccttccccattcccatccagctcctttccccctgggtttccttggcttcctgcagcaaattgggcagttctctgccccttgcctaaaagcctgtacctctggattggcggaagtaaatctggaaggattctcactcgtatttcccacccctagtggccagaggagggaggggcacagtgaagaagggagcccaccacctctccgaagaggaaagccacgtagagtggttggcatggggtgccagcatcgtgcaagctctgtcataatctgcatcttcccagcagcctggtaccccaggttcctgtaactccctgcctcctcctctcttctgctgttctgctcctcccagacagagcctttccctcaccccctgaccccctgggctgaccaaaatgtgctttctactgtgagtccctatcccaagatcctggggaaaggagagaccatggtgtgaatgtagagatgccacctccctctctctgaggcaggcctgtggatgaaggaggagggtcagggctggccttcctctgtgcatcactctgctaggttgggggcccccgacccaccatacctacgcctagggagcccgtcctccagtattccgtctgtagcaggagctagggctgctgcctcagctccaagacaagaatgaacctggctgtgtcagtcattttgtcttttcctttttttttttttttttgccacattggcagagatggacctaagggtcccacccctcaccccacccccacctcttctgtatgtttgaattctttcagtagctgttgatgctggttggacaggtttgagtcaaattgtactttgctccattgttaattgagaaactgtttcaataaaatattcttttctaca

SEQ ID NO: 9210 - DNA, 4576 bp, Homo sapiens
  misc_feature (117)..(117): n is a, c, g, or t
agcggaaggggtagcgggggtggatggaggtgcgggccggccacccctcctaggggagacagcgtgcgagctccgggggcgggtcgggagcgcaagggagggccgcgcggacgccgngcgctcggcctcgcaccggggggcacgcagctcggcccccggtctgtccccacttgctggggcgggccgggatccgtttccgggagtgggagccgccgccttcgtcaggggcactatggcagacaaagttaggaggcagaggccgaggaggcgagtctgttgggccttggtggctgtgctcttggcagacctgttggcactgagtgatacactggcagtgatgtctgtggacctgggcagtgagtccatgaaggtggccattgtcaaacctggagtgcccatggaaattgtcttgaataaggaatctcggaggaaaacaccggtgatcgtgaccctgaaagaaaatgaaagattctttggagacagtgcagcaagcatggcgattaagaatccaaaggctacgctacgttacttccagcacctcctggggaagcaggcagataacccccatgtagctctttaccaggcccgcttcccggagcacgagctgactttcgacccacagaggcagactgtgcactttcagatcagctcgcagctgcagttctcacctgaggaagtgttgggcatggttctcaattattctcgttctctagctgaagattttgcagagcagcccatcaaggatgcagtgatcaccgtgccagtcttcttcaaccaggccgagcgccgagctgtgctgcaggctgctcgtatggctggcctcaaagtgctgcagctcatcaatgacaacaccgccactgccctcagctatggtgtcttccgccggaaagatattaacaccactgcccagaatatcatgttctatgacatgggctcaggcagcaccgtatgcaccattgtgacctaccagatggtgaagactaaggaagctgggatgcagccacagctgcagatccggggagtaggatttgaccgtaccctggggggcctggagatggagctccggcttcgagaacgcctggctgggcttttcaatgagcagcgcaagggtcagagagcaaaggatgtgcgggagaacccgcgtgccatggccaagctgctgcgtgaggctaatcggctcaaaaccgtcctcagtgccaacgctgaccacatggcacagattgaaggcctgatggatgatgtggacttcaaggcaaaagtgactcgtgtggaatttgaggagttgtgtgcagacttgtttgagcgggtgcctgggcctgtacagcaggccctccagagtgccgaaatgagtctggatgagattgagcaggtgatcctggtgggtggggccactcgggtccccagagttcaggaggtgctgctgaaggccgtgggcaaggaggagctggggaagaacatcaatgcagatgaagcagccgccatgggggcagtgtaccaggcagctgcgctcagcaaagcctttaaagtgaagccatttgtcgtccgagatgcagtggtctaccccatcctggtggagttcacgagggaggtggaggaggagcctgggattcacagcctgaagcacaataaacgggtactcttctctcggatggggccctaccctcaacgcaaagtcatcacctttaaccgctacagccatgatttcaacttccacatcaactacggcgacctgggcttcctggggcctgaagatcttcgggtatttggctcccagaatctgaccacagtgaagctaaaaggggtgggtgacagcttcaagaagtatcctgactacgagtccaagggcatcaaggctcacttcaacctggatgagagtggcgtgctcagtctagacagggtggagtctgtatttgagacactggtagaggacagcgcagaagaggaatctactctcaccaaacttggcaacaccatttccagcctgtttggaggcggtaccacaccagatgccaaggagaatggtactgatactgtccaggaggaagaggagagccctgcagaggggagcaaggacgagcctggggagcaggtggagctcaaggaggaagctgaggccccagtggaggatggctctcagcccccaccccctgaacctaagggagatgcaacccctgagggagaaaaggccacagaaaaagaaaatggggacaagtctgaggcccagaaaccaagtgagaaggcagaggcagggcctgagggcgtcgctccagccccagagggagagaagaagcagaagcccgccaggaagcggcgaatggtagaggagatcggggtggagctggttgttctggacctgcctgacttgccagaggataagctggctcagtcggtgcagaaacttcaggacttgacactccgagacctggagaagcaggaacgggaaaaagctgccaacagcttggaagcgttcatatttgagacccaggacaagctgtaccagcccgagtaccaggaagtgtccacagaggagcagcgtgaggagatctctgggaagctcagcgccgcatccacctggctggaggatgagggtgttggagccaccacagtgatgttgaaggagaagctggctgagctgaggaagctgtgccaagggctgttttttcgggtagaggagcgcaagaagtggcccgaacggctgtctgccctcgataatctcctcaaccattccagcatgttcctcaagggggcccggctcatcccagagatggaccagatcttcactgaggtggagatgacaacgttagagaaagtcatcaatgagacctgggcctggaagaatgcaactctggccgagcaggctaagctgcccgccacagagaagcctgtgttgctctcaaaagacattgaagctaagatgatggccctggaccgagaggtgcagtatctgctcaataaggccaagtttaccaagccccggccccggcctaaggacaagaatgggacccgggcagagccacccctcaatgccagtgccagtgaccagggggagaaggtcatccctccagcaggccagactgaagatgcagagcccatttcagaacctgagaaagtagagactggatccgagccaggagacactgagcctttggagttaggaggtcctggagcagaacctgaacagaaagaacaatcgacaggacagaagcggcctttgaagaacgacgaactataacccccacctctgttttccccattcatctccacccccttcccccaccacttctatttatttaacatcgagggttgggggaggggttggtcctgccctcggctggagttcctttctcacccctgtgatttggaggtgtggagaaggggaagggagggacagctcactggttccttctgcagtacctctgtggttaaaaatggaaactgttctcctccccagccccactccctgttccctacccatataggccctaaatttgggaaaaatcactattaatttctgaatcctttgcctgtgggtaggaagagaatggctgccagtggctgatgggtcccggtgatgggaagggtatcaggttgctggggagtttccactcttctctggtgattgttccttccctcccttcctctcccaccatgcgatgagcatcctttcaggccagtgtctgcagagcctcagttaccaggtttggtttctgagtgcctatctgtgctctttcctccctctgcgggcttctcttgctctgagcctcccttccccattcccatccagctcctttccccctgggtttccttggcttcctgcagcaaattgggcagttctctgccccttgcctaaaagcctgtacctctggattggcggaagtaaatctggaaggattctcactcgtatttcccacccctagtggccagaggagggaggggcacagtgaagaagggagcccaccacctctccgaagaggaaagccacgtagagtggttggcatggggtgccagcatcgtgcaagctctgtcataatctgcatcttcccagcagcctggtaccccaggttcctgtaactccctgcctcctcctctcttctgctgttctgctcctcccagacagagcctttccctcaccccctgaccccctgaccatggtgtgaatgtagagatgccacctccctctctctgaggcaggcctgtggatgaaggaggagggtcagggctggccttcctctgtgcatcactctgctaggttgggggcccccgacccaccatacctacgcctagggagcccgtcctccagtattccgtctgtagcaggagctagggctgctgcctcagctccaagacaagaatgaacctggctgtgtcagtcattttgtcttttcctttttttttttttttttgccacattggcagagatggacctaagggtcccacccctcaccccacccccacctcttctgtatgtttgaattctttcagtagctgttgatgctggttggacaggtttgagtcaaattgtactttgctccattgttaattgagaaactgtttcaataaaatattcttttctaca

SEQ ID NO: 9211 - DNA, 4359 bp, Homo sapiens
  misc_feature (117)..(117): n is a, c, g, or t
agcggaaggggtagcgggggtggatggaggtgcgggccggccacccctcctaggggagacagcgtgcgagctccgggggcgggtcgggagcgcaagggagggccgcgcggacgccgngcgctcggcctcgcaccggggggcacgcagctcggcccccggtctgtccccacttgctggggcgggccgggatccgtttccgggagtgggagccgccgccttcgtcaggggcactatggcagacaaagttaggaggcagaggccgaggaggcgagtctgttgggccttggtggctgtgctcttggcagacctgttggcactgagtgatacactggcagtgatgtctgtggacctgggcagtgagtccatgaaggtggccattgtcaaacctggagtgcccatggaaattgtcttgaataaggaatctcggaggaaaacaccggtgatcgtgaccctgaaagaaaatgaaagattctttggagacagtgcagcaagcatggcgattaagaatccaaaggctacgctacgttacttccagcacctcctggggaagcaggcagataacccccatgtagctctttaccaggcccgcttcccggagcacgagctgactttcgacccacagaggcagactgtgcactttcagatcagctcgcagctgcagttctcacctgaggaagtgttgggcatggttctcaattattctcgttctctagctgaagattttgcagagcagcccatcaaggatgcagtgatcaccgtgccagtcttcttcaaccaggccgagcgccgagctgtgctgcaggctgctcgtatggctggcctcaaagtgctgcagctcatcaatgacaacaccgccactgccctcagctatggtgtcttccgccggaaagatattaacaccactgcccagaatatcatgttctatgacatgggctcaggcagcaccgtatgcaccattgtgacctaccagatggtgaagactaaggaagctgggatgcagccacagctgcagatccggggagtaggatttgaccgtaccctggggggcctggagatggagctccggcttcgagaacgcctggctgggcttttcaatgagcagcgcaagggtcagagagcaaaggatgtgcgggagaacccgcgtgccatggccaagctgctgcgtgaggctaatcggctcaaaaccgtcctcagtgccaacgctgaccacatggcacagattgaaggcctgatggatgatgtggacttcaaggcaaaagtgactcgtgtggaatttgaggagttgtgtgcagacttgtttgagcgggtgcctgggcctgtacagcaggccctccagagtgccgaaatgagtctggatgagattgagcaggtgatcctggtgggtggggccactcgggtccccagagttcaggaggtgctgctgaaggccgtgggcaaggaggagctggggaagaacatcaatgcagatgaagcagccgccatgggggcagtgtaccaggcagctgcgctcagcaaagcctttaaagtgaagccatttgtcgtccgagatgcagtggtctaccccatcctggtggagttcacgagggaggtggaggaggagcctgggattcacagcctgaagcacaataaacgggtactcttctctcggatggggccctaccctcaacgcaaagtcatcacctttaaccgctacagccatgatttcaacttccacatcaactacggcgacctgggcttcctggggcctgaagatcttcgggtatttggctcccagaatctgaccacagtgaagctaaaaggggtgggtgacagcttcaagaagtatcctgactacgagtccaagggcatcaaggctcacttcaacctggatgagagtggcgtgctcagtctagacagggtggagtctgtatttgagacactggtagaggacagcgcagaagaggaatctactctcaccaaacttggcaacaccatttccagcctgtttggaggcggtaccacaccagatgccaaggagaatggtactgatactgtccaggaggaagaggagagccctgcagaggggagcaaggacgagcctggggagcaggtggagctcaaggaggaagctgaggccccagtggaggatggctctcagcccccaccccctgaacctaagggagatgcaacccctgagggagaaaaggccacagaaaaagaaaatggggacaagtctgaggcccagaaaccaagtgagaaggcagaggcagggcctgagggcgtcgctccagccccagagggagagaagaagcagaagcccgccaggaagcggcgaatggtagaggagatcggggtggagctggttgttctggacctgcctgacttgccagaggataagctggctcagtcggtgcagaaacttcaggacttgacactccgagacctggagaagcaggaacgggaaaaagctgccaacagcttggaagcgttcatatttgagacccaggacaagctgtaccagcccgagtaccaggaagtgtccacagaggagcagcgtgaggagatctctgggaagctcagcgccgcatccacctggctggaggatgagggtgttggagccaccacagtgatgttgaaggagaagctggctgagctgaggaagctgtgccaagggctgttttttcgggtagaggagcgcaagaagtggcccgaacggctgtctgccctcgataatctcctcaaccattccagcatgttcctcaagggggcccggctcatcccagagatggaccagatcttcactgaggtggagatgacaacgttagagaaagtcatcaatgagacctgggcctggaagaatgcaactctggccgagcaggctaagctgcccgccacagagaagcctgtgttgctctcaaaagacattgaagctaagatgatggccctggaccgagaggtgcagtatctgctcaataaggccaagtttaccaagccccggccccggcctaaggacaagaatgggacccgggcagagccacccctcaatgccagtgccagtgaccagggggagaaggtcatccctccagcaggccagactgaagatgcagagcccatttcagaacctgagaaagtagagactggatccgagccaggagacactgagcctttggagttaggaggtcctggagcagaacctgaacagaaagaacaatcgacaggacagaagcggcctttgaagaacgacgaactataacccccacctctgttttccccattcatctccacccccttcccccaccacttctatttatttaacatcgagggttgggggaggggttggtcctgccctcggctggagttcctttctcacccctgtgatttggaggtgtggagaaggggaagggagggacagctcactggttccttctgcagtacctctgtggttaaaaatggaaactgttctcctccccagccccactccctgttccctacccatataggccctaaatttgggaaaaatcactattaatttctgaatcctttgcctgtgggtaggaagagaatggctgccagtggctgatgggtcccggtgatgggaagggtatcaggttgctggggagtttccactcttctctggtgattgttccttccctcccttcctctcccaccatgcgatgagcatcctttcaggccagtgtctgcagagcctcagttaccaggtttggtttctgagtgcctatctgtgctctttcctccctctgcgggcttctcttgctctgagcctcccttccccattcccatccagctcctttccccctgggtttccttggcttcctgcagcaaattgggcagttctctgccccttgcctaaaagcctgtacctctggattggcggaagtaaatctggaaggattctcactcgtatttcccacccctagtggccagaggagggaggggcacagtgaagaagggagcccaccacctctctgaggcaggcctgtggatgaaggaggagggtcagggctggccttcctctgtgcatcactctgctaggttgggggcccccgacccaccatacctacgcctagggagcccgtcctccagtattccgtctgtagcaggagctagggctgctgcctcagctccaagacaagaatgaacctggctgtgtcagtcattttgtcttttcctttttttttttttttttgccacattggcagagatggacctaagggtcccacccctcaccccacccccacctcttctgtatgtttgaattctttcagtagctgttgatgctggttggacaggtttgagtcaaattgtactttgctccattgttaattgagaaactgtttcaataaaatattcttttctaca

SEQ ID NO: 9212 - DNA, 1897 bp, Homo sapiens
tgctgcggtgactctaaggatctcccaggtagacctaacactgaggtggagatgacaacgttagagaaagtcatcaatgagacctgggcctggaagaatgcaactctggccgagcaggctaagctgcccgccacagagaagcctgtgttgctctcaaaagacattgaagctaagatgatggccctggaccgagaggtgcagtatctgctcaataaggccaagtttaccaagccccggccccggcctaaggacaagaatgggacccgggcagagccacccctcaatgccagtgccagtgaccagggggagaaggtcatccctccagcaggccagactgaagatgcagagcccatttcagaacctgagaaagtagagactggatccgagccaggagacactgagcctttggagttaggaggtcctggagcagaacctgaacagaaagaacaatcgacaggacagaagcggcctttgaagaacgacgaactataacccccacctctgttttccccattcatctccacccccttcccccaccacttctatttatttaacatcgagggttgggggaggggttggtcctgccctcggctggagttcctttctcacccctgtgatttggaggtgtggagaaggggaagggagggacagctcactggttccttctgcagtacctctgtggttaaaaatggaaactgttctcctccccagccccactccctgttccctacccatataggccctaaatttgggaaaaatcactattaatttctgaatcctttgcctgtgggtaggaagagaatggctgccagtggctgatgggtcccggtgatgggaagggtatcaggttgctggggagtttccactcttctctggtgattgttccttccctcccttcctctcccaccatgcgatgagcatcctttcaggccagtgtctgcagagcctcagttaccaggtttggtttctgagtgcctatctgtgctctttcctccctctgcgggcttctcttgctctgagcctcccttccccattcccatccagctcctttccccctgggtttccttggcttcctgcagcaaattgggcagttctctgccccttgcctaaaagcctgtacctctggattggcggaagtaaatctggaaggattctcactcgtatttcccacccctagtggccagaggagggaggggcacagtgaagaagggagcccaccacctctccgaagaggaaagccacgtagagtggttggcatggggtgccagcatcgtgcaagctctgtcataatctgcatcttcccagcagcctggtaccccaggttcctgtaactccctgcctcctcctctcttctgctgttctgctcctcccagacagagcctttccctcaccccctgaccccctgggctgaccaaaatgtgctttctactgtgagtccctatcccaagatcctggggaaaggagagaccatggtgtgaatgtagagatgccacctccctctctctgaggcaggcctgtggatgaaggaggagggtcagggctggccttcctctgtgcatcactctgctaggttgggggcccccgacccaccatacctacgcctagggagcccgtcctccagtattccgtctgtagcaggagctagggctgctgcctcagctccaagacaagaatgaacctggctgtgtcagtcattttgtcttttcctttttttttttttttttgccacattggcagagatggacctaagggtcccacccctcaccccacccccacctcttctgtatgtttgaattctttcagtagctgttgatgctggttggacaggtttgagtcaaattgtactttgctccattgttaattgagaaactgtttcaataaaatattcttttctaca

SEQ ID NO: 9213 - DNA, 3924 bp, Homo sapiens
  misc_feature (117)..(117): n is a, c, g, or t
agcggaaggggtagcgggggtggatggaggtgcgggccggccacccctcctaggggagacagcgtgcgagctccgggggcgggtcgggagcgcaagggagggccgcgcggacgccgngcgctcggcctcgcaccggggggcacgcagctcggcccccggtctgtccccacttgctggggcgggccgggatccgtttccgggagtgggagccgccgccttcgtcaggggcactatggcagacaaagttaggaggcagaggccgaggaggcgagtctgttgggccttggtggctgtgctcttggcagacctgttggcactgagtgatacactggcagtgatgtctgtggacctgggcagtgagtccatgaaggtggccattgtcaaacctggagtgcccatggaaattgtcttgaataaggaatctcggaggaaaacaccggtgatcgtgaccctgaaagaaaatgaaagattctttggagacagtgcagcaagcatggcgattaagaatccaaaggctacgctacgttacttccagcacctcctggggaagcaggcagataacccccatgtagctctttaccaggcccgcttcccggagcacgagctgactttcgacccacagaggcagactgtgcactttcagatcagctcgcagctgcagttctcacctgaggaagtgttgggcatggttctcaattattctcgttctctagctgaagattttgcagagcagcccatcaaggatgcagtgatcaccgtgccagtcttcttcaaccaggccgagcgccgagctgtgctgcaggctgctcgtatggctggcctcaaagtgctgcagctcatcaatgacaacaccgccactgccctcagctatggtgtcttccgccggaaagatattaacaccactgcccagaatatcatgttctatgacatgggctcaggcagcaccgtatgcaccattgtgacctaccagatggtgaagactaaggaagctgggatgcagccacagctgcagatccggggagtaggatttgaccgtaccctggggggcctggagatggagctccggcttcgagaacgcctggctgggcttttcaatgagcagcgcaagggtcagagagcaaaggatgtgcgggagaacccgcgtgccatggccaagctgctgcgtgaggctaatcggctcaaaaccgtcctcagtgccaacgctgaccacatggcacagattgaaggcctgatggatgatgtggacttcaaggcaaaagtgactcgtgtggaatttgaggagttgtgtgcagacttgtttgagcgggtgcctgggcctgtacagcaggccctccagagtgccgaaatgagtctggatgagattgagcaggtgatcctggtgggtggggccactcgggtccccagagttcaggaggtgctgctgaaggccgtgggcaaggaggagctggggaagaacatcaatgcagatgaagcagccgccatgggggcagtgtaccaggcagctgcgctcagcaaagcctttaaagtgaagccatttgtcgtccgagatgcagtggtctaccccatcctggtggagttcacgagggaggtggaggaggagcctgggattcacagcctgaagcacaataaacgggtactcttctctcggatggggccctaccctcaacgcaaagtcatcacctttaaccgctacagccatgatttcaacttccacatcaactacggcgacctgggcttcctggggcctgaagatcttcgggtatttggctcccagaatctgaccacagtgaagctaaaaggggtgggtgacagcttcaagaagtatcctgactacgagtccaagggcatcaaggctcacttcaacctggatgagagtggcgtgctcagtctagacagggtggagtctgtatttgagacactggtagaggacagcgcagaagaggaatctactctcaccaaacttggcaacaccatttccagcctgtttggaggcggtaccacaccagatgccaaggagaatggtactgatactgtccaggaggaagaggagagccctgcagaggggagcaaggacgagcctggggagcaggtggagctcaaggaggaagctgaggccccagtggaggatggctctcagcccccaccccctgaacctaagggagatgcaacccctgagggagaaaaggccacagaaaaagaaaatggggacaagtctgaggcccagaaaccaagtgagaaggcagaggcagggcctgagggcgtcgctccagccccagagggagagaagaagcagaagcccgccaggaagcggcgaatggtagaggagatcggggtggagctggttgttctggacctgcctgacttgccagaggataagctggctcagtcggtgcagaaacttcaggacttgacactccgagacctggagaagcaggaacgggaaaaagctgccaacagcttggaagcgttcatatttgagacccaggacaagctgtaccagcccgagtaccaggaagtgtccacagaggagcagcgtgaggagatctctgggaagctcagcgccgcatccacctggctggaggatgagggtgttggagccaccacagtgatgttgaaggagaagctggctgagctgaggaagctgtgccaagggctgttttttcgggtagaggagcgcaagaagtggcccgaacggctgtctgccctcgataatctcctcaaccattccagcatgttcctcaagggggcccggctcatcccagagatggaccagatcttcactgaggtggagatgacaacgttagagaaagtcatcaatgagacctgggcctggaagaatgcaactctggccgagcaggctaagctgcccgccacagagaagcctgtgttgctctcaaaagacattgaagctaagatgatggccctggaccgagaggtgcagtatctgctcaataaggccaagtttaccaagccccggccccggcctaaggacaagaatgggacccgggcagagccacccctcaatgccagtgccagtgaccagggggagaaggtcatccctccagcaggccagactgaagatgcagagcccatttcagaacctgagaaagtagagactggatccgagccaggagacactgagcctttggagttaggaggtcctggagcagaacctgaacagaaagaacaatcgacaggacagaagcggcctttgaagaacgacgaactataacccccacctctgttttccccattcatctccacccccttcccccaccacttctatttatttaacatcgagggttgggggaggggttggtcctgccctcggctggagttcctttctcacccctgtgatttggaggtgtggagaaggggaagggagggacagctcactggttccttctgcagtacctctgtggttaaaaatggaaactgttctcctccccagccccactccctgttccctacccatataggccctaaatttgggaaaaatcactattaatttctgaatcctttgcctgtgggtaggaagagaatggctgccagtggctgatgggtcccggtgatgggaagggtatcaggttgctggggagtttccactcttctctggtgattgttccttccctcccttcctctcccaccatgcgatgagcatcctttcaggccagtgtctgcagagcctcagttaccaggtttggtttctgagtgcctatctgtgctctttcctccctctgcgggcttctcttgctctgagcctcccttccccattcccatccagctcctttccccctgggtttccttggcttcctgcagcaaattgggcagttctctgccccttgcctaaaagcctgtacctctggattggcggaagtaaatctggtatatgccgaggaggaggcacgtgaagatgactgtgca

SEQ ID NO: 9214 - DNA, 1330 bp, Homo sapiens
  misc_feature (15)..(15): n is a, c, g, or t
  misc_feature (23)..(23): n is a, c, g, or t
ctcgtgcaatttcgngcagcgtntctacgagtcctttctcacccctgtgatttggaggtgtggagaaggggaagggagggacagctcactggttccttctgcagtacctctgtggttaaaaatggaaactgttctcctccccagccccactccctgttccctacccatataggccctaaatttgggaaaaatcactattaatttctgaatcctttgcctgtgggtaggaagagaatggctgccagtggctgatgggtcccggtgatgggaagggtatcaggttgctggggagtttccactcttctctggtgattgttccttccctcccttcctctcccaccatgcgatgagcatcctttcaggccagtgtctgcagagcctcagttaccaggtttggtttctgagtgcctatctgtgctctttcctccctctgcgggcttctcttgctctgagcctcccttccccattcccatccagctcctttccccctgggtttccttggcttcctgcagcaaattgggcagttctctgccccttgcctaaaagcctgtacctctggattggcggaagtaaatctggaaggattctcactcgtatttcccacccctagtggccagaggagggaggggcacagtgaagaagggagcccaccacctctccgaagaggaaagccacgtagagtggttggcatggggtgccagcatcgtgcaagctctgtcataatctgcatcttcccagcagcctggtaccccaggttcctgtaactccctgcctcctcctctcttctgctgttctgctcctcccagacagagcctttccctcaccccctgaccccctgggctgaccaaaatgtgctttctactgtgagtccctatcccaagatcctggggaaaggagagaccatggtgtgaatgtagagatgccacctccctctctctgaggcaggcctgtggatgaaggaggagggtcagggctggccttcctctgtgcatcactctgctaggttgggggcccccgacccaccatacctacgcctagggagcccgtcctccagtattccgtctgtagcaggagctagggctgctgcctcagctccaagacaagaatgaacctggctgtgtcagtcattttgtcttttcctttttttttttttttttgccacattggcagagatggacctaagggtcccacccctcaccccacccccacctcttctgtatgtttgaattctttcagtagctgttgatgctggttggacaggtttgagtcaaattgtactttgctccattgttaattgagaaactgtttcaataaaatattcttttctaca

SEQ ID NO: 9215 - DNA, 3023 bp, Homo sapiens
  misc_feature (117)..(117): n is a, c, g, or t
agcggaaggggtagcgggggtggatggaggtgcgggccggccacccctcctaggggagacagcgtgcgagctccgggggcgggtcgggagcgcaagggagggccgcgcggacgccgngcgctcggcctcgcaccggggggcacgcagctcggcccccggtctgtccccacttgctggggcgggccgggatccgtttccgggagtgggagccgccgccttcgtcaggggcactatggcagacaaagttaggaggcagaggccgaggaggcgagtctgttgggccttggtggctgtgctcttggcagacctgttggcactgagtgatacactggcagtgatgtctgtggacctgggcagtgagtccatgaaggtggccattgtcaaacctggagtgcccatggaaattgtcttgaataaggaatctcggaggaaaacaccggtgatcgtgaccctgaaagaaaatgaaagattctttggagacagtgcagcaagcatggcgattaagaatccaaaggctacgctacgttacttccagcacctcctggggaagcaggcagataacccccatgtagctctttaccaggcccgcttcccggagcacgagctgactttcgacccacagaggcagactgtgcactttcagatcagctcgcagctgcagttctcacctgaggaagtgttgggcatggttctcaattattctcgttctctagctgaagattttgcagagcagcccatcaaggatgcagtgatcaccgtgccagtcttcttcaaccaggccgagcgccgagctgtgctgcaggctgctcgtatggctggcctcaaagtgctgcagctcatcaatgacaacaccgccactgccctcagctatggtgtcttccgccggaaagatattaacaccactgcccagaatatcatgttctatgacatgggctcaggcagcaccgtatgcaccattgtgacctaccagatggtgaagactaaggaagctgggatgcagccacagctgcagatccggggagtaggatttgaccgtaccctggggggcctggagatggagctccggcttcgagaacgcctggctgggcttttcaatgagcagcgcaagggtcagagagcaaaggatgtgcgggagaacccgcgtgccatggccaagctgctgcgtgaggctaatcggctcaaaaccgtcctcagtgccaacgctgaccacatggcacagattgaaggcctgatggatgatgtggacttcaaggcaaaagtgactcgtgtggaatttgaggagttgtgtgcagacttgtttgagcgggtgcctgggcctgtacagcaggccctccagagtgccgaaatgagtctggatgagattgagcaggtgatcctggtgggtggggccactcgggtccccagagttcaggaggtgctgctgaaggccgtgggcaaggaggagctggggaagaacatcaatgcagatgaagcagccgccatgggggcagtgtaccaggcagctgcgctcagcaaagcctttaaagtgaagccatttgtcgtccgagatgcagtggtctaccccatcctggtggagttcacgagggaggtggaggaggagcctgggattcacagcctgaagcacaataaacgggtactcttctctcggatggggccctaccctcaacgcaaagtcatcacctttaaccgctacagccatgatttcaacttccacatcaactacggcgacctgggcttcctggggcctgaagatcttcgggtatttggctcccagaatctgaccacagtgaagctaaaaggggtgggtgacagcttcaagaagtatcctgactacgagtccaagggcatcaaggctcacttcaacctggatgagagtggcgtgctcagtctagacagggtggagtctgtatttgagacactggtagaggacagcgcagaagaggaatctactctcaccaaacttggcaacaccatttccagcctgtttggaggcggtaccacaccagatgccaaggagaatggtactgatactgtccaggaggaagaggagagccctgcagaggggagcaaggacgagcctggggagcaggtggagctcaaggaggaagctgaggccccagtggaggatggctctcagcccccaccccctgaacctaagggagatgcaacccctgagggagaaaaggccacagaaaaagaaaatggggacaagtctgaggcccagaaaccaagtgagaaggcagaggcagggcctgagggcgtcgctccagccccagagggagagaagaagcagaagcccgccaggaagcggcgaatggtagaggagatcggggtggagctggttgttctggacctgcctgacttgccagaggataagctggctcagtcggtgcagaaacttcaggacttgacactccgagacctggagaagcaggaacgggaaaaagctgccaacagcttggaagcgttcatatttgagacccaggacaagctgtaccagcccgagtaccaggaagtgtccacagaggagcagcgtgaggagatctctgggaagctcagcgccgcatccacctggctggaggatgagggtgttggagccaccacagtgatgttgaaggagaagctggctgagctgaggaagctgtgccaagggctgttttttcgggtagaggagcgcaagaagtggcccgaacggctgtctgccctcgataatctcctcaaccattccagcatgttcctcaagggggcccggctcatcccagagatggaccagatcttcactgaggtggagatgacaacgttagagaaagtcatcaatgagacctgggcctggaagaatgcaactctggccgagcaggctaagctgcccgccacagagaagcctgtgttgctctcaaaagacattgaagctaagatgatggccctggaccgagaggtgcagtatctgctcaataaggccaagtttaccaagccccggccccggcctaaggacaagaatgctcaggtaccagctcggttcgtaa

SEQ ID NO: 9216 - DNA, 2310 bp, Homo sapiens
  misc_feature (117)..(117): n is a, c, g, or t
agcggaaggggtagcgggggtggatggaggtgcgggccggccacccctcctaggggagacagcgtgcgagctccgggggcgggtcgggagcgcaagggagggccgcgcggacgccgngcgctcggcctcgcaccggggggcacgcagctcggcccccggtctgtccccacttgctggggcgggccgggatccgtttccgggagtgggagccgccgccttcgtcaggggcactatggcagacaaagttaggaggcagaggccgaggaggcgagtctgttgggccttggtggctgtgctcttggcagacctgttggcactgagtgatacactggcagtgatgtctgtggacctgggcagtgagtccatgaaggtggccattgtcaaacctggagtgcccatggaaattgtcttgaataaggaatctcggaggaaaacaccggtgatcgtgaccctgaaagaaaatgaaagattctttggagacagtgcagcaagcatggcgattaagaatccaaaggctacgctacgttacttccagcacctcctggggaagcaggcagataacccccatgtagctctttaccaggcccgcttcccggagcacgagctgactttcgacccacagaggcagactgtgcactttcagatcagctcgcagctgcagttctcacctgaggaagtgttgggcatggttctcaattattctcgttctctagctgaagattttgcagagcagcccatcaaggatgcagtgatcaccgtgccagtcttcttcaaccaggccgagcgccgagctgtgctgcaggctgctcgtatggctggcctcaaagtgctgcagctcatcaatgacaacaccgccactgccctcagctatggtgtcttccgccggaaagatattaacaccactgcccagaatatcatgttctatgacatgggctcaggcagcaccgtatgcaccattgtgacctaccagatggtgaagactaaggaagctgggatgcagccacagctgcagatccggggagtaggatttgaccgtaccctggggggcctggagatggagctccggcttcgagaacgcctggctgggcttttcaatgagcagcgcaagggtcagagagcaaaggatgtgcgggagaacccgcgtgccatggccaagctgctgcgtgaggctaatcggctcaaaaccgtcctcagtgccaacgctgaccacatggcacagattgaaggcctgatggatgatgtggacttcaaggcaaaagtgactcgtgtggaatttgaggagttgtgtgcagacttgtttgagcgggtgcctgggcctgtacagcaggccctccagagtgccgaaatgagtctggatgagattgagcaggtgatcctggtgggtggggccactcgggtccccagagttcaggaggtgctgctgaaggccgtgggcaaggaggagctggggaagaacatcaatgcagatgaagcagccgccatgggggcagtgtaccaggcagctgcgctcagcaaagcctttaaagtgaagccatttgtcgtccgagatgcagtggtctaccccatcctggtggagttcacgagggaggtggaggaggagcctgggattcacagcctgaagcacaataaacgggtactcttctctcggatggggccctaccctcaacgcaaagtcatcacctttaaccgctacagccatgatttcaacttccacatcaactacggcgacctgggcttcctggggcctgaagatcttcgggtatttggctcccagaatctgaccacagtgaagctaaaaggggtgggtgacagcttcaagaagtatcctgactacgagtccaagggcatcaaggctcacttcaacctggatgagagtggcgtgctcagtctagacagggtggagtctgtatttgagacactggtagaggacagcgcagaagaggaatctactctcaccaaacttggcaacaccatttccagcctgtttggaggcggtaccacaccatacctacgcctagggagcccgtcctccagtattccgtctgtagcaggagctagggctgctgcctcagctccaagacaagaatgaacctggctgtgtcagtcattttgtcttttcctttttttttttttttttgccacattggcagagatggacctaagggtcccacccctcaccccacccccacctcttctgtatgtttgaattctttcagtagctgttgatgctggttggacaggtttgagtcaaattgtactttgctccattgttaattgagaaactgtttcaataaaatattcttttctaca

SEQ ID NO: 9217 - DNA, 746 bp, Homo sapiens
acctgcacctctacctccctccccaccacacagagaaagagcatctacaagccaggaagagaagcctcacacagaaaccaaccctagacagatctgtgagaaaattctgtcattataaggcactcagtctggtattctgttatgggagccccagcagcctggtaccccaggttcctgtaactccctgcctcctcctctcttctgctgttctgctcctcccagacagagcctttccctcaccccctgaccccctgggctgaccaaaatgtgctttctactgtgagtccctatcccaagatcctggggaaaggagagaccatggtgtgaatgtagagatgccacctccctctctctgaggcaggcctgtggatgaaggaggagggtcagggctggccttcctctgtgcatcactctgctaggttgggggcccccgacccaccatacctacgcctagggagcccgtcctccagtattccgtctgtagcaggagctagggctgctgcctcagctccaagacaagaatgaacctggctgtgtcagtcattttgtcttttcctttttttttttttttttgccacattggcagagatggacctaagggtcccacccctcaccccacccccacctcttctgtatgtttgaattctttcagtagctgttgatgctggttggacaggtttgagtcaaattgtactttgctccattgttaattgagaaactgtttcaataaaatattcttttctaca

SEQ ID NO: 9218 - DNA, 2621 bp, Homo sapiens
  misc_feature (117)..(117): n is a, c, g, or t
agcggaaggggtagcgggggtggatggaggtgcgggccggccacccctcctaggggagacagcgtgcgagctccgggggcgggtcgggagcgcaagggagggccgcgcggacgccgngcgctcggcctcgcaccggggggcacgcagctcggcccccggtctgtccccacttgctggggcgggccgggatccgtttccgggagtgggagccgccgccttcgtcaggggcactatggcagacaaagttaggaggcagaggccgaggaggcgagtctgttgggccttggtggctgtgctcttggcagacctgttggcactgagtgatacactggcagtgatgtctgtggacctgggcagtgagtccatgaaggtggccattgtcaaacctggagtgcccatggaaattgtcttgaataaggaatctcggaggaaaacaccggtgatcgtgaccctgaaagaaaatgaaagattctttggagacagtgcagcaagcatggcgattaagaatccaaaggctacgctacgttacttccagcacctcctggggaagcaggcagataacccccatgtagctctttaccaggcccgcttcccggagcacgagctgactttcgacccacagaggcagactgtgcactttcagatcagctcgcagctgcagttctcacctgaggaagtgttgggcatggttctcaattattctcgttctctagctgaagattttgcagagcagcccatcaaggatgcagtgatcaccgtgccagtcttcttcaaccaggccgagcgccgagctgtgctgcaggctgctcgtatggctggcctcaaagtgctgcagctcatcaatgacaacaccgccactgccctcagctatggtgtcttccgccggaaagatattaacaccactgcccagaatatcatgttctatgacatgggctcaggcagcaccgtatgcaccattgtgacctaccagatggtgaagactaaggaagctgggatgcagccacagctgcagatccggggagtaggatttgaccgtaccctggggggcctggagatggagctccggcttcgagaacgcctggctgggcttttcaatgagcagcgcaagggtcagagagcaaaggatgtgcgggagaacccgcgtgccatggccaagctgctgcgtgaggctaatcggctcaaaaccgtcctcagtgccaacgctgaccacatggcacagattgaaggcctgatggatgatgtggacttcaaggcaaaagtgactcgtgtggaatttgaggagttgtgtgcagacttgtttgagcgggtgcctgggcctgtacagcaggccctccagagtgccgaaatgagtctggatgagattgagcaggtgatcctggtgggtggggccactcgggtccccagagttcaggaggtgctgctgaaggccgtgggcaaggaggagctggggaagaacatcaatgcagatgaagcagccgccatgggggcagtgtaccaggcagctgcgctcagcaaagcctttaaagtgaagccatttgtcgtccgagatgcagtggtctaccccatcctggtggagttcacgagggaggtggaggaggagcctgggattcacagcctgaagcacaataaacgggtactcttctctcggatggggccctaccctcaacgcaaagtcatcacctttaaccgctacagccatgatttcaacttccacatcaactacggcgacctgggcttcctggggcctgaagatcttcgggtatttggctcccagaatctgaccacagtgaagctaaaaggggtgggtgacagcttcaagaagtatcctgactacgagtccaagggcatcaaggctcacttcaacctggatgagagtggcgtgctcagtctagacagggtggagtctgtatttgagacactggtagaggacagcgcagaagaggaatctactctcaccaaacttggcaacaccatttccagcctgtttggaggcggtaccacaccagatgccaaggagaatggtactgatactgtccaggtgagttcaggatggagccagggaagcatggaggacggtgggggatgcaggtagtagccgcagaggaagggggtgagggtaggccacccctgcccctgttgtgttaaccattcactccccaggatcctctgggctctgagctgtttcttgactggtgctcccaaggcccattcccctcattgcagatgctcttcctttgtccagctagattgccacagtccaagcaggccattgaccgtttccatacagcagtcacctgtatggaacccccatggggtcggcggtgccgagccaggcctgcctggaggctctgctcctgatcgttccctggggcgcctgtggtgtttcccaggaggaagaggagagccctgcagaggggagcaaggacgagcctggggagcaggtggagctcaaggaggaagctgaggccccagtggaggatggctctcagcccacccccacctcttctgtatgtttgaattctttcagtagctgttgatgctggttggacaggtttgagtcaaattgtactttgctccattgttaattgagaaactgtttcaataaaatattcttttctaca

SEQ ID NO: 9219 - DNA, 761 bp, Homo sapiens
tacgagtccaagggcatcaaggctcacttcaacctggatgagagtggcgtgctcagtctagacagggtggagtctgtatttgagacactggtagaggtgctgctgaaggccgtgggcaaggaggagctggggaagaacatcaatgcagatgaagcagccgccatgggggcagtgtaccaggcagctgcgctcagcaaagcctttaaagtgaagccatttgtcgtccgagatgcagtggtctaccccatcctggtggagttcacgagggaggtggaggaggagcctgggattcacagcctgaagcacaataaacgggtactcttctctcggatggggccctaccctcaacgcaaagtcatcacctttaaccgctacagccatgatttcaacttccacatcaactacggcgacctgggcttcctggggcctgaagatcttcgggtatttggctcccagaatctgaccacagtgaagctaaaaggggtgggtgacagcttcaagggagctagggctgctgcctcagctccaagacaagaatgaacctggctgtgtcagtcattttgtcttttcctttttttttttttttttgccacattggcagagatggacctaagggtcccacccctcaccccacccccacctcttctgtatgtttgaattctttcagtagctgttgatgctggttggacaggtttgagtcaaattgtactttgctccattgttaattgagaaactgtttcaataaaatattcttttctaca

SEQ ID NO: 9220 - DNA, 405 bp, Homo sapiens
cggcacgagggtgcccagggcaccttcaagcccctgtcaggagaagggtcctgccagccatgcccagccaatagccactctaacaccattggatcagccgtctgccagtgccgcgtctgtcccagagctggggccgcaggagcggaggcaagaggggcactatggcagacaaagttaggaggcagaggccgaggaggcgagtctgttgggccttggtggctgtgctcttggcagacctgttggcactgagtgatacactggcagtgatgtctgtggacctgggcagtgagtccatgaaggtggccattgtcaaacctggagtgcccatggaaattgtcttgaataaggaatctcggtgcttggaggggttcttaaattatatttaaaaaagtaactttttgtata

SEQ ID NO: 9221 - DNA, 287 bp, Homo sapiens
caagtctgcacacaactcctcaaattccacacgagtcacttttgacttgaagtccacatcatccatcaggccttcaatctgtgccatgtggtcagcgttggcactgaggacttgtttgagcgggtgcctgggcctgtacagcaggccctccagagtgccgaaatgagtctggatgagattgagcaggtgatcctggtgggtggggccactcgggtccccagagttcaggaggtgctgctgaaggccgtgggcaagtgagtgtgggggctagagcgcttggctgagtt

SEQ ID NO: 9222 - DNA, 4547 bp, Homo sapiens
  misc_feature (14)..(14): n is a, c, g, or t
aggttggtggctantgtaacagtttgcaaaccgagaggagttgtgaagggcgcgggtggggggcgctgccggcctcgtgggtacgttcgtgccgcgtctgtcccagagctggggccgcaggagcggaggcaagaggggcactatggcagacaaagttaggaggcagaggccgaggaggcgagtctgttgggccttggtggctgtgctcttggcagacctgttggcactgagtgatacactggcagtgatgtctgtggacctgggcagtgagtccatgaaggtggccattgtcaaacctggagtgcccatggaaattgtcttgaataaggaatctcggaggaaaacaccggtgatcgtgaccctgaaagaaaatgaaagattctttggagacagtgcagcaagcatggcgattaagaatccaaaggctacgctacgttacttccagcacctcctggggaagcaggcagataacccccatgtagctctttaccaggcccgcttcccggagcacgagctgactttcgacccacagaggcagactgtgcactttcagatcagctcgcagctgcagttctcacctgaggaagtgttgggcatggttctcaattattctcgttctctagctgaagattttgcagagcagcccatcaaggatgcagtgatcaccgtgccagtcttcttcaaccaggccgagcgccgagctgtgctgcaggctgctcgtatggctggcctcaaagtgctgcagctcatcaatgacaacaccgccactgccctcagctatggtgtcttccgccggaaagatattaacaccactgcccagaatatcatgttctatgacatgggctcaggcagcaccgtatgcaccattgtgacctaccagatggtgaagactaaggaagctgggatgcagccacagctgcagatccggggagtaggatttgaccgtaccctggggggcctggagatggagctccggcttcgagaacgcctggctgggcttttcaatgagcagcgcaagggtcagagagcaaaggatgtgcgggagaacccgcgtgccatggccaagctgctgcgtgaggctaatcggctcaaaaccgtcctcagtgccaacgctgaccacatggcacagattgaaggcctgatggatgatgtggacttcaaggcaaaagtgactcgtgtggaatttgaggagttgtgtgcagacttgtttgagcgggtgcctgggcctgtacagcaggccctccagagtgccgaaatgagtctggatgagattgagcaggtgatcctggtgggtggggccactcgggtccccagagttcaggaggtgctgctgaaggccgtgggcaaggaggagctggggaagaacatcaatgcagatgaagcagccgccatgggggcagtgtaccaggcagctgcgctcagcaaagcctttaaagtgaagccatttgtcgtccgagatgcagtggtctaccccatcctggtggagttcacgagggaggtggaggaggagcctgggattcacagcctgaagcacaataaacgggtactcttctctcggatggggccctaccctcaacgcaaagtcatcacctttaaccgctacagccatgatttcaacttccacatcaactacggcgacctgggcttcctggggcctgaagatcttcgggtatttggctcccagaatctgaccacagtgaagctaaaaggggtgggtgacagcttcaagaagtatcctgactacgagtccaagggcatcaaggctcacttcaacctggatgagagtggcgtgctcagtctagacagggtggagtctgtatttgagacactggtagaggacagcgcagaagaggaatctactctcaccaaacttggcaacaccatttccagcctgtttggaggcggtaccacaccagatgccaaggagaatggtactgatactgtccaggaggaagaggagagccctgcagaggggagcaaggacgagcctggggagcaggtggagctcaaggaggaagctgaggccccagtggaggatggctctcagcccccaccccctgaacctaagggagatgcaacccctgagggagaaaaggccacagaaaaagaaaatggggacaagtctgaggcccagaaaccaagtgagaaggcagaggcagggcctgagggcgtcgctccagccccagagggagagaagaagcagaagcccgccaggaagcggcgaatggtagaggagatcggggtggagctggttgttctggacctgcctgacttgccagaggataagctggctcagtcggtgcagaaacttcaggacttgacactccgagacctggagaagcaggaacgggaaaaagctgccaacagcttggaagcgttcatatttgagacccaggacaagctgtaccagcccgagtaccaggaagtgtccacagaggagcagcgtgaggagatctctgggaagctcagcgccgcatccacctggctggaggatgagggtgttggagccaccacagtgatgttgaaggagaagctggctgagctgaggaagctgtgccaagggctgttttttcgggtagaggagcgcaagaagtggcccgaacggctgtctgccctcgataatctcctcaaccattccagcatgttcctcaagggggcccggctcatcccagagatggaccagatcttcactgaggtggagatgacaacgttagagaaagtcatcaatgagacctgggcctggaagaatgcaactctggccgagcaggctaagctgcccgccacagagaagcctgtgttgctctcaaaagacattgaagctaagatgatggccctggaccgagaggtgcagtatctgctcaataaggccaagtttaccaagccccggccccggcctaaggacaagaatgggacccgggcagagccacccctcaatgccagtgccagtgaccagggggagaaggtcatccctccagcaggccagactgaagatgcagagcccatttcagaacctgagaaagtagagactggatccgagccaggagacactgagcctttggagttaggaggtcctggagcagaacctgaacagaaagaacaatcgacaggacagaagcggcctttgaagaacgacgaactataacccccacctctgttttccccattcatctccacccccttcccccaccacttctatttatttaacatcgagggttgggggaggggttggtcctgccctcggctggagttcctttctcacccctgtgatttggaggtgtggagaaggggaagggagggacagctcactggttccttctgcagtacctctgtggttaaaaatggaaactgttctcctccccagccccactccctgttccctacccatataggccctaaatttgggaaaaatcactattaatttctgaatcctttgcctgtgggtaggaagagaatggctgccagtggctgatgggtcccggtgatgggaagggtatcaggttgctggggagtttccactcttctctggtgattgttccttccctcccttcctctcccaccatgcgatgagcatcctttcaggccagtgtctgcagagcctcagttaccaggtttggtttctgagtgcctatctgtgctctttcctccctctgcgggcttctcttgctctgagcctcccttccccattcccatccagctcctttccccctgggtttccttggcttcctgcagcaaattgggcagttctctgccccttgcctaaaagcctgtacctctggattggcggaagtaaatctggaaggattctcactcgtatttcccacccctagtggccagaggagggaggggcacagtgaagaagggagcccaccacctctccgaagaggaaagccacgtagagtggttggcatggggtgccagcatcgtgcaagctctgtcataatctgcatcttcccagcagcctggtaccccaggttcctgtaactccctgcctcctcctctcttctgctgttctgctcctcccagacagagcctttccctcaccccctgaccccctgggctgaccaaaatgtgctttctactgtgagtccctatcccaagatcctggggaaaggagagaccatggtgtgaatgtagagatgccacctccctctctctgaggcaggcctgtggatgaaggaggagggtcagggctggccttcctctgtgcatcactctgctaggttgggggcccccgacccaccatacctacgcctagggagcccgtcctccagtattccgtctgtagcaggagctagggctgctgcctcagctccaagacaagaatgaacctggctgtgtcagtcattttgtcttttcctttttttttttttttttgccacattggcagagatggacctaagggtcccacccctcaccccacccccacctcttctgtatgtttgaattctttcagtagctgttgatgctggttggacaggtttgagtcaaattgtactttgctccattgttaattgagaaactgtttcaataaaatattcttttctaca

SEQ ID NO: 9223 - DNA, 3775 bp, Homo sapiens
tggacttcaaggcaaaagtgactcgtgtggaatttgaggagttgtgtgcagacttgtttgagcgggtgcctgggcctgtacagcaggccctccattgtgacctaccagatggtgaagactaaggaagctgggatgcagccacagctgcagatccggggagtaggatttgaccgtaccctggggggcctggagatggagctccggcttcgagaacgcctggctgggcttttcaatgagcagcgcaagggtcagagagcaaaggatgtgcgggagaacccgcgtgccatggccaagctgctgcgtgaggctaatcggctcaaaaccgtcctcagtgccaacgctgaccacatggcacagattgaaggcctgatggatgatgtggacttcaaggcaaaagtgactcgtgtggaatttgaggagttgtgtgcagacttgtttgagcgggtgcctgggcctgtacagcaggccctccagagtgccgaaatgagtctggatgagattgagcaggtgatcctggtgggtggggccactcgggtccccagagttcaggaggtgctgctgaaggccgtgggcaaggaggagctggggaagaacatcaatgcagatgaagcagccgccatgggggcagtgtaccaggcagctgcgctcagcaaagcctttaaagtgaagccatttgtcgtccgagatgcagtggtctaccccatcctggtggagttcacgagggaggtggaggaggagcctgggattcacagcctgaagcacaataaacgggtactcttctctcggatggggccctaccctcaacgcaaagtcatcacctttaaccgctacagccatgatttcaacttccacatcaactacggcgacctgggcttcctggggcctgaagatcttcgggtatttggctcccagaatctgaccacagtgaagctaaaaggggtgggtgacagcttcaagaagtatcctgactacgagtccaagggcatcaaggctcacttcaacctggatgagagtggcgtgctcagtctagacagggtggagtctgtatttgagacactggtagaggacagcgcagaagaggaatctactctcaccaaacttggcaacaccatttccagcctgtttggaggcggtaccacaccagatgccaaggagaatggtactgatactgtccaggaggaagaggagagccctgcagaggggagcaaggacgagcctggggagcaggtggagctcaaggaggaagctgaggccccagtggaggatggctctcagcccccaccccctgaacctaagggagatgcaacccctgagggagaaaaggccacagaaaaagaaaatggggacaagtctgaggcccagaaaccaagtgagaaggcagaggcagggcctgagggcgtcgctccagccccagagggagagaagaagcagaagcccgccaggaagcggcgaatggtagaggagatcggggtggagctggttgttctggacctgcctgacttgccagaggataagctggctcagtcggtgcagaaacttcaggacttgacactccgagacctggagaagcaggaacgggaaaaagctgccaacagcttggaagcgttcatatttgagacccaggacaagctgtaccagcccgagtaccaggaagtgtccacagaggagcagcgtgaggagatctctgggaagctcagcgccgcatccacctggctggaggatgagggtgttggagccaccacagtgatgttgaaggagaagctggctgagctgaggaagctgtgccaagggctgttttttcgggtagaggagcgcaagaagtggcccgaacggctgtctgccctcgataatctcctcaaccattccagcatgttcctcaagggggcccggctcatcccagagatggaccagatcttcactgaggtggagatgacaacgttagagaaagtcatcaatgagacctgggcctggaagaatgcaactctggccgagcaggctaagctgcccgccacagagaagcctgtgttgctctcaaaagacattgaagctaagatgatggccctggaccgagaggtgcagtatctgctcaataaggccaagtttaccaagccccggccccggcctaaggacaagaatgggacccgggcagagccacccctcaatgccagtgccagtgaccagggggagaaggtcatccctccagcaggccagactgaagatgcagagcccatttcagaacctgagaaagtagagactggatccgagccaggagacactgagcctttggagttaggaggtcctggagcagaacctgaacagaaagaacaatcgacaggacagaagcggcctttgaagaacgacgaactataacccccacctctgttttccccattcatctccacccccttcccccaccacttctatttatttaacatcgagggttgggggaggggttggtcctgccctcggctggagttcctttctcacccctgtgatttggaggtgtggagaaggggaagggagggacagctcactggttccttctgcagtacctctgtggttaaaaatggaaactgttctcctccccagccccactccctgttccctacccatataggccctaaatttgggaaaaatcactattaatttctgaatcctttgcctgtgggtaggaagagaatggctgccagtggctgatgggtcccggtgatgggaagggtatcaggttgctggggagtttccactcttctctggtgattgttccttccctcccttcctctcccaccatgcgatgagcatcctttcaggccagtgtctgcagagcctcagttaccaggtttggtttctgagtgcctatctgtgctctttcctccctctgcgggcttctcttgctctgagcctcccttccccattcccatccagctcctttccccctgggtttccttggcttcctgcagcaaattgggcagttctctgccccttgcctaaaagcctgtacctctggattggcggaagtaaatctggaaggattctcactcgtatttcccacccctagtggccagaggagggaggggcacagtgaagaagggagcccaccacctctccgaagaggaaagccacgtagagtggttggcatggggtgccagcatcgtgcaagctctgtcataatctgcatcttcccagcagcctggtaccccaggttcctgtaactccctgcctcctcctctcttctgctgttctgctcctcccagacagagcctttccctcaccccctgaccccctgggctgaccaaaatgtgctttctactgtgagtccctatcccaagatcctggggaaaggagagaccatggtgtgaatgtagagatgccacctccctctctctgaggcaggcctgtggatgaaggaggagggtcagggctggccttcctctgtgcatcactctgctaggttgggggcccccgacccaccatacctacgcctagggagcccgtcctccagtattccgtctgtagcaggagctagggctgctgcctcagctccaagacaagaatgaacctggctgtgtcagtcattttgtcttttcctttttttttttttttttgccacattggcagagatggacctaagggtcccacccctcaccccacccccacctcttctgtatgtttgaattctttcagtagctgttgatgctggttggacaggtttgagtcaaattgtactttgctccattgttaattgagaaactgtttcaataaaatattcttttctaca

SEQ ID NO: 9224 - DNA, 3349 bp, Homo sapiens
gggtactctgaggatcccggggcatggggttgtacagcaggcctccagagtgcggaaatgagtctggatgagattgagcaggtgatcctggtgggtggggccactcgggtccccagagttcaggaggtgctgctgaaggccgtgggcaaggaggagctggggaagaacatcaatgcagatgaagcagccgccatgggggcagtgtaccaggcagctgcgctcagcaaagcctttaaagtgaagccatttgtcgtccgagatgcagtggtctaccccatcctggtggagttcacgagggaggtggaggaggagcctgggattcacagcctgaagcacaataaacgggtactcttctctcggatggggccctaccctcaacgcaaagtcatcacctttaaccgctacagccatgatttcaacttccacatcaactacggcgacctgggcttcctggggcctgaagatcttcgggtatttggctcccagaatctgaccacagtgaagctaaaaggggtgggtgacagcttcaagaagtatcctgactacgagtccaagggcatcaaggctcacttcaacctggatgagagtggcgtgctcagtctagacagggtggagtctgtatttgagacactggtagaggacagcgcagaagaggaatctactctcaccaaacttggcaacaccatttccagcctgtttggaggcggtaccacaccagatgccaaggagaatggtactgatactgtccaggaggaagaggagagccctgcagaggggagcaaggacgagcctggggagcaggtggagctcaaggaggaagctgaggccccagtggaggatggctctcagcccccaccccctgaacctaagggagatgcaacccctgagggagaaaaggccacagaaaaagaaaatggggacaagtctgaggcccagaaaccaagtgagaaggcagaggcagggcctgagggcgtcgctccagccccagagggagagaagaagcagaagcccgccaggaagcggcgaatggtagaggagatcggggtggagctggttgttctggacctgcctgacttgccagaggataagctggctcagtcggtgcagaaacttcaggacttgacactccgagacctggagaagcaggaacgggaaaaagctgccaacagcttggaagcgttcatatttgagacccaggacaagctgtaccagcccgagtaccaggaagtgtccacagaggagcagcgtgaggagatctctgggaagctcagcgccgcatccacctggctggaggatgagggtgttggagccaccacagtgatgttgaaggagaagctggctgagctgaggaagctgtgccaagggctgttttttcgggtagaggagcgcaagaagtggcccgaacggctgtctgccctcgataatctcctcaaccattccagcatgttcctcaagggggcccggctcatcccagagatggaccagatcttcactgaggtggagatgacaacgttagagaaagtcatcaatgagacctgggcctggaagaatgcaactctggccgagcaggctaagctgcccgccacagagaagcctgtgttgctctcaaaagacattgaagctaagatgatggccctggaccgagaggtgcagtatctgctcaataaggccaagtttaccaagccccggccccggcctaaggacaagaatgggacccgggcagagccacccctcaatgccagtgccagtgaccagggggagaaggtcatccctccagcaggccagactgaagatgcagagcccatttcagaacctgagaaagtagagactggatccgagccaggagacactgagcctttggagttaggaggtcctggagcagaacctgaacagaaagaacaatcgacaggacagaagcggcctttgaagaacgacgaactataacccccacctctgttttccccattcatctccacccccttcccccaccacttctatttatttaacatcgagggttgggggaggggttggtcctgccctcggctggagttcctttctcacccctgtgatttggaggtgtggagaaggggaagggagggacagctcactggttccttctgcagtacctctgtggttaaaaatggaaactgttctcctccccagccccactccctgttccctacccatataggccctaaatttgggaaaaatcactattaatttctgaatcctttgcctgtgggtaggaagagaatggctgccagtggctgatgggtcccggtgatgggaagggtatcaggttgctggggagtttccactcttctctggtgattgttccttccctcccttcctctcccaccatgcgatgagcatcctttcaggccagtgtctgcagagcctcagttaccaggtttggtttctgagtgcctatctgtgctctttcctccctctgcgggcttctcttgctctgagcctcccttccccattcccatccagctcctttccccctgggtttccttggcttcctgcagcaaattgggcagttctctgccccttgcctaaaagcctgtacctctggattggcggaagtaaatctggaaggattctcactcgtatttcccacccctagtggccagaggagggaggggcacagtgaagaagggagcccaccacctctccgaagaggaaagccacgtagagtggttggcatggggtgccagcatcgtgcaagctctgtcataatctgcatcttcccagcagcctggtaccccaggttcctgtaactccctgcctcctcctctcttctgctgttctgctcctcccagacagagcctttccctcaccccctgaccccctgggctgaccaaaatgtgctttctactgtgagtccctatcccaagatcctggggaaaggagagaccatggtgtgaatgtagagatgccacctccctctctctgaggcaggcctgtggatgaaggaggagggtcagggctggccttcctctgtgcatcactctgctaggttgggggcccccgacccaccatacctacgcctagggagcccgtcctccagtattccgtctgtagcaggagctagggctgctgcctcagctccaagacaagaatgaacctggctgtgtcagtcattttgtcttttcctttttttttttttttttgccacattggcagagatggacctaagggtcccacccctcaccccacccccacctcttctgtatgtttgaattctttcagtagctgttgatgctggttggacaggtttgagtcaaattgtactttgctccattgttaattgagaaactgtttcaataaaatattcttttctaca

SEQ ID NO: 9225 - DNA, 4657 bp, Homo sapiens
  misc_feature (117)..(117): n is a, c, g, or t
agcggaaggggtagcgggggtggatggaggtgcgggccggccacccctcctaggggagacagcgtgcgagctccgggggcgggtcgggagcgcaagggagggccgcgcggacgccgngcgctcggcctcgcaccggggggcacgcagctcggcccccggtctgtccccacttgctggggcgggccgggatccgtttccgggagtgggagccgccgccttcgtcaggggcactatggcagacaaagttaggaggcagaggccgaggaggcgagtctgttgggccttggtggctgtgctcttggcagacctgttggcactgagtgatacactggcagtgatgtctgtggacctgggcagtgagtccatgaaggtggccattgtcaaacctggagtgcccatggaaattgtcttgaataaggaatctcggaggaaaacaccggtgatcgtgaccctgaaagaaaatgaaagattctttggagacagtgcagcaagcatggcgattaagaatccaaaggctacgctacgttacttccagcacctcctggggaagcaggcagataacccccatgtagctctttaccaggcccgcttcccggagcacgagctgactttcgacccacagaggcagactgtgcactttcagatcagctcgcagctgcagttctcacctgaggaagtgttgggcatggttctcaattattctcgttctctagctgaagattttgcagagcagcccatcaaggatgcagtgatcaccgtgccagtcttcttcaaccaggccgagcgccgagctgtgctgcaggctgctcgtatggctggcctcaaagtgctgcagctcatcaatgacaacaccgccactgccctcagctatggtgtcttccgccggaaagatattaacaccactgcccagaatatcatgttctatgacatgggctcaggcagcaccgtatgcaccattgtgacctaccagatggtgaagactaaggaagctgggatgcagccacagctgcagatccggggagtaggatttgaccgtaccctggggggcctggagatggagctccggcttcgagaacgcctggctgggcttttcaatgagcagcgcaagggtcagagagcaaaggatgtgcgggagaacccgcgtgccatggccaagctgctgcgtgaggctaatcggctcaaaaccgtcctcagtgccaacgctgaccacatggcacagattgaaggcctgatggatgatgtggacttcaaggcaaaagtgactcgtgtggaatttgaggagttgtgtgcagacttgtttgagcgggtgcctgggcctgtacagcaggccctccagagtgccgaaatgagtctggatgagattgagcaggtgatcctggtgggtggggccactcgggtccccagagttcaggaggtgctgctgaaggccgtgggcaaggaggagctggggaagaacatcaatgcagatgaagcagccgccatgggggcagtgtaccaggcagctgcgctcagcaaagcctttaaagtgaagccatttgtcgtccgagatgcagtggtctaccccatcctggtggagttcacgagggaggtggaggaggagcctgggattcacagcctgaagcacaataaacgggtactcttctctcggatggggccctaccctcaacgcaaagtcatcacctttaaccgctacagccatgatttcaacttccacatcaactacggcgacctgggcttcctggggcctgaagatcttcgggtatttggctcccagaatctgaccacagtgaagctaaaaggggtgggtgacagcttcaagaagtatcctgactacgagtccaagggcatcaaggctcacttcaacctggatgagagtggcgtgctcagtctagacagggtggagtctgtatttgagacactggtagaggacagcgcagaagaggaatctactctcaccaaacttggcaacaccatttccagcctgtttggaggcggtaccacaccagatgccaaggagaatggtactgatactgtccaggaggaagaggagagccctgcagaggggagcaaggacgagcctggggagcaggtggagctcaaggaggaagctgaggccccagtggaggatggctctcagcccccaccccctgaacctaagggagatgcaacccctgagggagaaaaggccacagaaaaagaaaatggggacaagtctgaggcccagaaaccaagtgagaaggcagaggcagggcctgagggcgtcgctccagccccagagggagagaagaagcagaagcccgccaggaagcggcgaatggtagaggagatcggggtggagctggttgttctggacctgcctgacttgccagaggataagctggctcagtcggtgcagaaacttcaggacttgacactccgagacctggagaagcaggaacgggaaaaagctgccaacagcttggaagcgttcatatttgagacccaggacaagctgtaccagcccgagtaccaggaagtgtccacagaggagcagcgtgaggagatctctgggaagctcagcgccgcatccacctggctggaggatgagggtgttggagccaccacagtgatgttgaaggagaagctggctgagctgaggaagctgtgccaagggctgttttttcgggtagaggagcgcaagaagtggcccgaacggctgtctgccctcgataatctcctcaaccattccagcatgttcctcaagggggcccggctcatcccagagatggaccagatcttcactgaggtggagatgacaacgttagagaaagtcatcaatgagacctgggcctggaagaatgcaactctggccgagcaggctaagctgcccgccacagagaagcctgtgttgctctcaaaagacattgaagctaagatgatggccctggaccgagaggtgcagtatctgctcaataaggccaagtttaccaagccccggccccggcctaaggacaagaatgggacccgggcagagccacccctcaatgccagtgccagtgaccagggggagaaggtcatccctccagcaggccagactgaagatgcagagcccatttcagaacctgagaaagtagagactggatccgagccaggagacactgagcctttggagttaggaggtcctggagcagaacctgaacagaaagaacaatcgacaggacagaagcggcctttgaagaacgacgaactataacccccacctctgttttccccattcatctccacccccttcccccaccacttctatttatttaacatcgagggttgggggaggggttggtcctgccctcggctggagttcctttctcacccctgtgatttggaggtgtggagaaggggaagggagggacagctcactggttccttctgcagtacctctgtggttaaaaatggaaactgttctcctccccagccccactccctgttccctacccatataggccctaaatttgggaaaaatcactattaatttctgaatcctttgcctgtgggtaggaagagaatggctgccagtggctgatgggtcccggtgatgggaagggtatcaggttgctggggagtttccactcttctctggtgattgttccttccctcccttcctctcccaccatgcgatgagcatcctttcaggccagtgtctgcagagcctcagttaccaggtttggtttctgagtgcctatctgtgctctttcctccctctgcgggcttctcttgctctgagcctcccttccccattcccatccagctcctttccccctgggtttccttggcttcctgcagcaaattgggcagttctctgccccttgcctaaaagcctgtacctctggattggcggaagtaaatctggaaggattctcactcgtatttcccacccctagtggccagaggagggaggggcacagtgaagaagggagcccaccacctctccgaagaggaaagccacgtagagtggttggcatggggtgccagcatcgtgcaagctctgtcataatctgcatcttcccagcagcctggtaccccaggttcctgtaactccctgcctcctcctctcttctgctgttctgctcctcccagacagagcctttccctcaccccctgaccccctgggctgaccaaaatgtgctttctactgtgagtccctatcccaagatcctggggaaaggagagaccatggtgtgaatgtagagatgccacctccctctctctgaggcaggcctgtggatgaaggaggagggtcagggctggccttcctctgtgcatcactctgctaggttgggggcccccgacccaccatacctacgcctagggagcccgtcctccagtattccgtctgtagcaggagctagggctgctgcctcagctccaagacaagaatgaacctggctgtgtcagtcattttgtcttttcctttttttttttttttttgccacattggcagagatggacctaagggtcccacccctcaccccacccccacctcttctgtatgtttgaattctttcagtagctgttgatgctggttggacaggtttgagtcaaattgtactttgctccattgttaattgagaaactgtttcaataaaatattcttttctacaaaaaaaaaataaagtcgagc

SEQ ID NO: 9226 - DNA, 3045 bp, Homo sapiens
tgtcaagtctcctcaggtaaagtaggcttggctccctgaccaataatcggtcttccactctcccaagttcctagtaagattcacttatgaagagaagaaacggtctcaagttacgtgtgaccactacgcttgaactctgggaaccttcaatgtattactgagaccatgaaccacaaaaataggtttgagtgaggtgtgagctagacctttctggaggctgaaagcattcacacacacacccctctgctagttacatggacacagacctgagcaagccaggcctggcttgctcaggtctagacagggtggagtctgtatttgagacactggtagaggacagcgcagaagaggaatctactctcaccaaacttggcaacaccatttccagcctgtttggaggcggtaccacaccagatgccaaggagaatggtactgatactgtccaggaggaagaggagagccctgcagaggggagcaaggacgagcctggggagcaggtggagctcaaggaggaagctgaggccccagtggaggatggctctcagcccccaccccctgaacctaagggagatgcaacccctgagggagaaaaggccacagaaaaagaaaatggggacaagtctgaggcccagaaaccaagtgagaaggcagaggcagggcctgagggcgtcgctccagccccagagggagagaagaagcagaagcccgccaggaagcggcgaatggtagaggagatcggggtggagctggttgttctggacctgcctgacttgccagaggataagctggctcagtcggtgcagaaacttcaggacttgacactccgagacctggagaagcaggaacgggaaaaagctgccaacagcttggaagcgttcatatttgagacccaggacaagctgtaccagcccgagtaccaggaagtgtccacagaggagcagcgtgaggagatctctgggaagctcagcgccgcatccacctggctggaggatgagggtgttggagccaccacagtgatgttgaaggagaagctggctgagctgaggaagctgtgccaagggctgttttttcgggtagaggagcgcaagaagtggcccgaacggctgtctgccctcgataatctcctcaaccattccagcatgttcctcaagggggcccggctcatcccagagatggaccagatcttcactgaggtggagatgacaacgttagagaaagtcatcaatgagacctgggcctggaagaatgcaactctggccgagcaggctaagctgcccgccacagagaagcctgtgttgctctcaaaagacattgaagctaagatgatggccctggaccgagaggtgcagtatctgctcaataaggccaagtttaccaagccccggccccggcctaaggacaagaatgggacccgggcagagccacccctcaatgccagtgccagtgaccagggggagaaggtcatccctccagcaggccagactgaagatgcagagcccatttcagaacctgagaaagtagagactggatccgagccaggagacactgagcctttggagttaggaggtcctggagcagaacctgaacagaaagaacaatcgacaggacagaagcggcctttgaagaacgacgaactataacccccacctctgttttccccattcatctccacccccttcccccaccacttctatttatttaacatcgagggttgggggaggggttggtcctgccctcggctggagttcctttctcacccctgtgatttggaggtgtggagaaggggaagggagggacagctcactggttccttctgcagtacctctgtggttaaaaatggaaactgttctcctccccagccccactccctgttccctacccatataggccctaaatttgggaaaaatcactattaatttctgaatcctttgcctgtgggtaggaagagaatggctgccagtggctgatgggtcccggtgatgggaagggtatcaggttgctggggagtttccactcttctctggtgattgttccttccctcccttcctctcccaccatgcgatgagcatcctttcaggccagtgtctgcagagcctcagttaccaggtttggtttctgagtgcctatctgtgctctttcctccctctgcgggcttctcttgctctgagcctcccttccccattcccatccagctcctttccccctgggtttccttggcttcctgcagcaaattgggcagttctctgccccttgcctaaaagcctgtacctctggattggcggaagtaaatctggaaggattctcactcgtatttcccacccctagtggccagaggagggaggggcacagtgaagaagggagcccaccacctctccgaagaggaaagccacgtagagtggttggcatggggtgccagcatcgtgcaagctctgtcataatctgcatcttcccagcagcctggtaccccaggttcctgtaactccctgcctcctcctctcttctgctgttctgctcctcccagacagagcctttccctcaccccctgaccccctgggctgaccaaaatgtgctttctactgtgagtccctatcccaagatcctggggaaaggagagaccatggtgtgaatgtagagatgccacctccctctctctgaggcaggcctgtggatgaaggaggagggtcagggctggccttcctctgtgcatcactctgctaggttgggggcccccgacccaccatacctacgcctagggagcccgtcctccagtattccgtctgtagcaggagctagggctgctgcctcagctccaagacaagaatgaacctggctgtgtcagtcattttgtcttttcctttttttttttttttttgccacattggcagagatggacctaagggtcccacccctcaccccacccccacctcttctgtatgtttgaattctttcagtagctgttgatgctggttggacaggtttgagtcaaattgtactttgctccattgttaattgagaaactgtttcaataaaatattcttttctaca

SEQ ID NO: 9227 - DNA, 4591 bp, Homo sapiens
  misc_feature (117)..(117): n is a, c, g, or t
agcggaaggggtagcgggggtggatggaggtgcgggccggccacccctcctaggggagacagcgtgcgagctccgggggcgggtcgggagcgcaagggagggccgcgcggacgccgngcgctcggcctcgcaccggggggcacgcagctcggcccccggtctgtccccacttgctggggcgggccgggatccgtttccgggagtgggagccgccgccttcgtcaggggcactatggcagacaaagttaggaggcagaggccgaggaggcgagtctgttgggccttggtggctgtgctcttggcagacctgttggcactgagtgatacactggcagtgatgtctgtggacctgggcagtgagtccatgaaggtggccattgtcaaacctggagtgcccatggaaattgtcttgaataaggaatctcggaggaaaacaccggtgatcgtgaccctgaaagaaaatgaaagattctttggagacagtgcagcaagcatggcgattaagaatccaaaggctacgctacgttacttccagcacctcctggggaagcaggcagataacccccatgtagctctttaccaggcccgcttcccggagcacgagctgactttcgacccacagaggcagactgtgcactttcagatcagctcgcagctgcagttctcacctgaggaagtgttgggcatggttctcaattattctcgttctctagctgaagattttgcagagcagcccatcaaggatgcagtgatcaccgtgccagtcttcttcaaccaggccgagcgccgagctgtgctgcaggctgctcgtatggctggcctcaaagtgctgcagctcatcaatgacaacaccgccactgccctcagctatggtgtcttccgccggaaagatattaacaccactgcccagaatatcatgttctatgacatgggctcaggcagcaccgtatgcaccattgtgacctaccagatggtgaagactaaggaagctgggatgcagccacagctgcagatccggggagtaggatttgaccgtaccctggggggcctggagatggagctccggcttcgagaacgcctggctgggcttttcaatgagcagcgcaagggtcagagagcaaaggatgtgcgggagaacccgcgtgccatggccaagctgctgcgtgaggctaatcggctcaaaaccgtcctcagtgccaacgctgaccacatggcacagattgaaggcctgatggatgatgtggacttcaaggcaaaagtgactcgtgtggaatttgaggagttgtgtgcagacttgtttgagcgggtgcctgggcctgtacagcaggccctccagagtgccgaaatgagtctggatgagattgagcaggtgatcctggtgggtggggccactcgggtccccagagttcaggaggtgctgctgaaggccgtgggcaaggaggagctggggaagaacatcaatgcagatgaagcagccgccatgggggcagtgtaccaggcagctgcgctcagcaaagcctttaaagtgaagccatttgtcgtccgagatgcagtggtctaccccatcctggtggagttcacgagggaggtggaggaggagcctgggattcacagcctgaagcacaataaacgggtactcttctctcggatggggccctaccctcaacgcaaagtcatcacctttaaccgctacagccatgatttcaacttccacatcaactacggcgacctgggcttcctggggcctgaagatcttcgggtatttggctcccagaatctgaccacagtgaagctaaaaggggtgggtgacagcttcaagaagtatcctgactacgagtccaagggcatcaaggctcacttcaacctggatgagagtggcgtgctcagtctagacagggtggagtctgtatttgagacactggtagaggacagcgcagaagaggaatctactctcaccaaacttggcaacaccatttccagcctgtttggaggcggtaccacaccagatgccaaggagaatggtactgatactgtccaggaggaagaggagagccctgcagaggggagcaaggacgagcctggggagcaggtggagctcaaggaggaagctgaggccccagtggaggatggctctcagcccccaccccctgaacctaagggagatgcaacccctgagggagaaaaggccacagaaaaagaaaatggggacaagtctgaggcccagaaaccaagtgagaaggcagaggcagggcctgagggcgtcgctccagccccagagggagagaagaagcagaagcccgccaggaagcggcgaatggtagaggagatcggggtggagctggttgttctggacctgcctgacttgccagaggataagctggctcagtcggtgcagaaacttcaggacttgacactccgagacctggagaagcaggaacgggaaaaagctgccaacagcttggaagcgttcatatttgagacccaggacaagctgtaccagcccgagtaccaggaagtgtccacagaggagcagcgtgaggagatctctgggaagctcagcgccgcatccacctggctggaggatgagggtgttggagccaccacagtgatgttgaaggagaagctggctgagctgaggaagctgtgccaagggctgttttttcgggtagaggagcgcaagaagtggcccgaacggctgtctgccctcgataatctcctcaaccattccagcatgttcctcaagggggcccggctcatcccagagatggaccagatcttcactgaggtggagatgacaacgttagagaaagtcatcaatgagacctgggcctggaagaatgcaactctggccgagcaggctaagctgcccgccacagagaagcctgtgttgctctcaaaagacattgaagctaagatgatggccctggaccgagaggtgcagtatctgctcaataaggccaagtttaccaagccccggccccggcctaaggacaagaatgggacccgggcagagccacccctcaatgccagtgccagtgaccagggggagaaggtcatccctccagcaggccagactgaagatgcagagcccatttcagaacctgagaaagtagagactggatccgagccaggagacactgagcctttggagttaggaggtcctggagcagaacctgaacagaaagaacaatcgacaggacagaagcggcctttgaagaacgacgaactataacccccacctctgttttccccattcatctccacccccttcccccaccacttctatttatttaacatcgagggttgggggaggggttggtcctgccctcggctggagttcctttctcacccctgtgatttggaggtgtggagaaggggaagggagggacagctcactggttccttctgcagtacctctgtggttaaaaatggaaactgttctcctccccagccccactccctgttccctacccatataggccctaaatttgggaaaaatcactattaatttctgaatcctttgcctgtgggtaggaagagaatggctgccagtggctgatgggtcccggtgatgggaagggtatcaggttgctggggagtttccactcttctctggtgattgttccttccctcccttcctctcccaccatgcgatgagcatcctttcaggccagtgtctgcagagcctcagttaccaggtttggtttctgagtgcctatctgtgctctttcctccctctgcgggcttctcttgctctgagcctcccttccccattcccatccagctcctttccccctgggtttccttggcttcctgcagcaaattgggcagttctctgccaaggattctcactcgtatttcccacccctagtggccagaggagggaggggcacagtgaagaagggagcccaccacctctccgaagaggaaagccacgtagagtggttggcatggggtgccagcatcgtgcaagctctgtcataatctgcatcttcccagcagcctggtaccccaggttcctgtaactccctgcctcctcctctcttctgctgttctgctcctcccagacagagcctttccctcaccccctgaccccctgggctgaccaaaatgtgctttctactgtgagtccctatcccaagatcctggggaaaggagagaccatggtgtgaatgtagagatgccacctccctctctctgaggcaggcctgtggatgaaggaggagggtcagggctggccttcctctgtgcatcactctgctaggttgggggcccccgacccaccatacctacgcctagggagcccgtcctccagtattccgtctgtagcaggagctagggctgctgcctcagctccaagacaagaatgaacctggctgtgtcagtcattttgtcttttcctttttttttttttttttgccacattggcagagatggacctaagggtcccacccctcaccccacccccacctcttctgtatgtttgaattctttcagtagctgttgatgctggttggacaggtttgagtcaaattgtactttgctccattgttaattgagaaactgtttcaataaaatattcttttctaca

SEQ ID NO: 9228 - DNA, 1840 bp, Homo sapiens
gcttggagcctctcctggtctcacccacaggcctggaagaatgcaactctggccgagcaggctaagctgcccgccacagagaagcctgtgttgctctcaaaagacattgaagctaagatgatggccctggaccgagaggtgcagtatctgctcaataaggccaagtttaccaagccccggccccggcctaaggacaagaatgggacccgggcagagccacccctcaatgccagtgccagtgaccagggggagaaggtcatccctccagcaggccagactgaagatgcagagcccatttcagaacctgagaaagtagagactggatccgagccaggagacactgagcctttggagttaggaggtcctggagcagaacctgaacagaaagaacaatcgacaggacagaagcggcctttgaagaacgacgaactataacccccacctctgttttccccattcatctccacccccttcccccaccacttctatttatttaacatcgagggttgggggaggggttggtcctgccctcggctggagttcctttctcacccctgtgatttggaggtgtggagaaggggaagggagggacagctcactggttccttctgcagtacctctgtggttaaaaatggaaactgttctcctccccagccccactccctgttccctacccatataggccctaaatttgggaaaaatcactattaatttctgaatcctttgcctgtgggtaggaagagaatggctgccagtggctgatgggtcccggtgatgggaagggtatcaggttgctggggagtttccactcttctctggtgattgttccttccctcccttcctctcccaccatgcgatgagcatcctttcaggccagtgtctgcagagcctcagttaccaggtttggtttctgagtgcctatctgtgctctttcctccctctgcgggcttctcttgctctgagcctcccttccccattcccatccagctcctttccccctgggtttccttggcttcctgcagcaaattgggcagttctctgccccttgcctaaaagcctgtacctctggattggcggaagtaaatctggaaggattctcactcgtatttcccacccctagtggccagaggagggaggggcacagtgaagaagggagcccaccacctctccgaagaggaaagccacgtagagtggttggcatggggtgccagcatcgtgcaagctctgtcataatctgcatcttcccagcagcctggtaccccaggttcctgtaactccctgcctcctcctctcttctgctgttctgctcctcccagacagagcctttccctcaccccctgaccccctgggctgaccaaaatgtgctttctactgtgagtccctatcccaagatcctggggaaaggagagaccatggtgtgaatgtagagatgccacctccctctctctgaggcaggcctgtggatgaaggaggagggtcagggctggccttcctctgtgcatcactctgctaggttgggggcccccgacccaccatacctacgcctagggagcccgtcctccagtattccgtctgtagcaggagctagggctgctgcctcagctccaagacaagaatgaacctggctgtgtcagtcattttgtcttttcctttttttttttttttttgccacattggcagagatggacctaagggtcccacccctcaccccacccccacctcttctgtatgtttgaattctttcagtagctgttgatgctggttggacaggtttgagtcaaattgtactttgctccattgttaattgagaaactgtttcaataaaatattcttttctaca

SEQ ID NO: 9229 - DNA, 4411 bp, Homo sapiens
  misc_feature (117)..(117): n is a, c, g, or t
agcggaaggggtagcgggggtggatggaggtgcgggccggccacccctcctaggggagacagcgtgcgagctccgggggcgggtcgggagcgcaagggagggccgcgcggacgccgngcgctcggcctcgcaccggggggcacgcagctcggcccccggtctgtccccacttgctggggcgggccgggatccgtttccgggagtgggagccgccgccttcgtcaggggcactatggcagacaaagttaggaggcagaggccgaggaggcgagtctgttgggccttggtggctgtgctcttggcagacctgttggcactgagtgatacactggcagtgatgtctgtggacctgggcagtgagtccatgaaggtggccattgtcaaacctggagtgcccatggaaattgtcttgaataaggaatctcggaggaaaacaccggtgatcgtgaccctgaaagaaaatgaaagattctttggagacagtgcagcaagcatggcgattaagaatccaaaggctacgctacgttacttccagcacctcctggggaagcaggcagataacccccatgtagctctttaccaggcccgcttcccggagcacgagctgactttcgacccacagaggcagactgtgcactttcagatcagctcgcagctgcagttctcacctgaggaagtgttgggcatggttctcaattattctcgttctctagctgaagattttgcagagcagcccatcaaggatgcagtgatcaccgtgccagtcttcttcaaccaggccgagcgccgagctgtgctgcaggctgctcgtatggctggcctcaaagtgctgcagctcatcaatgacaacaccgccactgccctcagctatggtgtcttccgccggaaagatattaacaccactgcccagaatatcatgttctatgacatgggctcaggcagcaccgtatgcaccattgtgacctaccagatggtgaagactaaggaagctgggatgcagccacagctgcagatccggggagtaggatttgaccgtaccctggggggcctggagatggagctccggcttcgagaacgcctggctgggcttttcaatgagcagcgcaagggtcagagagcaaaggatgtgcgggagaacccgcgtgccatggccaagctgctgcgtgaggctaatcggctcaaaaccgtcctcagtgccaacgctgaccacatggcacagattgaaggcctgatggatgatgtggacttcaaggcaaaagtgactcgtgtggaatttgaggagttgtgtgcagacttgtttgagcgggtgcctgggcctgtacagcaggccctccagagtgccgaaatgagtctggatgagattgagcaggtgatcctggtgggtggggccactcgggtccccagagttcaggaggtgctgctgaaggccgtgggcaaggaggagctggggaagaacatcaatgcagatgaagcagccgccatgggggcagtgtaccaggcagctgcgctcagcaaagcctttaaagtgaagccatttgtcgtccgagatgcagtggtctaccccatcctggtggagttcacgagggaggtggaggaggagcctgggattcacagcctgaagcacaataaacgggtactcttctctcggatggggccctaccctcaacgcaaagtcatcacctttaaccgctacagccatgatttcaacttccacatcaactacggcgacctgggcttcctggggcctgaagatcttcgggtatttggctcccagaatctgaccacagtgaagctaaaaggggtgggtgacagcttcaagaagtatcctgactacgagtccaagggcatcaaggctcacttcaacctggatgagagtggcgtgctcagtctagacagggtggagtctgtatttgagacactggtagaggacagcgcagaagaggaatctactctcaccaaacttggcaacaccatttccagcctgtttggaggcggtaccacaccagatgccaaggagaatggtactgatactgtccaggaggaagaggagagccctgcagaggggagcaaggacgagcctggggagcaggtggagctcaaggaggaagctgaggccccagtggaggatggctctcagcccccaccccctgaacctaagggagatgcaacccctgagggagaaaaggccacagaaaaagaaaatggggacaagtctgaggcccagaaaccaagtgagaaggcagaggcagggcctgagggcgtcgctccagccccagagggagagaagaagcagaagcccgccaggaagcggcgaatggtagaggagatcggggtggagctggttgttctggacctgcctgacttgccagaggataagctggctcagtcggtgcagaaacttcaggacttgacactccgagacctggagaagcaggaacgggaaaaagctgccaacagcttggaagcgttcatatttgagacccaggacaagctgtaccagcccgagtaccaggaagtgtccacagaggagcagcgtgaggagatctctgggaagctcagcgccgcatccacctggctggaggatgagggtgttggagccaccacagtgatgttgaaggagaagctggctgagctgaggaagctgtgccaagggctgttttttcgggtagaggagcgcaagaagtggcccgaacggctgtctgccctcgataatctcctcaaccattccagcatgttcctcaagggggcccggctcatcccagagatggaccagatcttcactgaggtggagatgacaacgttagagaaagtcatcaatgagacctgggcctggaagaatgcaactctggccgagcaggctaagctgcccgccacagagaagcctgtgttgctctcaaaagacattgaagctaagatgatggccctggaccgagaggtgcagtatctgctcaataaggccaagtttaccaagccccggccccggcctaaggacaagaatgggacccgggcagagccacccctcaatgccagtgccagtgaccagggggagaaggtcatccctccagcaggccagactgaagatgcagagcccatttcagaacctgagaaagtagagactggatccgagccaggagacactgagcctttggagttaggaggtcctggagcagaacctgaacagaaagaacaatcgacaggacagaagcggcctttgaagaacgacgaactataacccccacctctgttttccccattcatctccacccccttcccccaccacttctatttatttaacatcgagggttgggggaggggttggtcctgccctcggctggagttcctttctcacccctgtgatttggaggtgtggagaaggggaagggagggacagctcactggttccttctgcagtacctctgtggttaaaaatggaaactgttctcctccccagccccactccctgttccctacccatataggccctaaatttgggaaaaatcactattaatttctgaatcctttgcctgtgggtaggaagagaatggctgccagtggctgatgggtcccggtgatgggaagggtatcaggttgctggggagtttccactcttctctggtgattgttccttccctcccttcctctcccaccatgcgatgagcatcctttcaggccagtgtctgcagagcctcagttaccaggtttggtttctgagtgcctatctgtgctctttcctccctctgcgggcttctcttgctctgagcctcccttccccattcccatccagctcctttccccctgggtttccttggcttcctgcagcaaattgggcagttctctgccccttgcctaaaagcctgtacctctggattggcggaagtaaatctggaaggattctcactcgtatttcccacccctagtggccagaggagggaggggcacagtgaagaagggagcccaccacctctccgaagaggaaagccacgtagagtggttggcatggggtgccagcatcgtgcaagctctgtcataatctgcatcttcccagcagcctggtaccccaggttcctgtaactccctgcctcctcctctcttctgctgttctgctcctcccagacagagcctttccctcaccccctgaccccctgtacctctgtggttaaaaatggaaactgttctcctccccagccccactccctgttccctacccatataggccctaaatttgggaaaaatcactattaatttctgaatcctttgcctgtgggtaggaagagaatggctgccagtggctgatgggtcccggtgatgggaagggtatcaggttgctggggagtttccactcttctctggtgattgttccttccctcccttcctctcccaccatgcgatgagcatcctttcaggaggaggg

SEQ ID NO: 9230 - DNA, 3141 bp, Homo sapiens
  misc_feature (117)..(117): n is a, c, g, or t
  misc_feature (3114)..(3114): n is a, c, g, or t
  misc_feature (3136)..(3136): n is a, c, g, or t
agcggaaggggtagcgggggtggatggaggtgcgggccggccacccctcctaggggagacagcgtgcgagctccgggggcgggtcgggagcgcaagggagggccgcgcggacgccgngcgctcggcctcgcaccggggggcacgcagctcggcccccggtctgtccccacttgctggggcgggccgggatccgtttccgggagtgggagccgccgccttcgtcaggggcactatggcagacaaagttaggaggcagaggccgaggaggcgagtctgttgggccttggtggctgtgctcttggcagacctgttggcactgagtgatacactggcagtgatgtctgtggacctgggcagtgagtccatgaaggtggccattgtcaaacctggagtgcccatggaaattgtcttgaataaggaatctcggaggaaaacaccggtgatcgtgaccctgaaagaaaatgaaagattctttggagacagtgcagcaagcatggcgattaagaatccaaaggctacgctacgttacttccagcacctcctggggaagcaggcagataacccccatgtagctctttaccaggcccgcttcccggagcacgagctgactttcgacccacagaggcagactgtgcactttcagatcagctcgcagctgcagttctcacctgaggaagtgttgggcatggttctcaattattctcgttctctagctgaagattttgcagagcagcccatcaaggatgcagtgatcaccgtgccagtcttcttcaaccaggccgagcgccgagctgtgctgcaggctgctcgtatggctggcctcaaagtgctgcagctcatcaatgacaacaccgccactgccctcagctatggtgtcttccgccggaaagatattaacaccactgcccagaatatcatgttctatgacatgggctcaggcagcaccgtatgcaccattgtgacctaccagatggtgaagactaaggaagctgggatgcagccacagctgcagatccggggagtaggatttgaccgtaccctggggggcctggagatggagctccggcttcgagaacgcctggctgggcttttcaatgagcagcgcaagggtcagagagcaaaggatgtgcgggagaacccgcgtgccatggccaagctgctgcgtgaggctaatcggctcaaaaccgtcctcagtgccaacgctgaccacatggcacagattgaaggcctgatggatgatgtggacttcaaggcaaaagtgactcgtgtggaatttgaggagttgtgtgcagacttgtttgagcgggtgcctgggcctgtacagcaggccctccagagtgccgaaatgagtctggatgagattgagcaggtgatcctggtgggtggggccactcgggtccccagagttcaggaggtgctgctgaaggccgtgggcaaggaggagctggggaagaacatcaatgcagatgaagcagccgccatgggggcagtgtaccaggcagctgcgctcagcaaagcctttaaagtgaagccatttgtcgtccgagatgcagtggtctaccccatcctggtggagttcacgagggaggtggaggaggagcctgggattcacagcctgaagcacaataaacgggtactcttctctcggatggggccctaccctcaacgcaaagtcatcacctttaaccgctacagccatgatttcaacttccacatcaactacggcgacctgggcttcctggggcctgaagatcttcgggtatttggctcccagaatctgaccacagtgaagctaaaaggggtgggtgacagcttcaagaagtatcctgactacgagtccaagggcatcaaggctcacttcaacctggatgagagtggcgtgctcagtctagacagggtggagtctgtatttgagacactggtagaggacagcgcagaagaggaatctactctcaccaaacttggcaacaccatttccagcctgtttggaggcggtaccacaccagatgccaaggagaatggtactgatactgtccaggaggaagaggagagccctgcagaggggagcaaggacgagcctggggagcaggtggagctcaaggaggaagctgaggccccagtggaggatggctctcagcccccaccccctgaacctaagggagatgcaacccctgagggagaaaaggccacagaaaaagaaaatggggacaagtctgaggcccagaaaccaagtgagaaggcagaggcagggcctgagggcgtcgctccagccccagagggagagaagaagcagaagcccgccaggaagcggcgaatggtagaggagatcggggtggagctggttgttctggacctgcctgacttgccagaggataagctggctcagtcggtgcagaaacttcaggacttgacactccgagacctggagaagcaggaacgggaaaaagctgccaacagcttggaagcgttcatatttgagacccaggacaagctgtaccagcccgagtaccaggaagtgtccacagaggagcagcgtgaggagatctctgggaagctcagcgccgcatccacctggctggaggatgagggtgttggagccaccacagtgatgttgaaggagaagctggctgagctgaggaagctgtgccaagggctgttttttcgggtagaggagcgcaagaagtggcccgaacggctgtctgccctcgataatctcctcaaccattccagcatgttcctcaagggggcccggctcatcccagagatggaccagatcttcactgaggtggagatgacaacgttagagaaagtcatcaatgagacctgggcctggaagaatgcaactctggccgagcaggctaagctgcccgccacagagaagcctgtgttgctctcaaaagacattgaagctaagatgatggccctggaccgagaggtgcagtatctgctcaataaggccaagtttaccaagccccggccccggcctaaggacaagaatgggacccgggcagagccacccctcaatgccagtgccagtgaccagggggagaaggtcatccctccagcaggccagactgaagatgcagagggcatttcagaaccgaggatcctcgngggtcttccaaagaagtttcanctaac

SEQ ID NO: 9231 - DNA, 3292 bp, Homo sapiens
  misc_feature (117)..(117): n is a, c, g, or t
agcggaaggggtagcgggggtggatggaggtgcgggccggccacccctcctaggggagacagcgtgcgagctccgggggcgggtcgggagcgcaagggagggccgcgcggacgccgngcgctcggcctcgcaccggggggcacgcagctcggcccccggtctgtccccacttgctggggcgggccgggatccgtttccgggagtgggagccgccgccttcgtcaggggcactatggcagacaaagttaggaggcagaggccgaggaggcgagtctgttgggccttggtggctgtgctcttggcagacctgttggcactgagtgatacactggcagtgatgtctgtggacctgggcagtgagtccatgaaggtggccattgtcaaacctggagtgcccatggaaattgtcttgaataaggaatctcggaggaaaacaccggtgatcgtgaccctgaaagaaaatgaaagattctttggagacagtgcagcaagcatggcgattaagaatccaaaggctacgctacgttacttccagcacctcctggggaagcaggcagataacccccatgtagctctttaccaggcccgcttcccggagcacgagctgactttcgacccacagaggcagactgtgcactttcagatcagctcgcagctgcagttctcacctgaggaagtgttgggcatggttctcaattattctcgttctctagctgaagattttgcagagcagcccatcaaggatgcagtgatcaccgtgccagtcttcttcaaccaggccgagcgccgagctgtgctgcaggctgctcgtatggctggcctcaaagtgctgcagctcatcaatgacaacaccgccactgccctcagctatggtgtcttccgccggaaagatattaacaccactgcccagaatatcatgttctatgacatgggctcaggcagcaccgtatgcaccattgtgacctaccagatggtgaagactaaggaagctgggatgcagccacagctgcagatccggggagtaggatttgaccgtaccctggggggcctggagatggagctccggcttcgagaacgcctggctgggcttttcaatgagcagcgcaagggtcagagagcaaaggatgtgcgggagaacccgcgtgccatggccaagctgctgcgtgaggctaatcggctcaaaaccgtcctcagtgccaacgctgaccacatggcacagattgaaggcctgatggatgatgtggacttcaaggcaaaagtgactcgtgtggaatttgaggagttgtgtgcagacttgtttgagcgggtgcctgggcctgtacagcaggccctccagagtgccgaaatgagtctggatgagattgagcaggtgatcctggtgggtggggccactcgggtccccagagttcaggaggtgctgctgaaggccgtgggcaaggaggagctggggaagaacatcaatgcagatgaagcagccgccatgggggcagtgtaccaggcagctgcgctcagcaaagcctttaaagtgaagccatttgtcgtccgagatgcagtggtctaccccatcctggtggagttcacgagggaggtggaggaggagcctgggattcacagcctgaagcacaataaacgggtactcttctctcggatggggccctaccctcaacgcaaagtcatcacctttaaccgctacagccatgatttcaacttccacatcaactacggcgacctgggcttcctggggcctgaagatcttcgggtatttggctcccagaatctgaccacagtgaagctaaaaggggtgggtgacagcttcaagaagtatcctgactacgagtccaagggcatcaaggctcacttcaacctggatgagagtggcgtgctcagtctagacagggtggagtctgtatttgagacactggtagaggacagcgcagaagaggaatctactctcaccaaacttggcaacaccatttccagcctgtttggaggcggtaccacaccagatgccaaggagaatggtactgatactgtccaggaggaagaggagagccctgcagaggggagcaaggacgagcctggggagcaggtggagctcaaggaggaagctgaggccccagtggaggatggctctcagcccccaccccctgaacctaagggagatgcaacccctgagggagaaaaggccacagaaaaagaaaatggggacaagtctgaggcccagaaaccaagtgagaaggcagaggcagggcctgagggcgtcgctccagccccagagggagagaagaagcagaagcccgccaggaagcggcgaatggtagaggagatcggggtggagctggttgttctggacctgcctgacttgccagaggataagctggctcagtcggtgcagaaacttcaggacttgacactccgagacctggagaagcaggaacgggaaaaagctgccaacagcttggaagcgttcatatttgagacccaggacaagctgtaccagcccgagtaccaggaagtgtccacagaggagcagcgtgaggagatctctgggaagctcagcgccgcatccacctggctggaggatgagggtgttggagccaccacagtgatgttgaaggagaagctggctgagctgaggaagctgtgccaagggctgttttttcgggtagaggagcgcaagaagtggcccgaacggctgtctgccctcgataatctcctcaaccattccagcatgttcctcaacgggggccccggctcatcccagagatggaacacgatcttcacttgaacgcgtggagatagacacaccgctctcgaagcaacacgtcactcaatgagaccctgggggcctgcgaaagaactgcacacttctgcgacccgaagcaacggctacggatggcccgggcacacacgcacacccctgcagaagcaccacaaacagaaacacgaaggcaacaaatagaaagcgccccgggacccgaacacgaggacgcaactggagcgaccacatcggcccaagagagcaccaaagacggccgagagccgcgacccaaggaccaaaaaagagaggaacccggggaaccagaacatcgccccgaaaagacccgccggggcaaagaggcagcgacggagaaaggggaacacgagccgaagagggatgacaacaggaggactgtgagcacccctcgagatgagcagtgctgacatgatagcaaggtcatcacggcacactggaaaagatagaaggggtcttgacaaggacagcgaaggacgagaacggacgacagacacc

SEQ ID NO: 9232 - DNA, 1901 bp, Homo sapiens
  misc_feature (117)..(117): n is a, c, g, or t
agcggaaggggtagcgggggtggatggaggtgcgggccggccacccctcctaggggagacagcgtgcgagctccgggggcgggtcgggagcgcaagggagggccgcgcggacgccgngcgctcggcctcgcaccggggggcacgcagctcggcccccggtctgtccccacttgctggggcgggccgggatccgtttccgggagtgggagccgccgccttcgtcaggggcactatggcagacaaagttaggaggcagaggccgaggaggcgagtctgttgggccttggtggctgtgctcttggcagacctgttggcactgagtgatacactggcagtgatgtctgtggacctgggcagtgagtccatgaaggtggccattgtcaaacctggagtgcccatggaaattgtcttgaataaggaatctcggaggaaaacaccggtgatcgtgaccctgaaagaaaatgaaagattctttggagacagtgcagcaagcatggcgattaagaatccaaaggctacgctacgttacttccagcacctcctggggaagcaggcagataacccccatgtagctctttaccaggcccgcttcccggagcacgagctgactttcgacccacagaggcagactgtgcactttcagatcagctcgcagctgcagttctcacctgaggaagtgttgggcatggttctcaattattctcgttctctagctgaagattttgcagagcagcccatcaaggatgcagtgatcaccgtgccagtcttcttcaaccaggccgagcgccgagctgtgctgcaggctgctcgtatggctggcctcaaagtgctgcagctcatcaatgacaacaccgccactgccctcagctatggtgtcttccgccggaaagatattaacaccactgcccagaatatcatgttctatgacatgggctcaggcagcaccgtatgcaccattgtgacctaccagatggtgaagactaaggaagctgggatgcagccacagctgcagatccggggagtaggatttgaccgtaccctggggggcctggagatggagctccggcttcgagaacgcctggctgggcttttcaatgagcagcgcaagggtcagagagcaaaggatgtgcgggagaacccgcgtgccatggccaagctgctgcgtgaggctaatcggctcaaaaccgtcctcagtgccaacgctgaccacatggcacagattgaaggcctgatggatgatgtggacttcaaggcaaaagtgactcgtgtggaatttgaggagttgtgtgcagacttgtttgagcgggtgcctgggcctgtacagcaggccctccagagtgccgaaatgagtctggatgagattgagcaggtgatcctggtgggtggggccactcgggtccccagagttcaggaggtgctgctgaaggccgtgggcaaggaggagctggggaagaacatcaatgcagatgaagcagccgccatgggggcagtgtaccaggcagctgcgctcagcaaagcctttaaagtgaagccatttgtcgtccgagatgcagtggtctaccccatcctggtggagttcacgagggaggtggaggaggagcctgggattcacagcctgaagcacaataaacgggtactcttctctcggatggggccctaccctcaacgcaaagtcatcacctttaaccgctacagccatgatttcaacttccacatcaactacggcgacctgggcttcctggggcctgaagatcttcgggtatttggctcccagaatctgaccacagtgaagctaaaaggggtgggtgacagcttcaagctggttggacaggtttgagtcaaattgtactttgctccattgttaattgagaaactgtttcaataaaatattcttttctaca

SEQ ID NO: 9233 - DNA, 312 bp, Homo sapiens
tctttttttttttttttggtgtctgcactccccaccgtatctgtcccttcctctttctcccattttgagggatattataagggcaacagttttatagtctcaatattgagggtaagactggttaatagatagagtatccaaattgaatttattaaacacagttctgtgtgcatttccttctgcaaatctgagaataaagtgattacagtttcatcctaaaatactttaaaaatcagttggttttagaaataggtttttttccttttgcatgtaagaatggacagctatttttaggaaggcatgcacctgtta

SEQ ID NO: 9234 - DNA, 450 bp, Homo sapiens
tgtttactgcctacaaagggtgggcattcagatatgggaacaaatggatacacatgtacatgaaaatttgtgtcaagtgtgaaatcatctttaaaccatctttctcccctacgaacactctttaaagaacttccttttttcctactttctatgacaatctttaaagagcttcctttttataggccacgcacagtggctcgtgcctgtaattccagcattttggaaggccgaggtaggaggactgcttgagcccaggagttttagaccatcctgggaaacaaagagagtgacccctagatgagtgtggtgatgcaagcttatagttccagctactcaggagactgaggagagaggatcccttgagcccaggaggtccaggctgcagtgagctatgattatgccactgtacttcagcctgggtgacagagaccctgtatttaaaaaaaaaaa

SEQ ID NO: 9235 - DNA, 462 bp, Homo sapiens
ttgtatgctttttaaaaacatggttttacttttaaaacacattttatatgttttattgtgagccctaaatgtcttcataaatggacttgtacctaatgcaatcttctttcctattccttaagccctggtaggaactattggatccttttctcttcttctctttcttctttttttactgcttccaaaatcacctatgcagtttgggagcagaggcctgctccctaaagaagtcagctttgctttggaagcagatttatgcctcaagccaaatgaagagaaacaggaacggagagactttgtgtcctttttcttcagccaagttccttgcaacctgtttgttattcttggagccagaaagagagtaaagtactttgcataatggaggcaaatactggggatggatcaggagcagaccttgttctagacctgatttttaaccgggtcagttctgagtcaggcaat

SEQ ID NO: 9236 - DNA, 567 bp, Homo sapiens
ggcttctgacccccagaagtcctaccttttcccctgctcagtccttatctattttaggcatttagggaaaacaccctaatcagctgctggtggctgagatccaagagaaactcagcttcctctttagtgggtgcatcagggttggggctccttaggagcacctggcatatggcagccccccaaacaccttttcagggggtagtttgcatcgtcttccccttcttgcttctggctgcaaagtggttcctatcacctctcctcacacccttaagttctcaaggttactatgggctactcctgttgcggtttaggtttggttgttgacttgggccagaggttgccagtttgtggatgtgtgtgtggctgcccatggcctgaggctgcacccacccatgttggttgtggcaagtgtctctgactgattaagggcaaaaacgagcagggacttctcacatttgccttaactgtcacagggcctcagctgggttgtctgctctttccttcctggatcattttcccagcccttagttcccataggaaactttctctcaaataatgatttctgct

SEQ ID NO: 9237 - DNA, 679 bp, Homo sapiens
catagcaggcttcctggtgtagctggcaccacatccctccctgacacacggcctccttattgcccctgctacttgcctttttctctcctccctttccttcccttcattccccctggcttccccttcccaactctcagaatccctggctgcctcaaccacaagaacaaagctgtgcagaagcctgaacctggagcttctgcaagatgaggtggggaatgagctaacccagctggaaagcagcctgctgatccctgggagagacggcgcttgggccaacccaccctccccaaggtggtcccctgcctcagctccacccgcttccccagatgaacttctttctctccctccagcgcttcagaggatgcacagctgtgtgtacttgaccctgagcctgggctagtgctggggacatagccagtctggctgatacccatatcagtacagaaagctgtcctcacccacttcatgcactagttgcattggtatgaagcattagctttataactatcccatttactgcaggcataaacctatatcaattggtggggatggaggttaaatgagagaagacatcaaagatgcatagaactattgggcccctttcaattaataaataaaatttgtaggaggccattagtttgtactgtgctcctgtaatggacccaacagaccaaacaaa

SEQ ID NO: 9238 - DNA, 296 bp, Homo sapiens
caaaaacaaaaacaaaaaactccaatagcaatatcttacatctctgtaaaccctaggcctagtacagtatcgtgacaatagtgggcatataataaatatttgttgatgatgatgatggtaaaagctgcaatattaagtaaattcagtgagagaattcatgaaaattgcaagtatctagtgaatattggaagtaggatatctggggcattagagtgagaagagaggatggagataaataggaacatgaaaaagaagagaatactatatataagagaatgagttgcttcttgattttg

SEQ ID NO: 9239 - DNA, 459 bp, Homo sapiens
ggagatgctcactaggcagacagaatcagccaccacagcccactccctcagccagtattactttgactaagttagtgaggaaccaggccccagattaagaagcagaactcacactgtcatctgctgtgtgcctggctggctcatgcataccttgtctatctaatgtggaccaaagccctgtggcacaccctgctggttacccccagtggttaccctggcacagaggaggaaagggagtcgtgggagggagaaggacttccctgggaggtctctgggctggcaagttgggtgacacaggtccggttggctgcaacctggggctctgctgttgtaatcataaatgtgtgtgtgtgtacagttgtttacaatgtcagcatgggtgtccttgtttgttagagatacatgccactgctcccatcatgaggaaaatcccaagccctccccatgatttttgccagt

SEQ ID NO: 9240 - DNA, 2082 bp, Homo sapiens
ggcagcaaaaaaatcgtttctgagaacgcatcccactgaatttagaataaaagccaaactcttagaacctatgtagtggcccttactgacctctcagacctgatttccttcttcctcactgcagccacaatgactctcttcttgttccagagtgttcccaccccagggcctttgagtctactgtcccctccaccccgaatgcattctgactccactcaagtgtcactctccaagagccaagttgctcccctgtcccctgctcttctctgtctatgcattcttttatagtgcttaacacagtctgaaatagtctcgcccctgtgtgtgtgttgtctgactccccctctagaataccaggatccttggaggtgagggagttcctgttttgcttgtggctacagctcagccactggaatcatatctgacaattggttggcatcagtcgcaactctgggaatgagggaatgaggactagagggggctggacgggcccagccacctgccttcatcattgtcatttctctttatcactacggtaactcctccttcccctcatgactttggaagtcattcagcagccactccagccccaccaacctgcccctatcccagaggggcctgggatggagggagagaaccactgaggcccctccacatccctgcacccgctgtgcccatgggggcggagaacacatctgacccggctctgagggagccgtggcctctctagggagggctggcctgctggtgagacttcactcataatacaagataattataccagagttgtcatgaggcggtggtgattaattgctgtgcgtggggcacggacggacagcgaggtatagagagtggagagaaggccgcagcccagctgggcttccaggtgggagctcagcctccccatctctgccgtggaagggactcagaggtgtcaggccaagcatgcaggcaggcttgtgacaaactccttggccaggagctctgagaattagcttcacttccctcagaaatgccccaattccctcctggaagaggagctgtgtgacagctcaggccagggggtcgggactccccccatctcctccgcacacacatacccctgcacacatacccagccacgtacagctgggtggctgtacgcaagtcatttttctactctgagcctcagggtcttcctctgtccacctccccccaggattactggcagaattaggtgtgagcttgcatttaaaaagaggtttgttttgtaaacccaggctttgcaaattggcagcccaagtctcaggggcctgtgcagtgactgatcattaccaacatttcgaagtgagagatgtcacataaagagcgtcatttcgagcttctcttgaaaagttgtaaggtgagctaccctgggactgtattcctgaatggcaatgtgatggcagagtcctgcagtattaccacctgtggacttgtgcaccagggttcccacccacccacttcaggcccttggttcagggatgtgcccgtcatggaaataccaggtgctgtggctctgctggttttggctttccttctctgtaaccttccaatatctttctccttccaggtactgtaaaccacttagtaattaattagttaataaattcatctcatcagcacttttaaataatgtgctaggccacactgtcatggaccccagatatacagcagcaaacaaagcagccatggtaccttccctcagggagcagtcagtccagtggaggagtcagatatgactcaccacacagatcgaaaaatctccacaaattatgagaagaatgctgagggaagaaagaacataggtggaccgctgctgagtccaggcttacttgcagagatctatgctggccaggccctgtgctaggcagcagaggacatggaataaaatcaaataaggtcactgtgtgcaggcacctcacggtgtggtaaaggagcagccccatccacaggttctattaattccagcctgtgagaattggaaccacagggtgaattttggaggacaggcacttacactaatctggaagcataatatataaagagtacctacaaatcaat

SEQ ID NO: 9241 - DNA, 2691 bp, Homo sapiens
ggcagcaaaaaaatcgtttctgagaacgcatcccactgaatttagaataaaagccaaactcttagaacctatgtagtggcccttactgacctctcagacctgatttccttcttcctcactgcagccacaatgactctcttcttgttccagagtgttcccaccccagggcctttgagtctactgtcccctccaccccgaatgcattctgactccactcaagtgtcactctccaagagccaagttgctcccctgtcccctgctcttctctgtctatgcattcttttatagtgcttaacacagtctgaaatagtctcgcccctgtgtgtgtgttgtctgactccccctctagaataccaggatccttggaggtgagggagttcctgttttgcttgtggctacagctcagccactggaatcatatctgacaattggttggcatcagtcgcaactctgggaatgagggaatgaggactagagggggctggacgggcccagccacctgccttcatcattgtcatttctctttatcactacggtaactcctccttcccctcatgactttggaagtcattcagcagccactccagccccaccaacctgcccctatcccagaggggcctgggatggagggagagaaccactgaggcccctccacatccctgcacccgctgtgcccatgggggcggagaacacatctgacccggctctgagggagccgtggcctctctagggagggctggcctgctggtgagacttcactcataatacaagataattataccagagttgtcatgaggcggtggtgattaattgctgtgcgtggggcacggacggacagcgaggtatagagagtggagagaaggccgcagcccagctgggcttccaggtgggagctcagcctccccatctctgccgtggaagggactcagaggtgtcaggccaagcatgcaggcaggcttgtgacaaactccttggccaggagctctgagaattagcttcacttccctcagaaatgccccaattccctcctggaagaggagctgtgtgacagctcaggccagggggtcgggactccccccatctcctccgcacacacatacccctgcacacatacccagccacgtacagctgggtggctgtacgcaagtcatttttctactctgagcctcagggtcttcctctgtccacctccccccaggattactggcagaattaggtgtgagcttgcatttaaaaagaggtttgttttgtaaacccaggctttgcaaattggcagcccaagtctcaggggcctgtgcagtgactgatcattaccaacatttcgaagtgagagatgtcacataaagagcgtcatttcgagcttctcttgaaaagttgtaaggtgagctaccctgggactgtattcctgaatggcaatgtgatggcagagtcctgcagtattaccacctgtggacttgtgcaccagggttcccacccacccacttcaggcccttggttcagggatgtgcccgtcatggaaataccaggtgctgtggctctgctggttttggctttccttctctgtaaccttccaatatctttctccttccaggtactgtaaaccacttagtaattaattagttaataaattcatctcatcagcacttttaaataatgtgctaggccacactgtcatggaccccagatatacagcagcaaacaaagcagccatggtaccttccctcagggagcagtcagtccagtggaggagtcagatatgactcaccacacagatcgaaaaatctccacaaattatgagaagaatgctgagggaagaaagaacataggtggaccgctgctgagtccaggcttacttgcagagatctatgctggccaggccctgtgctaggcagcagaggacatggaataaaatcaaataaggtcactgtgtgcaggcacctcacggtgtggtaaaggagcagccccatccacaggttctattaattccagcctgtgagaattggaaccacagggtgaattttggaggacaggcacttacactaatctggaagcataatatataaagagtacctacaaatcaataaaaaaaatagaaaaacaaagagcagagtatatgaacagaaaattcaatgaaaaggaaatagaaatggctcttaaatgaatgaaaacatactctcactcagagaaaatgaaaatttaacccatgtcaagatacttggggtgaagggaagtgttataaaattcgattgtggtgatggttataaccctataaatttactaaaacttattgaagtgtacctttaaaacaaatgaactttatagtatgtcagttatatcacaataaggctattttaaaaataaaaacactttgagataccattttatacctgttggtattagcaaatgtcaaaacactggataatgcattatgttcctaaaggcatgggggagacggcctggggcaagcgtccactgatgcattcttgggttggggtgggcaacaggacgctgtcaaacatacaaatacatttacgctttgagctgggaattccactcataggacttcatctgatatatatgctttacatctgaaaaatgtataaggaaattcaccacagcctcatagattatggcaaaagtttggaaacaaaagatgtttgtctacaggtgaaaggttatgccactgtcaaa

SEQ ID NO: 9242 - DNA, 1464 bp, Homo sapiens
ggaggggtagcattaggagaaatacctaatgtaaatgatgagctgatgggtgcagcaaaccaacatggcacatgtatacctatgtatgaaacctgcacgttgtgcacctgtaccctagaatgtttggaatttatgcattttccatttttttaaaaaagtggtttatttttattactttctttttgtatgtctaaatgatgagataaaacagaagggttcagactgctgtatgcaagtgacattctgcaaatattatgatgtgggtattgctggtcttcatttctaataacaagaggccaaatcggatctaattgtcactattttctctttatgactttggtttcagagatacaagagacattgtgatgagccatataaacagtctgatgggctgaatgcaatttgtaggtctagtgaatgaaaatagtcttggttcaaaatcgtagaattatgattttatggtcctcatttactttattttatttttactttattccagcaaacgttttatattttctactttttgccagcatttcattatgggtatatattaagcaccatatgactttttaaaatattgctgtagagtagtcaaagctcacatgagacgccacccaagcagctgtcatatgaatgcatatctgttgttcaaggaatgtatgcttcatgtaccggtgagcatgcattcagaggcttccaaagtgtttccattttaatgggtagtgggggatgctaaaggattattttaattgttatttttccaaatggaaatgtaaaagagtccactgccacgtgaatgcaacactgtagaccttcctgaatgcctttcagaaccccctccatttggcagtgtctgagctcccctcctgtcctgatagtccatgatgctcaccagcaccccctgggaaaatgaccccttattttctcttaggaggagaaagatgtgtaggtcccaaggcccatgttctagggaagtgtgatgcagatttgaaccaattacacatagaggggaacatatgataatttgagggatcacatcaaattatccggattgacaccaaaatgaagaagtggtgagagcctgtcagataagaaaaattttaaggactggtaatgtccagtgttgatgagagtgtggggaaatggatactctttagttggttttgcttttaagatagtttagcagaatctgtcaatgttttaaatgcatgtatcttttgacccagcagtttctataggattctctcttacagataaacccatacttgtgaacaaatataccatatttcatcgaatctaaaacaccctaaattgtaaagtgtgctattattttatgtaccattaagaaaacaaaatgtgctattattttatgtaccattaagaaaacaaaacccaccttttttttttaaaaaaaaaaaatctaaacaaaggataattttaaataaaaacacattatataaaaaa

SEQ ID NO: 9243 - DNA, 421 bp, Homo sapiens
acggtgtacttaccatagccaggcgctacgctgagcttttcacgtgtgacacctcactgaatcccccaaccatcctagtcagcatgtattattattcccattttagagacgaggaaactggcattcaaagagcttagatacttgctggagatccacacctcgaaagtgtagaaccaggtttttctgatgccagaagctgtttctaaatgctctgctgaactagctctgcaggaacagaatttggacaaggagatacaggagcaaggggatggggcattttaggttcttagaaagtgagtggatgcgtgttgggaagccagtacctggaggctgtgtctgtgcacggaatttacagcctctccaaaccccttcccaggaactggatccgccagtacccagccttggtgaactgcacaaccat

SEQ ID NO: 9244 - DNA, 3954 bp, Homo sapiens
ctctgccagggaactggcaagcaacaaagaaggtggtgattggctggattcttgctcatggctcctggcagatctgacaaatcctcttgcttttgctctaatctctgtctggatacttttaggaaaagaaccttgttattatgtactaaagtgaataatttgtgctcttagagtaggagttggaactataggacttgaaggcaagagcaggtatcttatcaaggatctactcactcagtttccctaaagctctctctccagatcggattcaaccgcacatcatgacagatgttccggctacatttacccaggctgagtgtaatggggataaaccacctgaaaacggtcaacaaacaatcactaaaatcagtgaggaattgactgatgtggacagccccctgccacactacagggtagaacccagtctggaaggtgcactcaccaaaggaagtcaggaggaaagaagaaaattacaagggaacatgctgctcaactcatccatggaggacaaaatgctaaaagaaaacccagaagagaaactctttattgttcataaggctatcacagatctttctctccaagaaactagtgctgatgaaatgacattcagagaagggcatcagtgggagaagattcctctgagtggcagtaaccaggaaataagaagacagaaggagaggattactgagcagcctctcaaagaggaagaagatgaggacaggaagaacaaaggtcaccaggcagctgaaattgaatggctgggatttcgaaaacctagccaagctgacatgttacattctaaacatgatgaggagcagaaggtttgggatgaagaaattgatgatgatgatgatgataattgcaataatgatgaagatgaagttcgagtgatagaatttaagaaaaaacatgaagaggtttctcaatttaaagaggaaggtgatgcaagtgaggactccccactgagcagtgccagttcccaagctgtgacacctgatgagcagccaaccttagggaagaagagtgatatctccagaaatgcttattccagatacaatacaatatcctatcggaaaatcagaaagggaaataccaagcaaagaattgatgaattcgagtctatgatgcatttataaactaactggaactgagaaattctcatgcccactaaaggaaaagctaattctattgccccagggtgcatatttctatgccttatttgagttatcacttggagggaggtggaagttgactctctttttcactgtagaataatgtggaaataaccctagataaaaattcagtctgataacctcaaatcaaaaagctttaaataaattcttgggcatttatcttttaaaacttcactaatatagcattgtgtgataagcactaagcagtcagtcccctgggggaatctggcataattcggctataaatgtagcaatgcttggaaaggtagtcatcaaatgagactatttgaggggactatttgaaatgattctggtatttcttttggtatctttcttcctgtacattggagtgatggaaagtctggtattaaaacctctcttacttttaaacttgattttgcagactctggcaataagccttccaaaattctgtgccttttctattatcaccaaacaatatgttaagtggctttccttggcatctacagagaaaacattctatagccctccttcctaggtgttaccattcactgaatcttctctcagagggagatgagcaattgtcagtcaggataattctgtttgctaaatgttgcctttatgctttcaaactgaattaaacccattgtgaggttgacactgggaggggctagaagattggtgggcagcagactaaagagttatgttggatagttttatttctgtggctgaaaataaaatcttgtctagcacagttaaagtcattaaaaataaaaatgacagctttagcacaattttaagaaaatgcccctctctattaccacattttctcttattaacagtatctcagaataattttctttccttagaaacctgagagaatgctagtcataactgtactagttactatgaaaatggaaataattatcttagaatattttcaaagtagagcgtgagcatgtatttttagtgggagagctctgatagttgttgggaatatataatttactggacctcagcccaaatcaagatgcttaaaattgtacttgtggagcttcactcaaaccaatgtgtcaaataacgtattgaatatttatgaaaagagagactatatttatattcttagatagtttgttccacaatttttcatttcatgcttccatatatattaccctgaactttctatcaccacagataaagattttgttttgccctgcaaataaaaagacaattccttattgtctgaatgtaatacagtcttcattgtactattcaaccctttgtttctttctttttcattttgtgaaaaactccatgttagtcctcttagatgactgcttatttatgtgtaacataaatcccacatattctaatgacaacttctttaatccttccgggtcatatattatatttccatagtatcacatactattatttagttgtttacaagactccaatttgaattcaggattacagtgctcctttcattctttcaaacagataacataaaagttctgttaccctcattctatacaacctatggatttcatgtgttacaatatcagtttccagaataaagtgagggaaatcaggtctttattgataaagttagggaggagattgatgcaataggacaatttccaatttaatttagatcctctaatctttctacatggacaagctgttttcttttctaggttactgataacccctacaattttcgacttaacttcaaaacacagtattgtgttatctatcacataacaggaccatgtttttaacctaccatcaagagcctgtattttgagttattccaacagagatgatggattcctgtagaactagaggtgggtgacctatggttatgtggcacggcaaagcaagtacctcttaagggactctaatatatgctaacgctggtcctcttagctctgtgctctcaccagacaatgaatgaactatgaaagatttagtcaacagaaactattttagggtatgtttagttggtaaatgcttcatgttcatggatgacacaatgtttttgcaaaaaaaccctgaaactattctttggcattggtgtccatggccctataccgccatcttacacgaaagccacagagttgaaagccacagagttgaaagccacagagttaagtgacctcaggtaacataatggtgatggttggccatttgagtctttgtaacctaggaaagacaaaggtctgattcagattgcatgggggatttttaacatatttgaaactcagggggaacatgattaagaacacaaactggtagctacacatgaaggtttacttgagcttttgtgattcaaagttcaggggtggtaaggactctggtaccagggaagagggagaattaatttattgtgcaaatgctggtatttcttacatgattttttgttttcctctgttgctagataaatagaaactaataatagctctatttctctgccaatataaaatctacctttcatataatgctacattgaaggcacagaatttgctaccatctctctctccccctacctaccaaactatccacaatttaaataaagaactgctgtgtctgacttactctcaataaaaaaaaaaaaaaaaaaaaaaaaaaaaaaaaaagaaaaaaaaaaaaaaaaaaaaaaaattgcccgcgtttcacacgttggactggaaaccctgcgttcccacttaatgcttgagtccccttcgcagttgggaataccaagagcccgacggacgcctttcccgttgccacctgttgc

SEQ ID NO: 9245 - DNA, 3900 bp, Homo sapiens
ctctgccagggaactggcaagcaacaaagaaggtggtgattggctggattcttgctcatggctcctggcagatctgacaaatcctcttgcttttgctctaatctctgtctggatacttttaggaaaagaaccttgttattatgtactaaagtgaataatttgtgctcttagagtaggagttggaactataggacttgaaggcaagagcaggtatcttatcaaggatctactcactcagtttccctaaagctctctctccagatcggattcaaccgcacatcatgacagatgttccggctacatttacccaggctgagtgtaatggggataaaccacctgaaaacggtcaacaaacaatcactaaaatcagtgaggaattgactgatgtggacagccccctgccacactacagggtagaacccagtctggaaggtgcactcaccaaaggaagtcaggaggaaagaagaaaattacaagggaacatgctgctcaactcatccatggaggacaaaatgctaaaagaaaacccagaagagaaactctttattgttcataaggctatcacagatctttctctccaagaaactagtgctgatgaaatgacattcagagaagggcatcagtgggagaagattcctctgagtggcagtaaccaggaaataagaagacagaaggagaggattactgagcagcctctcaaagaggaagaagatgaggacaggaagaacaaaggtcaccaggcagctgaaattgaatggctgggatttcgaaaacctagccaagctgacatgttacattctaaacatgatgaggagcagaaggtttgggatgaagaaattgatgatgatgatgatgataattgcaataatgatgaagatgaagttcgagtgatagaatttaagaaaaaacatgaagaggtttctcaatttaaagaggaaggtgatgcaagtgaggactccccactgagcagtgccagttcccaagctgtgacacctgatgagcagccaaccttagggaagaagagtgatatctccagaaatgcttattccagatacaatacaatatcctatcggaaaatcagaaagggaaataccaagcaaagaattgatgaattcgagtctatgatgcatttataaactaactggaactgagaaattctcatgcccactaaaggaaaagctaattctattgccccagggtgcatatttctatgccttatttgagttatcacttggagggaggtggaagttgactctctttttcactgtagaataatgtggaaataaccctagataaaaattcagtctgataacctcaaatcaaaaagctttaaataaattcttgggcatttatcttttaaaacttcactaatatagcattgtgtgataagcactaagcagtcagtcccctgggggaatctggcataattcggctataaatgtagcaatgcttggaaaggtagtcatcaaatgagactatttgaggggactatttgaaatgattctggtatttcttttggtatctttcttcctgtacattggagtgatggaaagtctggtattaaaacctctcttacttttaaacttgattttgcagactctggcaataagccttccaaaattctgtgccttttctattatcaccaaacaatatgttaagtggctttccttggcatctacagagaaaacattctatagccctccttcctaggtgttaccattcactgaatcttctctcagagggagatgagcaattgtcagtcaggataattctgtttgctaaatgttgcctttatgctttcaaactgaattaaacccattgtgaggttgacactgggaggggctagaagattggtgggcagcagactaaagagttatgttggatagttttatttctgtggctgaaaataaaatcttgtctagcacagttaaagtcattaaaaataaaaatgacagctttagcacaattttaagaaaatgcccctctctattaccacattttctcttattaacagtatctcagaataattttctttccttagaaacctgagagaatgctagtcataactgtactagttactatgaaaatggaaataattatcttagaatattttcaaagtagagcgtgagcatgtatttttagtgggagagctctgatagttgttgggaatatataatttactggacctcagcccaaatcaagatgcttaaaattgtacttgtggagcttcactcaaaccaatgtgtcaaataacgtattgaatatttatgaaaagagagactatatttatattcttagatagtttgttccacaatttttcatttcatgcttccatatatattaccctgaactttctatcaccacagataaagattttgttttgccctgcaaataaaaagacaattccttattgtctgaatgtaatacagtcttcattgtactattcaaccctttgtttctttctttttcattttgtgaaaaactccatgttagtcctcttagatgactgcttatttatgtgtaacataaatcccacatattctaatgacaacttctttaatccttccgggtcatatattatatttccatagtatcacatactattatttagttgtttacaagactccaatttgaattcaggattacagtgctcctttcattctttcaaacagataacataaaagttctgttaccctcattctatacaacctatggatttcatgtgttacaatatcagtttccagaataaagtgagggaaatcaggtctttattgataaagttagggaggagattgatgcaataggacaatttccaatttaatttagatcctctaatctttctacatggacaagctgttttcttttctaggttactgataacccctacaattttcgacttaacttcatcaagagcctgtattttgagttattccaacagagatgatggattcctgtagaactagaggtgggtgacctatggttatgtggcacggcaaagcaagtacctcttaagggactctaatatatgctaacgctggtcctcttagctctgtgctctcaccagacaatgaatgaactatgaaagatttagtcaacagaaactattttagggtatgtttagttggtaaatgcttcatgttcatggatgacacaatgtttttgcaaaaaaaccctgaaactattctttggcattggtgtccatggccctataccgccatcttacacgaaagccacagagttgaaagccacagagttgaaagccacagagttaagtgacctcaggtaacataatggtgatggttggccatttgagtctttgtaacctaggaaagacaaaggtctgattcagattgcatgggggatttttaacatatttgaaactcagggggaacatgattaagaacacaaactggtagctacacatgaaggtttacttgagcttttgtgattcaaagttcaggggtggtaaggactctggtaccagggaagagggagaattaatttattgtgcaaatgctggtatttcttacatgattttttgttttcctctgttgctagataaatagaaactaataatagctctatttctctgccaatataaaatctacctttcatataatgctacattgaaggcacagaatttgctaccatctctctctccccctacctaccaaactatccacaatttaaataaagaactgctgtgtctgacttactctcaataaaaaaaaaaaaaaaaaaaaaaaaaaaaaaaaaagaaaaaaaaaaaaaaaaaaaaaaaattgcccgcgtttcacacgttggactggaaaccctgcgttcccacttaatgcttgagtccccttcgcagttgggaataccaagagcccgacggacgcctttcccgttgccacctgttgc

SEQ ID NO: 9246 - DNA, 3943 bp, Homo sapiens
agcgggtctctactgccaaggtgctaatgccgaacccctgtgggatctctggtccaaggaaacatctgcacacaggccaggatggcgcttagcttcatctgtgctgcaaactctcatcagtaggcttgctggctctgtgaccttactagctgaactccttaatctctctgcacttcatttttctagtctataaaatggagataacaacagcacctacctcagaagactgttatgaagactctctctccagatcggattcaaccgcacatcatgacagatgttccggctacatttacccaggctgagtgtaatggggataaaccacctgaaaacggtcaacaaacaatcactaaaatcagtgaggaattgactgatgtggacagccccctgccacactacagggtagaacccagtctggaaggtgcactcaccaaaggaagtcaggaggaaagaagaaaattacaagggaacatgctgctcaactcatccatggaggacaaaatgctaaaagaaaacccagaagagaaactctttattgttcataaggctatcacagatctttctctccaagaaactagtgctgatgaaatgacattcagagaagggcatcagtgggagaagattcctctgagtggcagtaaccaggaaataagaagacagaaggagaggattactgagcagcctctcaaagaggaagaagatgaggacaggaagaacaaaggtcaccaggcagctgaaattgaatggctgggatttcgaaaacctagccaagctgacatgttacattctaaacatgatgaggagcagaaggtttgggatgaagaaattgatgatgatgatgatgataattgcaataatgatgaagatgaagttcgagtgatagaatttaagaaaaaacatgaagaggtttctcaatttaaagaggaaggtgatgcaagtgaggactccccactgagcagtgccagttcccaagctgtgacacctgatgagcagccaaccttagggaagaagagtgatatctccagaaatgcttattccagatacaatacaatatcctatcggaaaatcagaaagggaaataccaagcaaagaattgatgaattcgagtctatgatgcatttataaactaactggaactgagaaattctcatgcccactaaaggaaaagctaattctattgccccagggtgcatatttctatgccttatttgagttatcacttggagggaggtggaagttgactctctttttcactgtagaataatgtggaaataaccctagataaaaattcagtctgataacctcaaatcaaaaagctttaaataaattcttgggcatttatcttttaaaacttcactaatatagcattgtgtgataagcactaagcagtcagtcccctgggggaatctggcataattcggctataaatgtagcaatgcttggaaaggtagtcatcaaatgagactatttgaggggactatttgaaatgattctggtatttcttttggtatctttcttcctgtacattggagtgatggaaagtctggtattaaaacctctcttacttttaaacttgattttgcagactctggcaataagccttccaaaattctgtgccttttctattatcaccaaacaatatgttaagtggctttccttggcatctacagagaaaacattctatagccctccttcctaggtgttaccattcactgaatcttctctcagagggagatgagcaattgtcagtcaggataattctgtttgctaaatgttgcctttatgctttcaaactgaattaaacccattgtgaggttgacactgggaggggctagaagattggtgggcagcagactaaagagttatgttggatagttttatttctgtggctgaaaataaaatcttgtctagcacagttaaagtcattaaaaataaaaatgacagctttagcacaattttaagaaaatgcccctctctattaccacattttctcttattaacagtatctcagaataattttctttccttagaaacctgagagaatgctagtcataactgtactagttactatgaaaatggaaataattatcttagaatattttcaaagtagagcgtgagcatgtatttttagtgggagagctctgatagttgttgggaatatataatttactggacctcagcccaaatcaagatgcttaaaattgtacttgtggagcttcactcaaaccaatgtgtcaaataacgtattgaatatttatgaaaagagagactatatttatattcttagatagtttgttccacaatttttcatttcatgcttccatatatattaccctgaactttctatcaccacagataaagattttgttttgccctgcaaataaaaagacaattccttattgtctgaatgtaatacagtcttcattgtactattcaaccctttgtttctttctttttcattttgtgaaaaactccatgttagtcctcttagatgactgcttatttatgtgtaacataaatcccacatattctaatgacaacttctttaatccttccgggtcatatattatatttccatagtatcacatactattatttagttgtttacaagactccaatttgaattcaggattacagtgctcctttcattctttcaaacagataacataaaagttctgttaccctcattctatacaacctatggatttcatgtgttacaatatcagtttccagaataaagtgagggaaatcaggtctttattgataaagttagggaggagattgatgcaataggacaatttccaatttaatttagatcctctaatctttctacatggacaagctgttttcttttctaggttactgataacccctacaattttcgacttaacttcaaaacacagtattgtgttatctatcacataacaggaccatgtttttaacctaccatcaagagcctgtattttgagttattccaacagagatgatggattcctgtagaactagaggtgggtgacctatggttatgtggcacggcaaagcaagtacctcttaagggactctaatatatgctaacgctggtcctcttagctctgtgctctcaccagacaatgaatgaactatgaaagatttagtcaacagaaactattttagggtatgtttagttggtaaatgcttcatgttcatggatgacacaatgtttttgcaaaaaaaccctgaaactattctttggcattggtgtccatggccctataccgccatcttacacgaaagccacagagttgaaagccacagagttgaaagccacagagttaagtgacctcaggtaacataatggtgatggttggccatttgagtctttgtaacctaggaaagacaaaggtctgattcagattgcatgggggatttttaacatatttgaaactcagggggaacatgattaagaacacaaactggtagctacacatgaaggtttacttgagcttttgtgattcaaagttcaggggtggtaaggactctggtaccagggaagagggagaattaatttattgtgcaaatgctggtatttcttacatgattttttgttttcctctgttgctagataaatagaaactaataatagctctatttctctgccaatataaaatctacctttcatataatgctacattgaaggcacagaatttgctaccatctctctctccccctacctaccaaactatccacaatttaaataaagaactgctgtgtctgacttactctcaataaaaaaaaaaaaaaaaaaaaaaaaaaaaaaaaaagaaaaaaaaaaaaaaaaaaaaaaaattgcccgcgtttcacacgttggactggaaaccctgcgttcccacttaatgcttgagtccccttcgcagttgggaataccaagagcccgacggacgcctttcccgttgccacctgttgc

SEQ ID NO: 9247 - DNA, 439 bp, Homo sapiens
aaagaatccccttgatgtgaatcagtatccaccaggaaaaaaacaattaatcaaaaactgatcatttaaaaatcagtcactttaattccctcatttttacagtaatacaaagtcagaacaggaaagatacctacttgggttatattttcaaatctaatagtcactgctcttaaactccaaaatgtacccgtatcttcaaatacccttgaaatatgcaactaccctaaagaatatttagttcagaaagcagtacagaaaggtctcaatttacaagagagacaaacaagcactgactttagacaactcaggccaaaacaagtcaagggtatgatgtgcacaacgatctaactgaaatgacacattttccttactaattaaattaggaaacacttttgtgttctacttacactctgtaacactgaaaacacaaacatgttta

SEQ ID NO: 9248 - DNA, 429 bp, Homo sapiens
agtgtggttgtagactctcagaaggtcttcaaaataaatatcagagggatttggaggaggtgacaaagatgaccaaaatatgagttagcccaatataacacttgcaagtctctaaaaatacagttcatgatgatgcatcttgagtgcattggtggcagtggagggtcagaatttctgttaggtttcatttgttttaactctcctgaagttgctggtaaatcagaagaattttaacatggaaagagaaaaaggaaaggagaataatcagatttatgaggccatttggcaggccatgcgtcccaggggcagagatagctttacagcaagaactgacagtaatttctagtaactctcttaagccctcaaatcccccaaacctggttgtatgaagtagtctctctttaaaataaatgcctgaaagaaatctta

SEQ ID NO: 9249 - DNA, 504 bp, Homo sapiens
tgcaccatcaaggtgaaatcatggaaaggtaaaagtaaataatatgcctgtttgagtgcttagattatcagcaggaattgggccctcatgaggcatctggttctgagcacagtgggcatgaccctggcactcagagagcatacaatcctccttggcaattaaaaccaatatccaaaacacagagatcttaagccctcagttgtgtttcactgaaagtaaggttcctacaggcttggagaagggaggtaatggagaagtgctccctaaagtgtggtccatggaactgctctgccaaccatttgttgtcagtcagtaatgaggagcacagaaatagaaaggaagcatttagaaactttatagcaatttgccagagtaattttatgtctgttgaatctaaaaattaaaaaattggaacttttgtttttaaaattgtactttgctggtaattcattttcattatagtttactaaagtactagtctataacagattagaataaaagcag

SEQ ID NO: 9250 - DNA, 510 bp, Homo sapiens
tgctgggattgtaggtgtgaaccaccgtgcccggccagaattagatgattttggtgatgcaaaataatctatgtcctgacccccgttctttttaaaataaacttttagttttagcgtagccttagatttacagaatattgtgaagatagtagagaattcccacatatcccatatccaatttcccctgttattaacatcttacattaatatggtacgtgtatttcagttaatgctaatgtccatactgtattcagattttcttagtttttacctaatgtgcttttgctgttctaaggacaataggtaaaagctaaggctctcatgcaggataccacactgtatttggtcattgtgtctccttaggctcttcttggctgtgacagtttctcacactttcctcgtttttgatgaccctgacagttttgagaaatacaggcatatgctggtgatactgtgggttcggttctgagccactgcaataaagggactatcacaaagtgaatcacacac

SEQ ID NO: 9251 - DNA, 557 bp, Homo sapiens
attgtcagtatgccaataccctatgcgtgaagctgaggcaccagaatgatttgctgtctactcaacatctcccttattccacactataagtaggtcccagaagttctttgatgggacaaaaagaattaatgccaaagttgaatgagttacagccgctaccacctaattaaaatgattttgtgccagttgcttttgttgggcaagatccacacataatataattttaatcctgtttatatgcactcttgggatagatttgagatcagcattgccatttaagtgaggttaatcaagcatactgtatgcagcttttgtttctccactgtatgtgaaaggtgaccattgctgacaggttacccaactggccgcttactctattaacaagaaggaggtggttttcagtgtctggtcattaacctagcctcagccccagtgactcttttcgcctagtccttggaatagtgcagctgttgtcagtcgcagaggagaactctagttatgaaccgctttgctttggctgcagcgacatgcctctacacaaggagggggggagggag

SEQ ID NO: 9252 - DNA, 444 bp, Homo sapiens
taaacccagtaaacactcattaaatgtcttttgaattaatgttcatttgaagatacattagtaatacaacattatggaatgatgatacagtttttcttttggagtctggtttttaataggaagcaaagtctgggggctgggtgcagtggttcatgcttgtaatcccagtactttgggaggccaaggcaggaggatcccttaagctcagaagttcaagaacagcctgcacaagatggtgagaccctatctctacaaaaaaatttttttttaattagctgggcatgctgctgcgtgcctgtagtcccagctacttgagaggctgaggtgggaggatcacttgagcccaggagtttgaggctgcagagtgctgtgattgcaccatgcagagtgcctttacgccatggcactccagcctgggcaacagaacaagatctcatctcttaa

SEQ ID NO: 9253 - DNA, 478 bp, Homo sapiens
ccagcctaatggccatagtgccctgcatgggtaggagttcccctccctgagagaagtctgggcattagcactttagtgagcttcaaaaatctagtcagtcaactccctaactaggtaccagtgaagatgcactacctgctagcattttgcaatagttttatccactcatgcgaggttctgtgtagggacaacccatgtaaggcccctgttttacctactatggctgcatcaaaatcaacacaaacttagtgatttaaaagaactatttatgatattcgtggatctgtagatcagaaattggggtggggcacagtgaggagggtgtctctgctccacaatgtctgggtgttagctgaatgacttgaagacaggggctgggaccatctgaaggttcagtccttcccaagtctggctgttgactagggctttagctgaggctctcatccagacatctacaaacagcccgtccatgtagctg

SEQ ID NO: 9254 - DNA, 797 bp, Homo sapiens
cactcactcatcaatttctttctatcctggtttatttctcttcataacacttattactataagagataaatacattttatcatccatctcctctccctagaatgtaagctccataaggacttctgtttattgctataaacccagtatctacaacagtatctagctcactgaaggcactcaaggaaagtctatcacacccaaccacctcaccgtcccccaacctccatccctattcctattcatcctttaaaatcttattcaagtcattacctcctgtttgcctttcctaaattctgcaattaccccctttccctatgccaaatcattcccatctctagattttgaaaatgcttctactattgtactatgtatattacactgtgaaagaagatttttttaagaaaagacaattatcgccactgctaggcttaaagcccacctagggactttaaacttcttaaaattttatattctcaggatccaacatagtaaaggcttaaataaatcttgttatttaactgaagaaaatatctatggctacaaaaaaaaaaaaaaagtactggttactaacctctccaaactattaagtacaaaaatcactttgaaatggtcatgtatgtatctggtttccaaagaaatcttctctaagaaactcaaaggaatttctaagattgtaaagacaaacccagcatactttctagaggtttcatacacttcacatatgtagagttcaattttcacttaaataattattattaatgctgtgattagatatgaaaataaagggcttttgtaac

SEQ ID NO: 9255 - DNA, 429 bp, Homo sapiens
taggaatgttaactccatcttttattatgtcaacctaaagctttatcttggttcagagtgaatatcaaagtatgtgctttggtttttaaactcatggcagagtttctggatgagatgagctagctagcttttctatgcccagacagtgaaggacattgtgtaacccaaaattaactacagatactttcctgctaaatttttcaagcgaatcaagggctttgcctttggttccacatggtaattctggagccgtttggggaaggacattcctggggacagcaaatgcgagggtcctggggcgaggtgtgctcttggccagctcaaggaagagctggtgtggctggagcacagtgagtgagagaaaggggtaggagatgttaggagatggtttgcaggtggctaggcgattgaagttaggaccttcttagg

SEQ ID NO: 9256 - DNA, 327 bp, Homo sapiens
aaaagcaaatgtgcctctttcaaagatgtcaacttggaggttataactaacattacagtctataggtataacctagaataattctagctgcctttcattcgagtctgcctcctttacacagaagaatgtaggaatttaagtgtagttttgggtaacaacagcatgactgaccaagtgggtcgttctaaatgagcgctgatggcatgatacagtgactgacaaatgctgaagggctaaactgctcgtaggatttctcaggcttactgtcttacccacctcttgaatattaagaaacacatttttatgcagagagaaaaatgcagtaaa

SEQ ID NO: 9257 - DNA, 344 bp, Homo sapiens
aatacctaggctgaaggaatatctcttagcctcatggtaaagggaaaagagcaggaaaggtggttgggttaggggatggctcttgagatgtttttctgaaactagcacaggtcacatctgttcacatttaattggccaaagtgggtcatatggccaagcataacattagtgaggtgggaagggtatgcctcctagttgcaggagaactgcacatggcagctggaaagggcagggcgtcactgtgggcatacaaagaaaaaaaaatgcataagtgtgtgtgactatatagtatatatatatgttaattatatatttaaggctaattaaaaattaacagtaaatat

SEQ ID NO: 9258 - DNA, 391 bp, Homo sapiens
tcttagcctcctgagtaactgggactacacgtgcacgccaccatgcccagctaatttttatatttttagtaaagatggtgtttcatgatattggtcaggctggtctcaaactcttgacctcaggtgatccacccacctcagtctcccagtgtgttgtgattacaggtgtgagccaccgcgcccagccattattgtgtaatattttatgggatgactataccacagaaaaattaccatttcattttgttaagtttgctgtcaattcatcagagtaacagataatacttcaataaaccctgttgtataaacatatggattattctccaggatacatacctaaaagaggaattcctgcacagaaggctatggtcatcactaattttgatagact

SEQ ID NO: 9259 - DNA, 355 bp, Homo sapiens
ttagacacacagcagtgccagggaggtctctataataagggaggggaagaggaaggactgcttttcctttcactatttcctagcaactctgtacacaaaacaatgaacggttacaggatgttaggcgggcagtaaaaagctacaggagttaaaaaatagaaaaaaacagacaaatgatttaattcacaaaagcagctccaaaaacccccccaaattatcagcaacctcagatttgatgtacatttaggacctgctttaaagtgtataattttcaacaatataataatgaaatgcgcattttgaagttgcaatctcatttttcatcatttccatttaactacacaatcacacttta

SEQ ID NO: 9260 - DNA, 302 bp, Homo sapiens
gtttgtacagtattcttttggcctcaaacccacctctggtgatgagaatgtttctttccttttggtgcaaggagggcatctcctacatgggagtttcatcacctgcttttaagaagaaagggggaagtcagactggccttcttgcaccgctgttttttaagtgcctttagctcaaaataatgctcctgccaaagtagcatatttttgggtgggatagtctgtcacccttcagtgaacaggtgatttcaataaatatttcccttgtcgaagtcaaataaaatatagagacaaatcttgaaatt

SEQ ID NO: 9261 - DNA, 396 bp, Homo sapiens
ggttgtttgtgcttttggtgtcatgtgtgtgtataaaatgtcttattcttctttaaaaaggttcagtgtttggttttaaatcaggctgtgtccctttcatctgtctgacattcttgtcaccatgtcaggctgccttcagctagtaatacttcattaaattcaaaagacaaaattgttttaaaagaaaaaaaatccagtttggagaagaaaaaactgttgtctaatttaaggtcatgagatttactctcatgtttttgtgtaagagtcttatcgttttggctcttacatttaggtatttgacatattttgcatcaattcttataatcgtgtgagatgtagggggtccaccttcattattttgcacatagatgttcagttgttccagcaccatttaaa

SEQ ID NO: 9262 - DNA, 590 bp, Homo sapiens
gaaaacagtgtggggcaaagaacaggactaggctttgaaacccacagtgggtgttggcaaaagtcacctttgtttcagcttcagtttgaatttaggcacctacttttgatttttattttagagaaaaaatttaaatttatttttaaaagtacatacaataaaatatactcttttgacatacaattctaagaattttcacaagcagaatcatgttactaccaccacaataaaggcacagaacagtttcttcctcagtccgtcccaaaattatctggggtgcgacccctttggagtcaaagcctccctgaatccttaacctctggtaaccatgaatctattctccatcactatagttttgccttttccagaatgctgtaagtggagtcatacaatatttagcctttcagtctggcttctttctcttagcagaatgcatatgagatctctgttgggtttaccagcgcgctgctcatccctttttattgctgagaagtattccatcatgtggatgtactactgtttgtttatccattttccagtggggttgtttctgattatgaataaaggtgctataaacattagtgcacagg

SEQ ID NO: 9263 - DNA, 525 bp, Homo sapiens
ccaaaaggagcaaagaaacaagtcatagatgggcactgcatctttattacagaatagtgcaggagcctcagcccacttacttaagatgagctcccatattgactccttaactctgtgttgcgtgctaaaattataacaaagccatccctggaggagattgtatattatttgaagggcatagccataaatgttttgttttccaggtgatgctgtattcaccatgaaatatctgacttgtagattaacttgcacattattgagaaaccaaaattgttattgagtaaattaaacaatgacaaagttaggtaagagttgttatctatcggtaggatgtcactgcttttctttattttgttttactattttgttcaagataaagttgatagggcagggagcagggagcagtggcccacgcttctaatactagcactttgggaggctgaggtgggaggattgcttgagcccaagagttcaagaccaggctgggcaacaaagtgagaccttgtgtcaattatactttaaaaa

SEQ ID NO: 9264 - DNA, 621 bp, Homo sapiens
gtgcagtggcacgatctcggctcactgcaagctccgccttccgggttcacgccattctcctgcctcagcctcccaaagtgctgggattacaagcgtgagccactgcgcccggcctagttgaggagtaaatggactggattaaagttaaaccataaccccaaattcaggttcttactaaacctcttcaaagaaatggcagcatgatgagctttgaaaatgtgaaagaaaagagcagagaaggagggccccatgcacacacacccgaagaagaattgtgtttcgtggtaacacactaccctcaggttcagaccacactcaacctgtttttccatatattcaaggttcttactcaaccactttcccttctgtggggttgtgatcagaagcctcgtactgttcctacccttggaaacggcgcatgggatacctgccaacaacacatacgcacttcatcatggacagcaaacacactcgtcattcaaaaccagcattcacgggaaagcactgtttctgtttgcctttttatgttaatccgcatgcaacatattttgaaaacagatacacttcaacagttcagaatatgctagtactaataaaaccaacatgttacatgctgaaaaa

SEQ ID NO: 9265 - DNA, 479 bp, Homo sapiens
atgcttacataacaagaacaaaaacacacaaaacaatactaagtattttctactaggacatgtgtatgtgagtgcacagaagaagatggagggattcataagtggattcagtggttctttctgcagatgggagacactgcagtatttcccttttgttaagatgttctcatgtgtttctttttcttggccggtcgcggtggctcacgcctgtaatcccaccactttgggaggccgaggcgggtggattgcctgaggtcaagagttcgagaacagcctggacaacatagtgaaccacccccatctctactaaaaataccaaaagttagctgggcgtggtggcaggcgcctgtaatcccagttacttgggaggctgaggcagatgaatcgcttgaacctgggaggcggaggttgcagtaagctgagatcctgccattgcactccagcctgggcgacagagcgagactccgtctcaaaaaaaa

SEQ ID NO: 9266 - DNA, 370 bp, Homo sapiens
gtctttcctggcccctctaaacaggctctgctctgacctctgccctccccactgatccagggaaactgtcctggccagcatcgggggccttgctgtccttacagggctccatctcccagcctggctgaccactcctttcttcttgaccttcccattgacacccctcaccgccctctgctgtcccctttcctctactaatgcctcttcctccaactctccgcctgtcagtggtccccagaagtcagcctccatccctttctctctttgctttggccagaaaatgatgctcatgcccttgtctttggccctgatctcagtcctgagcccacagcctctatatccagttccctcctcgggaaggccgaggcag

SEQ ID NO: 9267 - DNA, 455 bp, Homo sapiens
ctagtttttttatgtttctgtgcatttctaaatagcaaatgaggtagagaaagctcctatgtggttgacagatctttacctgatgcagtagaccagcgccataaacaaatttgagtctaaataaagggaaaagtatcatttgaaggaggaaaaaaatgggtatttctcagaacactaaagatatatgtcacattgtttccacgcccttggcagctggagaagccctttgttcgtctgagaatagaataatgtattatgtataggtttactcataaaattaacatgttagacatactaagtttaaaggtgccatctattcacacagtgtttacacatttagtaatttaatttactttaaaaaatctttagtgtggtcacgaacacctgaaggaagtcctcagctccttgtctgtgaccatttgggagcaatttgcagaaacctgagcccaccagaa

SEQ ID NO: 9268 - DNA, 911 bp, Homo sapiens
ggaggtggcctggggatggccaccaacaaccttctcttaggactcctgtgtgtggttgctgggcagacccctggcctgaccctgtttgtgcttctctgatctgtagggaggaggctcattgctgctttctgaggtcctgttgtgtcccttccagaaagcatccttagaagagaggacccggtttgatcttctctgaagctcctatcctcttttcttgagggtccccttaaatctgagtggcaagcccacagtggcgagggccagtcgctggaatgtcggggctgctgttgaggtcctcaggctacactggttgtctgtgtcacatggcggtcgggcgtggactttgatccctgttgagagagcatgctgctgtgggcgctgggctggggaaggtccttccatgcttcatgctgccttggaggtttggccaagagggtctctgcccttggcggttgtcagggtcccaggtggaggactactcccagttctttggcttacggaaggtgtctgccatgctttgtgctttgggccgaatcgtctgagcaggctgggccttggaagagttgcgctgcatgagcttggggcctcccagcagctgcagcctgtgtagaaggtggtccaggcttagggaacaggagtgaacagacttcagccccacctggcaggggctggctcccgaggttgggcccagtccctgagggtctgctctgctacgggtctgcccttgagtggccttccgtggagggtgtgtgaccaggtggatggcgcagggcctctggagccctctcctcaggagcagtcctcagcctttttctgtaaaagacttttctttggtgttctaggtggtcagcaggttccaggctggtgtttacaatctcggaggaagtgcgatggtttctgttcttttgaca

SEQ ID NO: 9269 - DNA, 3799 bp, Homo sapiens
ctccggcttccaccccgccccctgcgctcacctgcccgcgcgctcgccttccggggacccggggcccatggacacatacacccagccctgctgtcccgcgcgccagctcaccagccctacccaagggacatcattcacgcctgggcgcctccgccgggctccgggagcccaaggtcgcggctgggccagcgctgagcgtcagaggacgagagcaggggcctccccggtcgccccagcaggcccaggcacataggtgcccagagatccctggcttctgatcgcccggaagactaagagctttagttttggtccagaaagcattttcaaggagctggtcaagcatggctttagcagataagagacttgagaacttacagatctacaaagttcttcaatgtgtgcggaacaaagacaagaagcagatagagaagctgaccaagcttggataccctgaactaatcaattatacagaacccattaatggacttagtgctttgcacttagcctcagtttccaatgatattgatatggtcagctttctccttgaccttggtgctcaccctgatgtgcaagaccgaatgggctgtactcccacaatgagggctgcagaactgggccatgaattgtcaatggaaatattagcaaaggcaaaggctgatatgactatagttgataatgaaggaaaaggtgttttgttttactgcattttaccgactaagcggcattatcgctgtgctctgatcgcccttgaacatggtgcagatgtcaacaattctacctatgaaggaaagccaatattccttagagcttgtgaagatgcacatgatgttaaagatgtgtgcctgacatttttggaaaaaggagccaatcctaatgcaatcaactcatccacaggccgcacagctttaatggaagcgtcaagagaaggggtagtggaaatagttcgaggcatattggaaagaggaggtgaagtgaatgcatttgacaacgacaggcatcacgctgctcattttgctgctaaaggaggctttttcgatatattgaagcttctttttgcctacaatggagacgtggggctgatttcgataaatgggaacacaccacttcattatgctgccatgggtggttttgcagactgctgtaaatatatagctcagcgaggatgtgacctgaaatggaagaatttagatcataaaacgcccagggctgtggctaaggaaggcggcttcaaagcagcaagcaaagaaatacgccgagcagagagaatcgctaataaactagccaggccaggagccaaaaatccaaatccactgtgggcccttagactgcacgattggtccgtagaacgtgaggctttcctccgggaagcctttgcggttttagacaggggtgatggaagcatcagcaagaacgacttcgtgatggtgttggaggaaaggcaggattatgcaagctcagaacagctggctgccatcgctcaccttcatgagaaaacccggggaggaggggtcaatattaatgaattctttaaaggaaccagatatttaaacaagtcttttgtcttaggatcgtatggacctaagaaaaaggaaaaagggatgggcaaaaaaggaaagaaagggaaatttgtcttaccccttccaatctgtgtcattcctgagtacgcgtttccacgccggcaggatggtgggccaccgtattacatgattgagacctacaagaatgtcactgatagcagccggtttaatagagatcatcccccagaacatcccattcaggatgactctgtttggtacattgatgattcagagaaggtattttcaaacattaatattatcaccaaagcaggggatctggcttctctgaaaaaggcctttgaatcaggaatacctgtggatatgaaggataattattacaaaactccgctaatgacggcgtgtgcaagtggaaacatagatgtggtcaagtttcttcttgaaaaaggagctaacgttaatgcaacagataactttctgtggactccacttcattttgcatgccatgcaggccaacaagacattgttgagcttcttgttgaatctggagctttaatagatgcagcttcaatcaacaactcaactcctttaaatagagccattgaaagctgcagactggatacagtaaaatacctacttgatattggtgctaaattccagctggaaaatagaaaagggcatagtgccatggacgttgcaaaggcatatgctgattatagaataattgatctgattaaagaaaagctagataacttgccgaaaccagcagaaaatcaaaaactaaaaggcaagacacctcctatactgaagactgaaggccctgaaattaagaaagaagaggaactgctgtcatcaatttatggtgtaccaaccacatcagagggaaagaaagtacagaagggtaatgtggttcatctgaattcattgattaccagtggttatactaagaaagtggatatcacatttattccacggaggatttggagtcctgaagccacaacagcagagctgatcaggaagagggaactacggcgagagaggtttacacatgaggtggacttcgacgattttatgatgccttttcagaagaacatcacagagaaagctcgagcactggaagctgccttgaagacctaagtcatagcagttatttcttggggtaaatgctttgaggcccagggaccaatctttggagaaagtagatatttccatcaaagccaaagcaatccatacaccaagaacttgttaccaagaatttctttttgctttaacaactataaatattcttagctgtctagagaaaagatgtatgttattttgaaatgaatggtatgtcattctggataaatccccaagcccctttatgaatgtagtgaaatacatggcatgtgggttataaacgttgctgtcaaaagatttaccaggtctacaccattatgcttattatttttttaattatcctttttatttattaaatagagacagagtctcactatattgccccagctggtctcgaactcttgagctcaggcagtcctcccaacttggccgtcgaaagtgctgggattataggcatgagctactgtgcccagcctgcttattgaagatacatttctagtggaaattgatgaaacaatttaggttttggaaaaagaagtaatatttaatcttttaaggaaggagtttatttctcacatgccattataaactatgtgtattagataccttgggttgaatacacttttaacagccctagatcgatagccctagccctagatagatagccctagccctagatagatagctattaggttggtgcaaaagtaattgtggtttttgccataacctttaattgcagcaaaaactgcaattacttttgctccaacctgacagctaggtatctagctagctagaaaggcagatagacagatatatagatgatagatagatagatagatgatagatagatagatgatagatagatagatagatagatagatagatagatagatagatagatagatagagatttattgcaaataattggtttacataattttgggccccagatggttaagtgctaaatttgtagggtaggctatcaggaagtgcaggctggaaacatgcaggagctgtccctgaagtccacaagtggaatttcttcttcatcatggaaacctcagttttgttcatacacctaaatacttcagtatgtctttcctaaaataaaaggcatccatttacctaaccagattacgattgtg

SEQ ID NO: 9270 - DNA, 3845 bp, Homo sapiens
ctccggcttccaccccgccccctgcgctcacctgcccgcgcgctcgccttccggggacccggggcccatggacacatacacccagccctgctgtcccgcgcgccagctcaccagccctacccaagggacatcattcacgcctgggcgcctccgccgggctccgggagcccaaggtcgcggctgggccagcgctgagcgtcagaggacgagagcaggggcctccccggtcgccccagcaggcccaggcacataggtgcccagagatccctggcttctgatcgcccggaagactaagagctttagttttggtccagaaagcattttcaaggagctggtcaagcatggctttagcagataagagacttgagaacttacagatctacaaagttcttcaatgtgtgcggaacaaagacaagaagcagatagagaagctgaccaagcttggataccctgaactaatcaattatacagaacccattaatggacttagtgctttgcacttagcctcagtttccaatgatattgatatggtcagctttctccttgaccttggtgctcaccctgatgtgcaagaccgaatgggctgtactcccacaatgagggctgcagaactgggccatgaattgtcaatggaaatattagcaaaggcaaaggctgatatgactatagttgataatgaaggaaaaggcatgtgtactcagtcctcaatgccgtatgccagttctatgataaggtgttttgttttactgcattttaccgactaagcggcattatcgctgtgctctgatcgcccttgaacatggtgcagatgtcaacaattctacctatgaaggaaagccaatattccttagagcttgtgaagatgcacatgatgttaaagatgtgtgcctgacatttttggaaaaaggagccaatcctaatgcaatcaactcatccacaggccgcacagctttaatggaagcgtcaagagaaggggtagtggaaatagttcgaggcatattggaaagaggaggtgaagtgaatgcatttgacaacgacaggcatcacgctgctcattttgctgctaaaggaggctttttcgatatattgaagcttctttttgcctacaatggagacgtggggctgatttcgataaatgggaacacaccacttcattatgctgccatgggtggttttgcagactgctgtaaatatatagctcagcgaggatgtgacctgaaatggaagaatttagatcataaaacgcccagggctgtggctaaggaaggcggcttcaaagcagcaagcaaagaaatacgccgagcagagagaatcgctaataaactagccaggccaggagccaaaaatccaaatccactgtgggcccttagactgcacgattggtccgtagaacgtgaggctttcctccgggaagcctttgcggttttagacaggggtgatggaagcatcagcaagaacgacttcgtgatggtgttggaggaaaggcaggattatgcaagctcagaacagctggctgccatcgctcaccttcatgagaaaacccggggaggaggggtcaatattaatgaattctttaaaggaaccagatatttaaacaagtcttttgtcttaggatcgtatggacctaagaaaaaggaaaaagggatgggcaaaaaaggaaagaaagggaaatttgtcttaccccttccaatctgtgtcattcctgagtacgcgtttccacgccggcaggatggtgggccaccgtattacatgattgagacctacaagaatgtcactgatagcagccggtttaatagagatcatcccccagaacatcccattcaggatgactctgtttggtacattgatgattcagagaaggtattttcaaacattaatattatcaccaaagcaggggatctggcttctctgaaaaaggcctttgaatcaggaatacctgtggatatgaaggataattattacaaaactccgctaatgacggcgtgtgcaagtggaaacatagatgtggtcaagtttcttcttgaaaaaggagctaacgttaatgcaacagataactttctgtggactccacttcattttgcatgccatgcaggccaacaagacattgttgagcttcttgttgaatctggagctttaatagatgcagcttcaatcaacaactcaactcctttaaatagagccattgaaagctgcagactggatacagtaaaatacctacttgatattggtgctaaattccagctggaaaatagaaaagggcatagtgccatggacgttgcaaaggcatatgctgattatagaataattgatctgattaaagaaaagctagataacttgccgaaaccagcagaaaatcaaaaactaaaaggcaagacacctcctatactgaagactgaaggccctgaaattaagaaagaagaggaactgctgtcatcaatttatggtgtaccaaccacatcagagggaaagaaagtacagaagggtaatgtggttcatctgaattcattgattaccagtggttatactaagaaagtggatatcacatttattccacggaggatttggagtcctgaagccacaacagcagagctgatcaggaagagggaactacggcgagagaggtttacacatgaggtggacttcgacgattttatgatgccttttcagaagaacatcacagagaaagctcgagcactggaagctgccttgaagacctaagtcatagcagttatttcttggggtaaatgctttgaggcccagggaccaatctttggagaaagtagatatttccatcaaagccaaagcaatccatacaccaagaacttgttaccaagaatttctttttgctttaacaactataaatattcttagctgtctagagaaaagatgtatgttattttgaaatgaatggtatgtcattctggataaatccccaagcccctttatgaatgtagtgaaatacatggcatgtgggttataaacgttgctgtcaaaagatttaccaggtctacaccattatgcttattatttttttaattatcctttttatttattaaatagagacagagtctcactatattgccccagctggtctcgaactcttgagctcaggcagtcctcccaacttggccgtcgaaagtgctgggattataggcatgagctactgtgcccagcctgcttattgaagatacatttctagtggaaattgatgaaacaatttaggttttggaaaaagaagtaatatttaatcttttaaggaaggagtttatttctcacatgccattataaactatgtgtattagataccttgggttgaatacacttttaacagccctagatcgatagccctagccctagatagatagccctagccctagatagatagctattaggttggtgcaaaagtaattgtggtttttgccataacctttaattgcagcaaaaactgcaattacttttgctccaacctgacagctaggtatctagctagctagaaaggcagatagacagatatatagatgatagatagatagatagatgatagatagatagatgatagatagatagatagatagatagatagatagatagatagatagatagatagagatttattgcaaataattggtttacataattttgggccccagatggttaagtgctaaatttgtagggtaggctatcaggaagtgcaggctggaaacatgcaggagctgtccctgaagtccacaagtggaatttcttcttcatcatggaaacctcagttttgttcatacacctaaatacttcagtatgtctttcctaaaataaaaggcatccatttacctaaccagattacgattgtg

SEQ ID NO: 9271 - DNA, 1226 bp, Homo sapiens
ctccggcttccaccccgccccctgcgctcacctgcccgcgcgctcgccttccggggacccggggcccatggacacatacacccagccctgctgtcccgcgcgccagctcaccagccctacccaagggacatcattcacgcctgggcgcctccgccgggctccgggagcccaaggtcgcggctgggccagcgctgagcgtcagaggacgagagcaggggcctccccggtcgccccagcaggcccaggcacataggtgcccagagatccctggcttctgatcgcccggaagactaagagctttagttttggtccagaaagcattttcaaggagctggtcaagcatggctttagcagataagagacttgagaacttacagatctacaaagttcttcaatgtgtgcggaacaaagacaagaagcagatagagaagctgaccaagcttggataccctgaactaatcaattatacagaacccattaatggacttagtgctttgcacttagcctcagtttccaatgatattgatatggtcagctttctccttgaccttggtgctcaccctgatgtgcaagaccgaatgggctgtactcccacaatgagggctgcagaactgggccatgaattgtcaatggaaatattagcaaaggcaaaggctgatatgactatagttgataatgaaggaaaaggtgttttgttttactgcattttaccgactaagcggcattatcgctgtgctctgatcgcccttgaacatggtgcagatgtcaacaattctacctatgaaggaaagccaatattccttagagcttgtgaagatgcacatgatgttaaagatgtgtgcctgacatttttggaaaaaggagccaatcctaatgcaatcaactcatccacaggccgcacagctttaatggaagcgtcaagagaaggggtagtggaaatagttcgaggcatattggaaagaggaggtgaagtgaatgcatttgacaacgacaggcatcacgctgctcattttgctgctaaaggaggctttttcgatatattgaagcttctttttgcctacaatggagacgtggggctgatttcgataaatgggaacacaccacttcattatgctgccatgggtggttttgcagactgctgtaaatatatagctcagcgaggatgtgacctggaatggaagaatttagatcatatacgccgagcagagagaatcgcttctagccgg

SEQ ID NO: 9272 - DNA, 401 bp, Homo sapiens
catgaattgtcaatggaaatattagcaaaggcaaaggctgatatgactatagttgataatgaaggaaaaggtaaaaatcccgacatcctctccagcagattgcaattcattttgtagccagaaagcaataacatggactctttttgttttccaactttagaagtgaattacttatggttttaagggaaaggctaaattctcactcctatacctaaacctactgtctcctcatactttgaaaatgagatagctatatcttagggaaatcatttatgagagcttgctcatatacttagattaatttgtgtttggtggtttcttttaaatgaggagaattttgaacattatacacactgattattcattataaattataaactcttctttaaaacaaagatgaa

SEQ ID NO: 9273 - DNA, 3863 bp, Homo sapiens
ctccggcttccaccccgccccctgcgctcacctgcccgcgcgctcgccttccggggacccggggcccatggacacatacacccagccctgctgtcccgcgcgccagctcaccagccctacccaagggacatcattcacgcctgggcgcctccgccgggctccgggagcccaaggtcgcggctgggccagcgctgagcgtcagaggacgagagcaggggcctccccggtcgccccagcaggcccaggcacataggtgcccagagatccctggcttctgatcgcccggaagactaagagtcccatgaagtgggcaccattgctattgccagttcacagatgcagaaactgaggtaaaaactagctttagttttggtccagaaagcattttcaaggagctggtcaagcatggctttagcagataagagacttgagaacttacagatctacaaagttcttcaatgtgtgcggaacaaagacaagaagcagatagagaagctgaccaagcttggataccctgaactaatcaattatacagaacccattaatggacttagtgctttgcacttagcctcagtttccaatgatattgatatggtcagctttctccttgaccttggtgctcaccctgatgtgcaagaccgaatgggctgtactcccacaatgagggctgcagaactgggccatgaattgtcaatggaaatattagcaaaggcaaaggctgatatgactatagttgataatgaaggaaaaggtgttttgttttactgcattttaccgactaagcggcattatcgctgtgctctgatcgcccttgaacatggtgcagatgtcaacaattctacctatgaaggaaagccaatattccttagagcttgtgaagatgcacatgatgttaaagatgtgtgcctgacatttttggaaaaaggagccaatcctaatgcaatcaactcatccacaggccgcacagctttaatggaagcgtcaagagaaggggtagtggaaatagttcgaggcatattggaaagaggaggtgaagtgaatgcatttgacaacgacaggcatcacgctgctcattttgctgctaaaggaggctttttcgatatattgaagcttctttttgcctacaatggagacgtggggctgatttcgataaatgggaacacaccacttcattatgctgccatgggtggttttgcagactgctgtaaatatatagctcagcgaggatgtgacctgaaatggaagaatttagatcataaaacgcccagggctgtggctaaggaaggcggcttcaaagcagcaagcaaagaaatacgccgagcagagagaatcgctaataaactagccaggccaggagccaaaaatccaaatccactgtgggcccttagactgcacgattggtccgtagaacgtgaggctttcctccgggaagcctttgcggttttagacaggggtgatggaagcatcagcaagaacgacttcgtgatggtgttggaggaaaggcaggattatgcaagctcagaacagctggctgccatcgctcaccttcatgagaaaacccggggaggaggggtcaatattaatgaattctttaaaggaaccagatatttaaacaagtcttttgtcttaggatcgtatggacctaagaaaaaggaaaaagggatgggcaaaaaaggaaagaaagggaaatttgtcttaccccttccaatctgtgtcattcctgagtacgcgtttccacgccggcaggatggtgggccaccgtattacatgattgagacctacaagaatgtcactgatagcagccggtttaatagagatcatcccccagaacatcccattcaggatgactctgtttggtacattgatgattcagagaaggtattttcaaacattaatattatcaccaaagcaggggatctggcttctctgaaaaaggcctttgaatcaggaatacctgtggatatgaaggataattattacaaaactccgctaatgacggcgtgtgcaagtggaaacatagatgtggtcaagtttcttcttgaaaaaggagctaacgttaatgcaacagataactttctgtggactccacttcattttgcatgccatgcaggccaacaagacattgttgagcttcttgttgaatctggagctttaatagatgcagcttcaatcaacaactcaactcctttaaatagagccattgaaagctgcagactggatacagtaaaatacctacttgatattggtgctaaattccagctggaaaatagaaaagggcatagtgccatggacgttgcaaaggcatatgctgattatagaataattgatctgattaaagaaaagctagataacttgccgaaaccagcagaaaatcaaaaactaaaaggcaagacacctcctatactgaagactgaaggccctgaaattaagaaagaagaggaactgctgtcatcaatttatggtgtaccaaccacatcagagggaaagaaagtacagaagggtaatgtggttcatctgaattcattgattaccagtggttatactaagaaagtggatatcacatttattccacggaggatttggagtcctgaagccacaacagcagagctgatcaggaagagggaactacggcgagagaggtttacacatgaggtggacttcgacgattttatgatgccttttcagaagaacatcacagagaaagctcgagcactggaagctgccttgaagacctaagtcatagcagttatttcttggggtaaatgctttgaggcccagggaccaatctttggagaaagtagatatttccatcaaagccaaagcaatccatacaccaagaacttgttaccaagaatttctttttgctttaacaactataaatattcttagctgtctagagaaaagatgtatgttattttgaaatgaatggtatgtcattctggataaatccccaagcccctttatgaatgtagtgaaatacatggcatgtgggttataaacgttgctgtcaaaagatttaccaggtctacaccattatgcttattatttttttaattatcctttttatttattaaatagagacagagtctcactatattgccccagctggtctcgaactcttgagctcaggcagtcctcccaacttggccgtcgaaagtgctgggattataggcatgagctactgtgcccagcctgcttattgaagatacatttctagtggaaattgatgaaacaatttaggttttggaaaaagaagtaatatttaatcttttaaggaaggagtttatttctcacatgccattataaactatgtgtattagataccttgggttgaatacacttttaacagccctagatcgatagccctagccctagatagatagccctagccctagatagatagctattaggttggtgcaaaagtaattgtggtttttgccataacctttaattgcagcaaaaactgcaattacttttgctccaacctgacagctaggtatctagctagctagaaaggcagatagacagatatatagatgatagatagatagatagatgatagatagatagatgatagatagatagatagatagatagatagatagatagatagatagatagatagagatttattgcaaataattggtttacataattttgggccccagatggttaagtgctaaatttgtagggtaggctatcaggaagtgcaggctggaaacatgcaggagctgtccctgaagtccacaagtggaatttcttcttcatcatggaaacctcagttttgttcatacacctaaatacttcagtatgtctttcctaaaataaaaggcatccatttacctaaccagattacgattgtg

SEQ ID NO: 9274 - DNA, 1545 bp, Homo sapiens
ctccggcttccaccccgccccctgcgctcacctgcccgcgcgctcgccttccggggacccggggcccatggacacatacacccagccctgctgtcccgcgcgccagctcaccagccctacccaagggacatcattcacgcctgggcgcctccgccgggctccgggagcccaaggtcgcggctgggccagcgctgagcgtcagaggacgagagcaggggcctccccggtcgccccagcaggcccaggcacataggtgcccagagatccctggcttctgatcgcccggaagactaagagctttagttttggtccagaaagcattttcaaggagctggtcaagcatggctttagcagataagagacttgagaacttacagatctacaaagttcttcaatgtgtgcggaacaaagacaagaagcagatagagaagctgaccaagcttggataccctgaactaatcaattatacagaacccattaatggacttagtgctttgcacttagcctcagtttccaatgatattgatatggtcagctttctccttgaccttggtgctcaccctgatgtgcaagaccgaatgggctgtactcccacaatgagggctgcagaactgggccatgaattgtcaatggaaatattagcaaaggcaaaggctgatatgactatagttgataatgaaggaaaaggtgttttgttttactgcattttaccgactaagcggcattatcgctgtgctctgatcgcccttgaacatggtgcagatgtcaacaattctacctatgaaggaaagccaatattccttagagcttgtgaagatgcacatgatgttaaagatgtgtgcctgacatttttggaaaaaggagccaatcctaatgcaatcaactcatccacaggccgcacagctttaatggaagcgtcaagagaaggggtagtggaaatagttcgaggcatattggaaagaggaggtgaagtgaatgcatttgacaacgacaggcatcacgctgctcattttgctgctaaaggaggctttttcgatgtaataatctattctttgctttaaaatttgttgctaaaacttttctgtcctttttctcaaatttttttatatgtcatatagagtacgctaaggcagacatttttctgagttacctatgttgttttcatcttgatttccccaaataattctaaaattatatttttaaaaacttcatctctttatttagttttatgtgtttgctaatttacttatttaatattattcatagtatttttctgtacactcgatgataacaatttaaaacttctgccacctgggactactgtattttatgacttcattacatactagagtcttcaaaatataatatgatctaattatgggagaacaatgccctcatactcttatctccatggtgtttgtgtgtattagataatgatatacctgaattttaaactcaagtattctgattatctaaacatacagcaaagaatatctcactgatacagtaacattgcagaaacaaaataaaaacactattttttta

SEQ ID NO: 9275 - DNA, 219 bp, Homo sapiens
ttttaagtatataaaagatcaaatttctattcaattacagtaggtcagaagtgacagcttagataaaaagttagcatggcagtacctgagtcatattcctagttatttattatcttcaaggctcagtacaaacaaggaaaagccattatttttcttgcaggcaaaagaggcagttaaaagtttgtttatttaacttaggttgggagttgctcttgcctt

SEQ ID NO: 9276 - DNA, 549 bp, Homo sapiens
taggctcactgctaccttttacagagttcacgggattttacgtaactaacccgcagtgtggatttaccaaaagatcacagcactagcggagacttccagaaactgtctcatgctttctgacctccagggaaagttgtacccacgacatcctcaaccactggtaccatggaagacctgtccctgcccatttctcaaaaatgcacagctcttccctgcctggagcacatgaagtcccatctccctgtccccagacctttaggctctgttgaagttctggcattgcttatgagacccttcctgtccaaggaaggtctaagtcaactcctccattggactggagatgaggctcactggtgacatcctgtgtcgactcagtaataaatagtcacttgggaggcgatgtttatgcaggtgtggatgttgagttttactatgggaatcattccagcctgacaaaatgtgttttaaggaataggtagataactgggacttcctctgttattctaacaagtcgaagcttcctaattaaactgtccatggatctcactt

SEQ ID NO: 9277 - DNA, 448 bp, Homo sapiens
aattagatcacgataatggttgcacaactctgtgaatatattaaaaaccattgacttaccccataaatatatacacctaccatgtacccataaatattaaaaatcaaaacaaaacattgacttatacacttcaaatgggtgaattgtgtgttatatgaattttttttttttttttgaaatggagtctcactctgtcacccaggctggagtgcagtggcctgatcttagctcactgcaacctccacctcccgggttcaactgattctcctacctcagcctcctgagtagctgggattctgcagcctggatgacagaatgagactgtctcaaaaaataaaaaaataataataaattttttaaaagttgcttttatctgatagagaagcttgagatttttatgattagaatgattaaaaataaaactgagaaagcaagacaactaaccttt

SEQ ID NO: 9278 - DNA, 788 bp, Homo sapiens
aaaacaagggcagtcaacgtgtaaagcagccagtggaccggctcccaggataatctgaatcccaggcttgtttacgcctgtttcacagacaccattgagggctcactggccctccctgggcctctgttcccctaatgtaaaataaatacattgaagcaaacagcagtcttcaaactttcccttttggcaaggaaaacatgatctctccatgcaaaaggttgacagaagacaatatcagagctgcttttctggagaggtgaggggatggaggccctgaaggccctgcagcagcacgcgggggtcctctagggctccccaaaatctccagagcagtgcagtcagagagccatctgcaatcacagccacatttgttttctgtactgtctactagggtagccacgtttagcacttgaaatgtggtgcaggtgacagagaaacattatgattttctttagttttggccattgcattggaggacactgctttatagcaggtcaaaagcttctgactcagtggatgggctaccagcatttgtcaaatacttttgaggaatgagacacagctcagctgacatactcccttcaaaagtccccaaggataccatgggccctgctttagacggggaggaatcccaggctgtgactgctccaatgactcatccggggttgcatggtttgtacttggtggaagctgagagtagccccagctctggctgcctccaaagccctgtgcctttaatggctttgctttgcttcctgctgctctaaggtccccatcactctgcccac

SEQ ID NO: 9279 - DNA, 556 bp, Homo sapiens
ccaattgtggacaagataaggaccattgcccaggctgtctatggagccaaagatatcgaactctgtcctgaggcacaagtcaaaatagatcgttacactcagcagggttttggaaatttgcccatctgcatggcaaagaccgatctttctctgtctcaccaacctgacaaaaaaggtgtgccaagggacttcatcttacctatcagtgatgtccgggccagcataggtgctgggttcatttaccctttggtcggaacgggaagcagagaatctcccctctggctctagttggagaatcccaacccaagcaagtccatctttgaacaataaacatctccagtactgctggctttggaagaccccatggtgagatgctggagcttttttccactcctgatttcactttctaaatatttacttttactttccatgttcacttgtaggccagattttttttttcctaccattgaattatttcatcatgttctatttaattattgttttaattggcattggtgaccacaaataataataaatactattaactgatgtaaca

SEQ ID NO: 9280 - DNA, 508 bp, Homo sapiens
ccaattgtggacaagataaggaccattgcccaggctgtctatggagccaaagatatcgaactctgtcctgaggcacaagtcaaaatagatcgttacactcagcagggttttggaaatttgcccatctgcatggcaaagaccgatctttctctgtctcaccaacctgacaaaaaaggtgtgccaagggacttcatcttacctatcagtgatgtccgggccagcataggtgctgggttcatttaccctttggtcggaacgtctcgctctgttgcccaggctaaagtgcagtggcatgatctcggctcactgcaacctccacctcccgggttcacaccattctcctgcctcagcctcccaagtagcagggactacaggcacccgccaccacacctggctaactttttgtatttttagtggagacagagatgacccaaattcttaactgcctcataaatactgttaatatattgaaagttttgccctaggcttttattaaagtcaactatat

SEQ ID NO: 9281 - DNA, 2344 bp, Homo sapiens
cagtgacctgctaaaaagtcaactagctcagagttttgctggcctttatgtgagaaatccaagaaagtgttcacttttttgggatgcgagactccttggtctcatttgccttcactttgcatttgttagtgacctccactaacccccacttccatgcatattgacgagggatctagtctaagtaagaatgtcttttgcctgcgcgtggaggcacagtagaaatctcaaggctttacccagaagagcccagtcagggagaggtgtaaatgcaaaattgccaaatagcacaaacaatgaatgttttctggttgttatatagatgccaaaatagcactttgatatttgcaaagtgctttatgctttttaataattgttagctgtttctcacatcattgtgagttagatcagtattatgaccgctgtcttagggaaggcctgggaacaggagtgtgcaggctgtcctgaagagaggctgaggacagtgtgaataattgtagcctgaccttttgcattctccagctcagctgctaggaagacttacttgtcatgatttatataataaaattaaggacactgaaaattcttatgcttgatgaaaaacttaaggctagcctagaagggccaaacatgtccttattgacaaagctggtctttgtcgcctaattagggtatcctagctatgttccatttctagtaaggggctgtagttagatgactcttgtatagatttcagttacttatgctgaagatccctgtgctaggttagcctttagaagttagagttgtggaaagcagtattgttttcttctctagtgattgttaccctacacatttcatggaagcatcttcacaaaatatcagacacagtggaagggggaaaaaaagctacgagattgtttttacacttttagcaaagtttctgtggatgctagtaatttatacttgatcagttgtattctagtaaagaacctctttggggactgtaggaaagcatgtttttgtggttataaaaacacttaaaaatcctgataattctgggcttgtataatgcctgttgatcttgccctcttaatcagtttattgttattcacaaatgcaaataggttttcaaactacagacagttttgaaagacattaattctcattttcttctagtcaggagtaatacaagcaaacaagtgtccgttttgaattctgatttgtaatctgaatactaaacatattagacccacctgaaaataatatagccaatttctaggtaatcttactgctttgtgggtttctttccatgtacatctacctcttccagctgttttaagttttctcaagtctgtgcctatgaaatctcatccaacttttgattattcatggattgattatccgctttttttttgcttttttgctgccattgctatgcctggtctcgtctgcatcaaatatactacatatcagcaactttagagaatgggttcaacagggagtggagagtgaagctaatgtaaaatagtttagtggcagtgggaatctttggacttcatttacctctctcattatttctattaccatggataaaaaagtcagctgctacgttgatatcccttctatgagcacattcttagcagaagaaaacaatccaactaccaacacccgactctattggtgcatttaaaatgtgattccattttttcttacaattcttcagggaacttacctgcattaagtgaggttaaatgcattcaggaggttgtttgtttcttctatctagttttagaataatatttcttcggcaaaccctgctaactgcggttcacccttgaaaacgttaatctgaggactttttccaccaactcattaatgatggtggaagcaagtgtattatttgtttcctggagaatttgatgaagagcagtcttcctctgctgccctttactaagcaaaacctggagcaatttaaataggctaaatggttttgattaaatcttgagctccgagttggaaggagaaaatgagaagttaaccccttgagccatgtggtctctttacaatcaagagactgtacatatgtgaaaaaatacaaattaaggacctgtgttcatagacaatctaaactgtgtttctgaagtttgtgcacatttttcttcactgtaatgttattttacagctgtttgttaaaatagtgaataatttaatgatcctaaaagtaacaggtttcgtgtgagtgtgcttgtatacgtgagatttgccttattttcaggttgttttatttaacgatggttccttggacagcattctggtgttcagcaaccaatatggaatatttgtcattaaatccatatcagtcttt

SEQ ID NO: 9282 - DNA, 433 bp, Homo sapiens
aaatgagaagttaaccccttccaactcggagctcaagatttaatcaaaaccatttagcctatttaaatcttgagctccgagttggaaggagaaaatgagaagttaaccccttgagccatgtggtctctttacaatcaagagactgtacatatgtgaaaaaatacaaattaaggacctgtgttcatagacaatctaaactgtgtttctgaagtttgtgcacatttttcttcactgtaatgttattttacagctgtttgttaaaatagtgaataatttaatgatcctaaaagtaacaggtttcgtgtgagtgtgcttgtatacgtgagatttgccttattttcaggttgttttatttaacgatggttccttggacagcattctggtgttcagcaaccaatatggaatatttgtcattaaatccatatcagtcttt

SEQ ID NO: 9283 - DNA, 316 bp, Homo sapiens
aattaaggacctgtgttcatagacaatctaaactgtgtttctgaagtttgtgcacatttttcttcactgtaatgttattttacagctgtttgttaaaatagtgaataatttaatgatcctaaaagtaacaggtttcgtgtgagtgtgcttgtatacgtgagatttgccttattttcaggttgttttatttaacgatggttccttggacagcattctggtgttcagcaaccaatatggaatatttgtcattaaatccatatcagtcttttaccatgtcattcttctttgccacacattaaatgtcactcagctctat

SEQ ID NO: 9284 - DNA, 3807 bp, Homo sapiens
cagtgacctgctaaaaagtcaactagctcagagttttgctggcctttatgtgagaaatccaagaaagtgttcacttttttgggatgcgagactccttggtctcatttgccttcactttgcatttgttagtgacctccactaacccccacttccatgcatattgacgagggatctagtctaagtaagaatgtcttttgcctgcgcgtggaggcacagtagaaatctcaaggctttacccagaagagcccagtcagggagaggtgtaaatgcaaaattgccaaatagcacaaacaatgaatgttttctggttgttatatagatgccaaaatagcactttgatatttgcaaagtgctttatgctttttaataattgttagctgtttctcacatcattgtgagttagatcagtattatgaccgctgtcttagggaaggcctgggaacaggagtgtgcaggctgtcctgaagagaggctgaggacagtgtgaataattgtagcctgaccttttgcattctccagctcagctgctaggaagacttacttgtcatgatttatataataaaattaaggacactgaaaattcttatgcttgatgaaaaacttaaggctagcctagaagggccaaacatgtccttattgacaaagctggtctttgtcgcctaattagggtatcctagctatgttccatttctagtaaggggctgtagttagatgactcttgtatagatttcagttacttatgctgaagatccctgtgctaggttagcctttagaagttagagttgtggaaagcagtattgttttcttctctagtgattgttaccctacacatttcatggaagcatcttcacaaaatatcagacacagtggaagggggaaaaaaagctacgagattgtttttacacttttagcaaagtttctgtggatgctagtaatttatacttgatcagttgtattctagtaaagaacctctttggggactgtaggaaagcatgtttttgtggttataaaaacacttaaaaatcctgataattctgggcttgtataatgcctgttgatcttgccctcttaatcagtttattgttattcacaaatgcaaataggttttcaaactacagacagttttgaaagacattaattctcattttcttctagtcaggagtaatacaagcaaacaagtgtccgttttgaattctgatttgtaatctgaatactaaacatattagacccacctgaaaataatatagccaatttctaggtaatcttactgctttgtgggtttctttccatgtacatctacctcttccagctgttttaagttttctcaagtctgtgcctatgaaatctcatccaacttttgattattcatggattgattatccgctttttttttgcttttttgctgccattgctatgcctggtctcgtctgcatcaaatatactacatatcagcaactttagagaatgggttcaacagggagtggagagtgaagctaatgtaaaatagtttagtggcagtgggaatctttggacttcatttacctctctcattatttctattaccatggataaaaaagtcagctgctacgttgatatcccttctatgagcacattcttagcagaagaaaacaatccaactaccaacacccgactctattggtgcatttaaaatgtgattccattttttcttacaattcttcagggaacttacctgcattaagtgaggttaaatgcattcaggaggttgtttgtttcttctatctagttttagaataatatttcttcggcaaaccctgctaactgcggttcacccttgaaaacgttaatctgaggactttttccaccaactcattaatgatggtggaagcaagtgtattatttgtttcctggagaatttgatgaagagcagtcttcctctgctgccctttactaagcaaaacctggagcaatttaaataggctaaatggttttgattaaatcttgagctccgagttggaaggagaaaatgagaagttaaccccttgagccatgtggtctctttacaatcaagagactgtacatatgtgaaaaaatacaaattaaggacctgtgttcatagacaatctaaactgtgtttctgaagtttgtgcacatttttcttcactgtaatgttattttacagctgtttgttaaaatagtgaataatttaatgatcctaaaagtaacaggtttcgtgtgagtgtgcttgtatacgtgagatttgccttattttcaggttgttttatttaacgatggttccttggacagcattctggtgttcagcaaccaatatggaatatttgtcattaaatccatatcagtctttaaaaaaaaaaaaaaaaaaaaaaaaaactcgaacagtctctctctctctctccagcagccgggctgagaggagcgtggctgtctcctctctccgccatggcgtgtgctcgcccactgatatcggtgtactccgaaaagggggagtcatctggcaaaaatgtcactttgcctgctgtattcaaggctcctattcgaccagatattgtgaactttgttcacaccaacttgcgcaaaaacaacagacagccctatgctgtcagtgaattagcaggtcatcagactagtgctgagtcttggggtactggcagagctgtggctcgaattcccagagttcgaggtggtgggactcaccgctctggccagggtgcttttggaaacatgtgtcgtggaggccgaatgtttgcaccaaccaaaacctggcgccgttggcatcgtagagtgaacacaacccaaaaacgatacgccatctgttctgccctggctgcctcagccctaccagcactggtcatgtctaaaggtcatcgtattgaggaagttcctgaacttcctttggtagttgaagataaagttgaaggctacaagaagaccaaggaagctgttttgctccttaagaaacttaaagcctggaatgatatcaaaaaggtctatgcctctcagcgaatgagagctggcaaaggcaaaatgagaaaccgtcgccgtatccagcgcaggggcccgtgcatcatctataatgaggataatggtatcatcaaggccttcagaaacatccctggaattactctgcttaatgtaagcaagctgaacattttgaagcttgctcctggtgggcatgtgggacgtttctgcatttggactgaaagtgctttccggaagttagatgaattgtacggcacttggcgtaaagccgcttccctcaagagtaactacaatcttcccatgcacaagatgattaatacagatcttagcagaatcttgaaaagcccagagatccaaagagcccttcgagcaccacgcaagaagatccatcgcagagtcctaaagaagaacccactgaaaaacttgagaatcatgttgaagctaaacccatatgcaaagaccatgcgccggaacaccattcttcgccaggccaggaatcacaagctccgggtggataaggcagctgctgcagcagcggcactacaagccaaatcagatgagaaggcggcggttgcaggcaagaagcctgtggtaggtaagaaaggaaagaaggctgctgttggtgttaagaagcagaagaagcctctggtgggaaaaaaggcagcagctaccaagaaaccagcccctgaaaagaagcctgcagagaagaaacctactacagaggagaagaagcctgctgcataaactcttaaatttgattattccataaaggtcaaatcattttggacagcttcttttgaataaagacctgattatacaggcagtgag

SEQ ID NO: 9285 - DNA, 601 bp, Homo sapiens
aacttccaaatggatccctccctgcaagtgtggagctggcgctaccaggcactgctctggccatgcgtctaagacacaggcagagggcgctgcccaccacgctggcgacggcctcaaagcccctgttcatgcctgggacagcgcccaaggaccttgctcatgcctgggacaggccccagggcccccactggctgcagtcagcagcgggcagggtggtgggggaaggtatggacactccgtgggccggagctgggagaacaaggcctattattggacacctggtggccatggcaaccacacaaggatgcctgagactgaaaatctgtgggcttcaaggagctccagctcttgcactggctgagtcacagtgactatataactcttactcccacttttgggacactttttgagagggacagggatcctatctaactacacgggatagacatcgcccaagaccgtcctgagcaagcctggacgctgtgaccctaacgatgaaggtgtcccgcagacaatgtccggggcaggcaccatgctctcccaacctaccacagccagatgtttttgtaaagaacaataaaaatgaattactagaaaagca

SEQ ID NO: 9286 - DNA, 308 bp, Homo sapiens
ggagttcaagaccagcttgggcaacatagagagaccccatctctacaaaaaggaaaaaaatagccatgtgtggtggcaggtgcctgtagtcccagctacttgggaggctgcaatgcgacaggaggattgcttgtgcccaggaggtccaggctgcagtgagctgtgatcgcagcactgcactccagcctcgatgacagagtgagaccctgtctcaaaaacgaaccaaaaaaacattttgagatctcacacccttgtcattttcctaaaacaactgtttcttttttgagcagcttccagatttacatacc

SEQ ID NO: 9287 - DNA, 448 bp, Homo sapiens
ctggaagaattgctcagtctcttgattttagatttaatacttgtaaaaccctataatgactggcactagtcagacaagtgcttgttcttttgacagcatttattaagcacttactatgtgtaaggcactatgcctaatgctggggcacagcaattacagggcacacaagacaagtttatgccctagctggagacatagccactaatcaaataaagaggtatttcgttatctctatgtatatttaagactcagcccaagagctcacccacctagtgtttggcaggtagggggtggttaatttgactcacaaagttccctagtgtcaaggttgaacttgccctttgggagttcagcatgacaaatatgacttgcgaagatatagaggcagacttctttctggtggctcttaagagacccctgtcttgaaagaactgccactctgtagcag

SEQ ID NO: 9288 - DNA, 520 bp, Homo sapiens
gtttattcccccaagatgacaacttaagtctttgagtctatcagttccaggcaagggtcaagctccacaggaccagccatcagggaaataacatgacttgttatttccagactacgttcagaacagctggtcatgctccctctctcggacaatagaacttgaatgagtctaaagaggcccagagcttcaaaacaaaaagtttacctgtaggagtgaaggagtttattcatttccagtctctaatctagaaggccttttcctcccatgaaggatcttcattctgaaggttggtatgtaaattcagccagagtagtcggtgtgaacttgaaacctaggaaacttccatctccttatagtttttaaccctttgaggataagttttgtaactatattttccaaatgtaacaccattgtctgctgacaatctgttctacattaatacgccatttttttcttccacattcttctccaacacaattttactactccagaaaacttttgcccataaatttaaaaatcc

SEQ ID NO: 9289 - DNA, 432 bp, Homo sapiens
gattcccacccaaagtaactactttgaattctggagagaaggcaagggtttaagaagtggggagtaggagcttgagctgggaggcgcgcagggatcgtgctgagtacaatgtgtgtcttgttccggcggctgtcctgggcctccgtccacctggagtgcgggctggtgtcatctcaacaagtggccagatttgactgctcaccttgaggtaagctctgggattttgcagctgggtttccacgcttggtctgtctcaagattagtccctagaacttcgaagtaagcacgtaattagagactagctcacagacacatgtgaagagagtatacggtgagaaaggggaggggtatggagtctattttaagattaagggaaaaggcttctgcagtttgctctaaggttgcatctcaggactaaagagaaaggaaaaa

SEQ ID NO: 9290 - DNA, 1101 bp, Homo sapiens
aagctaaacgcgcggcttgggttcggggtttattgattgaattccgccggcgcgggagcctctgcagagagagagcgcgagagatggagatgggcagacggattcatttagagctgcggaacaggacgccctctgatgtgaaagaacttgtcctggacaacagtcggtcgaatgaaggcaaactcgaaggcctcacagatgaatttgaagaactggaattcttaagtacaatcaacgtaggcctcacctcaatcgcaaacttaccaaagttaaacaaacttaagaagcttgaactaagcgataacagagtctcagggggcctggaagtattggcagaaaagtgtccgaacctcacgcatctaaatttaagtggcaacaaaattaaagacctcagcacaatagagccactgaaaaagttagaaaacctcaagagcttagaccttttcaattgcgaggtaaccaacctgaacgactaccgagaaaatgtgttcaagctcctcccgcaactcacatatctcgacggctatgaccgggacgacaaggaggcccctgactcggatgctgagggctacgtggagggcctggatgatgaggaggaggatgaggatgaggaggagtatgatgaagatgctcaggtagtggaagacgaggaggacgaggatgaggaggaggaaggtgaagaggaggacgtgagtggagaggaggaggaggatgaagaaggttataacgatggagaggtagatgacgaggaagatgaagaagagcttggtgaagaagaaaggggtcagaagcgaaaacgagaacctgaagatgagggagaagatgatgactaagtggaataacctattttgaaaaattcctattgtgatttgactgtttttacccatatcccctctcccccccccctccaatcctgccccctgaaacttatttttttctgattgtaacgttgctgtgggaacgagaggggaagagtgtactgggggttgcggggggagggatggcgggtgggggtggaataaaatactatttttactgccactctttatttttttcccctactttttctttgtgtccggtttttgtccctgtaaatgcgat

SEQ ID NO: 9291 - DNA, 1011 bp, Homo sapiens
aagctaaacgcgcggcttgggttcggggtttattgattgaattccgccggcgcgggagcctctgcagagagagagcgcgagagatggagatgggcagacggattcatttagagctgcggaacaggacgccctctgatgtgaaagaacttgtcctggacaacagtcggtcgaatgaaggcaaactcgaaggcctcacagatgaatttgaagaactggaattcttaagtacaatcaacgtaggcctcacctcaatcgcaaacttaccaaagttaaacaaacttaagaagcttgaactaagcgataacagagtctcagggggcctggaagtattggcagaaaagtgtccgaacctcacgcatctaaatttaagtggcaacaaaattaaagacctcagcacaatagagccactgaaaaagttagaaaacctcaagagcttagaccttttcaattgcgaggtaaccaacctgaacgactaccgagaaaatgtgttcaagctcctcccgcaactcacatatctcgacggctatgaccgggacgacaaggaggcccctgactcggatgctgagggctacgtggagggcctggatgatgaggaggaggatgaggatgaggaggagtatgatgaagatgctcaggtagtggaagacgaggatgacgaggaagatgaagaagagcttggtgaagaagaaaggggtcagaagcgaaaacgagaacctgaagatgagggagaagatgatgactaagtggaataacctattttgaaaaattcctattgtgatttgactgtttttacccatatcccctctcccccccccctccaatcctgccccctgaaacttatttttttctgattgtaacgttgctgtgggaacgagaggggaagagtgtactgggggttgcggggggagggatggcgggtgggggtggaataaaatactatttttactgccactctttatttttttcccctactttttctttgtgtccggtttttgtccctgtaaatgcgat

SEQ ID NO: 9292 - DNA, 3397 bp, Homo sapiens
aaaatgtttcttacatgtgccagccaggctacacgatggaattgaatggctccagaatcaggacttgtacaattaatggcacatggagtggagtaatgccaacttgtagagctgttacctgcccaactcctccccagatctctaatggaaggctggaaggaacaaatttcgactggggctttagtattagctacatctgttctccaggctatgagctatccttccctgctgttttgacctgtgtagggaatggtacctggagtggtgaagtaccgcagtgcttaccaaagttttgtggtgaccctggtatacctgcccaaggaaaaagagaaggcaaaagctttatataccagtcagaggtttcattcagctgcaattttcctttcatattagtgggatcaagcaccagaatatgtcaagcagatggcacttggagtggttcatcacctcactgcatagagcctacccaaacctcttgtgaaaacccaggtgtgcctcggcatggatctcagaacaatacattcggatttcaagtaggaagtgttgtacagttccattgcaaaaaaggacaccttctccaagggtctacaacacgcacctgcctccctgatcttacgtggagtgggattcagcctgaatgcataccccacagctgtaaacagccagaaactcctgctcatgcaaatgtcgtagggatggaccttccatctcatgggtatacactgatttatacctgtcagcctggcttcttcttagcaggtggaacagaacatagagtgtgtagatccgataacacctggactggaaaagttcccatttgtgaagctggttctaaaatattggtgaaagatcctagacctgcactgggaacacccagcccaaagctaagtgttcctgatgatgtatttgcccaaaattatatatggaaaggctcttacaatttcaaaggaaggaaacaacccatgaccttaacagttactagtttcaatgcttccactgggagagttaacgcaacactgagcaatagcaacatggagctgctactttcaggggtatataaaagccaggaagctcgcctaatgttacgcatatatcttattaaagtacctgctcatgcttctgtgaagaaaatgaaggaagaaaattgggcaatggatggctttgtttctgctgagcctgatggagctacttatgtatttcaaggatttattcaaggcaaagattatggacaatttggcctacaaagactgggactgaatatgtcagaaggttcaaattcttcaaatcaacctcatggtacaaatagtagttctgtagccattgctattcttgtgcctttttttgcacttatatttgcaggatttggattttatctttataaacaaaggactgcacctaaaacacagtatacaggatgttcagttcatgaaaataacaatggccaagcagcttttgaaaatcccatgtatgacaccaacgcaaagtcagtggaagggaaggcggtacgatttgatcccaacttgaacacggtttgcacaatggtataacgaggcaacctttgccttcttcagaagcttggaaatcgacacacaaaacagtgcacatttagttcactgctaaacaaattaaagcacacttttcaggacttgctgggtcaccttttcctgaggaatgatacagaagagtgttttttcataaactggaccataattcttcatgtttaccatggagagttttacagaaatttggctgcactctgagagtgcttactcacagtttatttgctttttttaaaaaggagattattctaaaatataaacttatttgcatatattggaggagcatccactatcagtatttctgtgctttataaactatattagagggactgggtttaaaaaaaaagatatagggtagaaataagagctatacttacaagagtcaatagatcactgacttctctttaactgtcctgagctacatcacgcccacaaatctgtctttcataccactctatctgccattcattcttgttaaatgaggcattgttttctttatttaagattgagttatgactttaaatgtttatgagctagtttatgcctcggaagacataaggtttcccattccaatttgaatctttctatttctttagcatcatattgctcttcttcttttagactggttgtcatagtttctgcaaagggcaagttcattgtgctaccctcccaattcccccattatggagtaaccagtattattcagtgagctatggggtagtgtttcactccttgcttcaatatggttttttcctatttatttttattattttttaatcccaaatgtgatagtagcttcagtatgtttcctcacccaaaaaccatttggctggcagaaattatctagaaaaattattattttgcagttatctgagacaccaaacttaccatcctttattttacaatatttttgatcgaccaaataaaatgtcctaataatctactctatttatatctacatttccttccagctgagtcttcaaatttagcattattttgacacttttaattttcatttaacaatggattagaaaaatattttggtctagccactaaacataatgactgaaaaaaattattattataaatcaccaatataaatttattgcctacaattgtggacttatcatatttttatatatttttaaatttctgtacctttattgttaaacaccaagtttcacatacaagaggtttctttcattgtcaaattaagatatgtatttgtaagttattggtggctcatttaaactgtatcatacagtaatgccagcatttttatttaataggtcatcgtcttccttttatagctgttttacttcattgaatacgatcatgtacccagtgttaactctttgttgttgtccctttcaaatatggataactctgtgaacagtcttgactttttgtatcatgagacagagtgcctaagagaaacccttgcacctgggagcgctgcttggctctatctctacaacatttaatgaatttcttgtaaaccactttgagatacattgttttggaaattcatacaattttctcaacatggtactctactggcaggatgcagttttaaattttatgccatcagttatttattcttgtttattcaaatgactgcaataacaatgattcattcattaatgttaaggctaatacatttaagatcttgtttaaacaatgtttcttctgcaactggctactcctcttatattaatgcatacacttttgtaaagaagtatatttttatgaaaagaaactttgtaaaagtatgatgtaaattttcagtgcaatgtaaacaaaataaaaatggataattgcttttgtaaaaaaaaaaa

SEQ ID NO: 9293 - DNA, 427 bp, Homo sapiens
aaaggctttagaaattcagaaattcttctgaaaggctctaaccacatagtacttttggaagttgagttttttggttttgtttttgttttatttggtcatagaagatgatcgctgtaaacgttcaaacaatacagaaaaagtgaaattggccgggcgtggtggcttacgcttgtagtcccagcacctggggaggccaaggtgggcggatcatgaggtcaggagatccagaccatcctggctaacacggtgaaaccccatctctactaaaaatacaaaaaattagctgggtgtggtggctcgcgcctgtcatctcagctactcgggaggctgaggcaggagaattgcttgaatccgggaggcggcggttgcagtgagccgagttcgtgccactgcactccagtctgggagacagagccagactccgtct

SEQ ID NO: 9294 - DNA, 356 bp, Homo sapiens
tctgtatatatatatatatatatatatatatatatatatatatatatatatatatatatatatattaaaagtatagtttaggtttacataaagacaaagtatcataaaaaggggtcttacaatcggtagtactaaaaaaatttttaaactccaagatcttcaattttaatatataaaaataataaaacatactgataaataacagaagttctatagtcagacaacataggttcaagtttgggcttgatctcaagtagggtttcaatgtttaaaaaaaatgccatgtggtctttccaacttcatttccttatgtaacataggagataataataaattcactgtgattaagagttaaa

SEQ ID NO: 9295 - DNA, 629 bp, Homo sapiens
atgtggtgctgaaatcaagacttaactttgaagtgtcaagaatgataacctcccatccacttcatgtgatttttaagaataaattttatatatttctccaggtattaaagtggatgtccacctttgccatttcagaacctaaaggcagaatctaatggtaaaatgaagacaacctagttgtcttctaataacctagttagttctaataacattctcaaatattttcatctagagtaaatatttactgttggctttgtattctgggaattagcccaagactatgctgctcaaatgggtgcaaatatactctcaggttgcaatagcatgacgagtggtatttgaagcaataattgttccatcttggattatcggttttgctctttgatttggtaaagtttttgtttttctactcgtgccagttgtattaaaatgtcactaggttaaaaacaaacacagatatgtttattcattactgtatccctgtaataatgcctggcatgcagtaggtccctaatatttgttgaatgaatgaattatagaatagagtgcaaaattaattctaatgtattttaaagtaaagcatgagagttcaaagaaatgttgtatttgccatctacaacttggaataa

SEQ ID NO: 9296 - DNA, 397 bp, Homo sapiens
gaggcagggtcttgtcatcttgcccgggctggtcttaaactcttgagctcaagtgatctacccacctcagccactcaaagtgctggaatcacaggcatgagccaaggagggaggaccacatgagcccaggagtttgagaccagcctgggcgacatagcgagacctcatctctactaaattaaaaaaaaaattagcccagtgtggtggtgcatgcctgtagtcctagctacttgggggactgaggcaggaagattgctggagcccgggaagttgaggctacagtgagccctgatcgtgccactgcactccaacctgaacaatagagcaaccctgtctccaaaaaaggaaaacagaaatggtctagtctttgctgtttcactcccatgttggtgccact

SEQ ID NO: 9297 - DNA, 384 bp, Homo sapiens
gcaaatgtctccaaacattggcatctgttgtctgccgagactaggacaaccgagaatgatggagtgcttaaggaaattaggatggggcatgcgaccctgtaacagctgataaactgtttcaggccaccgtggctcatccagctcttttgataaacagctttaaaagcattacgtggtttggaaagcattcttcaaaaatggttatattttccagacgcatgacagtccactgttcagtattatttaagggttttaaattgtagaatcagattccttttcagtggggctcttggaactgtcgagggctgatctgtctgactcccaccaggacaatctcacaacaatattattatgtaggtcggggtcccctaggtctgttaaaaa

SEQ ID NO: 9298 - DNA, 618 bp, Homo sapiens
agaatttattatgtatttcaaaatagccagaagagaagatatgatgtgttcctagcacaaagaaatgataaatgtttgaggtgatggatatcctagttaccctaatttaatcattgcacattgtatgcatgtacaaaaatacatattccataaatatgtacagcaattatgtaacaaagtttacataagggtctctgacagaagaagcattttcccacattgcatagtgacagccaaaatcttaataggtacaataattaaagttatgaaagaattgctattgaatgaagaaaatatttgtctttagtgctttactttagattattttgagaggactatagtgtatagctaagaagcaatcattcaactcagggtaggtgggttaggtttaagaaaatctgatgactccattgagaattgtattaaagctcagccaagagagctgagctgtaacaatatttaatttgccacattgcagtttcatccatctagaagtgtaggaaattcaggttttcaggttcactcaggatatgaattgttaacttcctcttagcagagataatatattactatttaccagataatcttaatactctaacttatatttttacttcagaa

SEQ ID NO: 9299 - DNA, 359 bp, Homo sapiens
cattagcacaaggagactctctcctgatgacagaggtggatctccagtgaaaggaaccaagtgaaggtaaagcggtacaaggctttgtaaccatagttactttaagtctaagattttaaagctattgtttccattatgaaagatgcattaacattcctttatgtctactcttggaaaccttgttatcatgactagcctatttacttacttatctcttaagaggtggttaggcttaattaattcttaaacattaaccttgaagatatattctggagggtgggagaagggttttactctttgaaaatgggaaggagtaaactcagtgaaatgctcaaattctgagagtagcagaaacttta

SEQ ID NO: 9300 - DNA, 604 bp, Homo sapiens
tagtggtctctgttttcaatataattcttgatttcatttttctctggaatatattggccttctacagctattactgaattacagaaactggtttatttctgtcagaaagctgcagtgccacctgagttccaaattttaacattctttgtaaacggatggattatgataaagaagatgctaccaatgaaatagaaaaccaacgagatgagaagactgtgatcctcatgcactcagaggcacttcccttctaagtcaaagaccattctcactgactatgtgccaaggcctcacttcaggcttgtgactcaacaaagggcttttccattgatagaagcagtttgggatttgtagctacaacttcttcgatagttacctgcatgtccattgctggcagctgacttcagtcattaaaacctggctctttggttaagggagctacactgtggtttattcttaagttacatggataaactaacctctagcagaaatatagtttggttaattttgagatgtgtcatttttaaacaaaatcttaaaagcaatacagaattgtgatttattaattttaaattaaaacattgagaacttgttgaaagaaaaatta

SEQ ID NO: 9301 - DNA, 1314 bp, Homo sapiens
accacaggaggattgactacatagcctgctttcatagcttgtgtgtatttatccagtgccctaatagttgatactgccagtgatttactcctgtggagtaaaggtaagcatgttttagtttctggagtattatattgtacgttggagctaggtatttaagaatatttgggggtggggagggaagactccaatttactggtggtgcttggccagtaatcaaggtgacagtttaagtattgggtcttgcactgtaaactcctgcttatctagacttcagactaccacagagcccacacagccaggaagtctgtctccccatttagtcttatgagcaagatagatgaagccatgagaaaatatactcaaaaagcaaccaacagacaatgtcatggaatgaatctcctacagatttttccttacacttttgaaaagtaacatgattttaaaacgttggaaaattcatcaaggtacaaatcattttctgacttcagcattgatacctaaattgatttccagtacacagttttatagaattgtgaatatgtagtaatctcagttaaccagaaccttaaccttcaggttaaggaaaatacctattccttaacctctaggtaaatgggagtttaccttacaaagctgattgagagcttatttaaaacgtaaacatacaagatgtcattgcttccttgtagtgaagtgaaaaggaggtattggattaagcatttaaagttaattaaagtagtggctcgtgcctgtaatcactggctactcagaagtcttgaggtatgaggatcatttcatgccaggatttctagaccagctaggcaacataatatgacccctgtttctttaaaaaaaaaaaaaaaaaaaaggctagtgtgttggggggtgtgtttgtagttgtagttacatctactcaggaggcagaggcaggagaatgtgttgagcccaggaaggagctcagggctgcaggaagctatgatggagccactgcattttgatagtgagacctggtctcttaaagtgttttatttttaggccaggcgtagtggctcacacctgtaatctcagcactttgggaggccaagatgggtggatcacctaaggtcaggaattggagaccagcctggccaacatggcgaaaccccagctctactaaaaatacaaaaattagccaggtgtggttacatgcgcctgtagtcactcaggaggctgaggcgggagaatcacttgaaccctggaggcggaggttgcagtgagacaaggttgcaccactgcattccagcttgggcaacagagcaagactccgtctca

SEQ ID NO: 9302 - DNA, 391 bp, Homo sapiens
tacacattcatgcaaacatttcatgtaagttttcttccttaggacctttaacgatttttcagtgatgcagtgatgatatgtaatatataataaataaaatcaggccaggtgcagtggttcacacctgtaatcccagcattttggcaggcgaaggtgggagaattgcttgagctcaggagttcaagactggcctgggcaacatggtgaaacctcgtccctactaaaaatacaagaaatagtcgggcgtggtggtgcatgcctgtagtcccagctactcaggaggctgaggtgggaggatggtttgagcctgaaaggcagagattgtagtgagctgagatcgtaccactgcattccatccagcctgggcaacagagcgagaccctgtatcaaa

SEQ ID NO: 9303 - DNA, 500 bp, Homo sapiens
cacagtggcaccgaccagcatgggaagagtttttgtgctgacagcagggcattctctttgttctgtggtccatttgtagatggctgcgctcctctgcacaggggctgtcgcttctgcatggattggtgtctaaaaaccccacctaaatgagaattagatattccctttcttctttacccagaattttctttttataaataaaaataggctgggcacagtggctcatgcctgtaatcccagcacttttggaggctgaggcaggaggatcgcttaagctcaggagttcaagaccagcctgggcaacatagtgagactgtaccactacaaaaaataaaaaaacttagccagatgtggtggtgcatgcccgtagtccagctactagggaggctgaggtgggaggatcacttgagcccaggaagttgaagctgcagaaggttgtgatcgcaccaccacactccagcctgggcaacagagtgagactcactctctctcaaacaaaa

SEQ ID NO: 9304 - DNA, 864 bp, Homo sapiens
ctcctttcttgctgctacgcctcaactatttcattgcttgtcaatgctcagcaaggaagacagcctaacagcagccctcccacctgtgaattcttcactgattaaaatctggttacaaaacaagggacctagagagatgttcacttcaccacttctctacagatgcctcctgctgcttccaacttttctcctttaaggcagggtgaatccaaatcatggtcttagccctgaaggaggcaccaaagcagtttcgttgccctgtgaaaagcttctagaggagctcatctgaatgcttgaagaaaccagccgcccttgcaattacctaaaaggaattgagtcattttaacaagacattatttctgccatccacggtcacaatcatctctttgaaaaataaatactcttggtttgttgttttttttgtttgtttgtttgtttgtttttaatgtccattatgggatggtctgattagacaatgggatttcataatctagggaggtgagcacatccctgagttttgccaatcctcattattcaacctcctgctgtgctcaggggtggggcttctacacaccaggaaactccagataaatggaagcacaaactgctctgcccaaagccacactctgtggtgccaaagctggcagatcctgccattttacagactatggcctccaaactgggttttcctctttttcatccctgcaaagaataagaaagcacatagtcccaagtccctttctcaagatgaccctccacatggacacctgaagcgatcaaacagcctccgaccaagaggcatttgttatttactccacacaccatcctctagcttgttgcaaaacctgtctgccttctcacggt

SEQ ID NO: 9305 - DNA, 364 bp, Homo sapiens
  misc_feature (27)..(28): n is a, c, g, or t
ctgattcccattctaacatacaaaaanntgtttgttactcacaattcttcactgattaaaatctggttacaaaacaagggacctagagagatgttcacttcaccacttctctacagatgcctcctgctgcttccaacttttctcctttaaggcagggtgaatccaaatcatggtcttagccctgaaggaggcaccaaagcagtttcgttgccctgtgaaaagcttctagaggagctcatctgaatgcttgaagaaaccagccgcccttgcaattacctaaaaggaattgagtcattttaacaagacattatttctgccatccacggtcacaatcatctctttgaaaaataaatactcttggttt

SEQ ID NO: 9306 - DNA, 369 bp, Homo sapiens
ctctcctcacctaactcggccaccaaaatagaaaagggggagcctcaaattcttcactgattaaaatctggttacaaaacaagggacctagagagatgttcacttcaccacttctctacagatgcctcctgctgcttccaacttttctcctttaaggcagggtgaatccaaatcatggtcttagccctgaaggaggcaccaaagcagtttcgttgccctgtgaaaagcttctagaggagctcatctgaatgcttgaagaaaccagccgcccttgcaattacctaaaaggaattgagtcattttaacaagacattatttctgccatccacggtcacaatcatctctttgaaaaataaatactcttggttt

SEQ ID NO: 9307 - DNA, 365 bp, Homo sapiens
gaagatattactatatcgaggtaaaaaaaagagacttaatgataattcttcactgattaaaatctggttacaaaacaagggacctagagagatgttcacttcaccacttctctacagatgcctcctgctgcttccaacttttctcctttaaggcagggtgaatccaaatcatggtcttagccctgaaggaggcaccaaagcagtttcgttgccctgtgaaaagcttctagaggagctcatctgaatgcttgaagaaaccagccgcccttgcaattacctaaaaggaattgagtcattttaacaagacattatttctgccatccacggtcacaatcatctctttgaaaaataaatactcttggttt

SEQ ID NO: 9308 - DNA, 362 bp, Homo sapiens
cctccacctgttctcagcgaagaaacagaggaacttcttcaattcttcactgattaaaatctggttacaaaacaagggacctagagagatgttcacttcaccacttctctacagatgcctcctgctgcttccaacttttctcctttaaggcagggtgaatccaaatcatggtcttagccctgaaggaggcaccaaagcagtttcgttgccctgtgaaaagcttctagaggagctcatctgaatgcttgaagaaaccagccgcccttgcaattacctaaaaggaattgagtcattttaacaagacattatttctgccatccacggtcacaatcatctctttgaaaaataaatactcttggttt

SEQ ID NO: 9309 - DNA, 366 bp, Homo sapiens
caacacttccaataaacgttacaacacaataaccgcatctctagaattcttcactgattaaaatctggttacaaaacaagggacctagagagatgttcacttcaccacttctctacagatgcctcctgctgcttccaacttttctcctttaaggcagggtgaatccaaatcatggtcttagccctgaaggaggcaccaaagcagtttcgttgccctgtgaaaagcttctagaggagctcatctgaatgcttgaagaaaccagccgcccttgcaattacctaaaaggaattgagtcattttaacaagacattatttctgccatccacggtcacaatcatctctttgaaaaataaatactcttggttt

SEQ ID NO: 9310 - DNA, 358 bp, Homo sapiens
cgagcttgtaagttgtctaaaataaagggaatccagaattcttcactgattaaaatctggttacaaaacaagggacctagagagatgttcacttcaccacttctctacagatgcctcctgctgcttccaacttttctcctttaaggcagggtgaatccaaatcatggtcttagccctgaaggaggcaccaaagcagtttcgttgccctgtgaaaagcttctagaggagctcatctgaatgcttgaagaaaccagccgcccttgcaattacctaaaaggaattgagtcattttaacaagacattatttctgccatccacggtcacaatcatctctttgaaaaataaatactcttggttt

SEQ ID NO: 9311 - DNA, 344 bp, Homo sapiens
ggcttgttggaaccgggatccaaattcttcactgattaaaatctggttacaaaacaagggacctagagagatgttcacttcaccacttctctacagatgcctcctgctgcttccaacttttctcctttaaggcagggtgaatccaaatcatggtcttagccctgaaggaggcaccaaagcagtttcgttgccctgtgaaaagcttctagaggagctcatctgaatgcttgaagaaaccagccgcccttgcaattacctaaaaggaattgagtcattttaacaagacattatttctgccatccacggtcacaatcatctctttgaaaaataaatactcttggttt

SEQ ID NO: 9312 - DNA, 900 bp, Homo sapiens
agcaaaatgtcagggaggagagaagcatggcctctcgagacaaacccaggctgctaagaatgtaagctctggtctcactttgcgttccagccaaacacctaagtgctcctttctatgaccaaagaattcttcactgattaaaatctggttacaaaacaagggacctagagagatgttcacttcaccacttctctacagatgcctcctgctgcttccaacttttctcctttaaggcagggtgaatccaaatcatggtcttagccctgaaggaggcaccaaagcagtttcgttgccctgtgaaaagcttctagaggagctcatctgaatgcttgaagaaaccagccgcccttgcaattacctaaaaggaattgagtcattttaacaagacattatttctgccatccacggtcacaatcatctctttgaaaaataaatactcttggtttgttgttttttttgtttgtttgtttgtttgtttttaatgtccattatgggatggtctgattagacaatgggatttcataatctagggaggtgagcacatccctgagttttgccaatcctcattattcaacctcctgctgtgctcaggggtggggcttctacacaccaggaaactccagataaatggaagcacaaactgctctgcccaaagccacactctgtggtgccaaagctggcagatcctgccattttacagactatggcctccaaactgggttttcctctttttcatccctgcaaagaataagaaagcacatagtcccaagtccctttctcaagatgaccctccacatggacacctgaagcgatcaaacagcctccgaccaagaggcatttgttatttactccacacaccatcctctagcttgttgcaaaacctgtctgccttctcacggt

SEQ ID NO: 9313 - DNA, 815 bp, Homo sapiens
atagttatgcaacatatatataagaaaacggaacttgagaattcttcactgattaaaatctggttacaaaacaagggacctagagagatgttcacttcaccacttctctacagatgcctcctgctgcttccaacttttctcctttaaggcagggtgaatccaaatcatggtcttagccctgaaggaggcaccaaagcagtttcgttgccctgtgaaaagcttctagaggagctcatctgaatgcttgaagaaaccagccgcccttgcaattacctaaaaggaattgagtcattttaacaagacattatttctgccatccacggtcacaatcatctctttgaaaaataaatactcttggtttgttgttttttttgtttgtttgtttgtttgtttttaatgtccattatgggatggtctgattagacaatgggatttcataatctagggaggtgagcacatccctgagttttgccaatcctcattattcaacctcctgctgtgctcaggggtggggcttctacacaccaggaaactccagataaatggaagcacaaactgctctgcccaaagccacactctgtggtgccaaagctggcagatcctgccattttacagactatggcctccaaactgggttttcctctttttcatccctgcaaagaataagaaagcacatagtcccaagtccctttctcaagatgaccctccacatggacacctgaagcgatcaaacagcctccgaccaagaggcatttgttatttactccacacaccatcctctagcttgttgcaaaacctgtctgccttctcacggt

SEQ ID NO: 9314 - DNA, 818 bp, Homo sapiens
  misc_feature (27)..(28): n is a, c, g, or t
ctgattcccattctaacatacaaaaanntgtttgttactcacaattcttcactgattaaaatctggttacaaaacaagggacctagagagatgttcacttcaccacttctctacagatgcctcctgctgcttccaacttttctcctttaaggcagggtgaatccaaatcatggtcttagccctgaaggaggcaccaaagcagtttcgttgccctgtgaaaagcttctagaggagctcatctgaatgcttgaagaaaccagccgcccttgcaattacctaaaaggaattgagtcattttaacaagacattatttctgccatccacggtcacaatcatctctttgaaaaataaatactcttggtttgttgttttttttgtttgtttgtttgtttgtttttaatgtccattatgggatggtctgattagacaatgggatttcataatctagggaggtgagcacatccctgagttttgccaatcctcattattcaacctcctgctgtgctcaggggtggggcttctacacaccaggaaactccagataaatggaagcacaaactgctctgcccaaagccacactctgtggtgccaaagctggcagatcctgccattttacagactatggcctccaaactgggttttcctctttttcatccctgcaaagaataagaaagcacatagtcccaagtccctttctcaagatgaccctccacatggacacctgaagcgatcaaacagcctccgaccaagaggcatttgttatttactccacacaccatcctctagcttgttgcaaaacctgtctgccttctcacggt

SEQ ID NO: 9315 - DNA, 502 bp, Homo sapiens
agcaaaatgtcagggaggagagaagcatggcctctcgagacaaacccaggctgctaagaatgtaagctctggtctcactttgcgttccagccaaacacctaagtgctcctttctatgaccaaagaattcttcactgattaaaatctggttacaaaacaagggacctagagagatgttcacttcaccacttctctacagatgcctcctgctgcttccaacttttctcctttaaggcagggtgaatccaaatcatggtcttagccctgaaggaggcaccaaagcagtttcgttgccctgtgaaaagcttctagaggagctcatctgaatgcttgaagaaaccagccgcccttgcaattacctaaaaggaattgagtcattttaacaagacattatttctgccatccacggtcacaatcatctctttgaaaaataaatactcttggtttgatcggcagtccaagtattctatgaaaacaatgttagtatctatcgacatattaac

SEQ ID NO: 9316 - DNA, 587 bp, Homo sapiens
gtaaagagcaatcaattttataaactaaatacaaagaaaaagtcaattttaggagatctttcttccagttaaagaattgagaaaaggctacagaggccctaaaaattagagtcacactgttgttgaaacttggggaaagacagcattttagggttgaggttctcagttctataacaaggtagacctggatagtaaagatgttagaaaatccttttttaaattttttgagacagggtctcaccttgccgcacaaactggagtacagtggtggaatctcggctcactactgcctcaacctgctgggctcaagccatcctcctgcctgagcctgccaagaaactgggactacaggcagacaccaccactacacccatctgtttcatttttggaggggggcgtggtttgtagagacagggttttgccatgttatccaggctggtctctaactcccgagctcaagcagtccacccacctcagcctcctaaagtgctaggattacaggcgtgagctactgtgcccagccaagatgttagaaaactcttgactctgggtagcagcataactgtccaaaaaaacacaaaacaaaa

SEQ ID NO: 9317 - DNA, 494 bp, Homo sapiens
tttatgggataaataatattttatttttataataaaatgtatggggagggagaaagtcaggggagccctgacaagtctttctgtaccttcttcgtaagtctggcattacagattaatggaacattttgctagagggaatttgattctgcatatagggctaataacaaggaaaggaagcatttgtaagcaatcctgtaaagacgttttagaaataaagtatatcaatagatctaatagcaggtatccagaagttataaaaatttatggccataatattttgagcctttttttttttttaacaatcttgaatcctgttagttctgaacattaaattattgaggactttataaatcaaaactaggctggacactggtggctcacgcctgtaatcctagcactttgggaggctgaagtgggcagattgcctgagctcgggggtttgagaccagcctgttcaacagggtaaaaccatgtctctaataaaatacaaaaaa

SEQ ID NO: 9318 - DNA, 481 bp, Homo sapiens
gatactttaggaagcgggaaatgtcttactggagatagttccttcatttcaacagtcatttgtgatactgttttttaatatttgccataggatagttaaaaggtaatggaacaaacttcagatttataagtttttaattaaatataaagggggcaaaagtagataaatatcttaagagctcaccttactgtctagaaaaaatacttgctggcccagcgccgtggcacacatatgtaagtaatcccagcactttgggaggccaaggtgggaggcttgcctgagcccaggagattcagaccagtctgggtaacatggtgagacccccatctcaacaaaataaaaaattaggtgtggtgatgtgtgcctttggtggcagctactaaggaggattgcttgagccaggaggtgaagctgcagtgtgctgtgatcccgtcgctccactccaggctgggcgacagagcaagaccctgtctcaaaaaaa

SEQ ID NO: 9319 - DNA, 413 bp, Homo sapiens
acaggaagggagcttaagctataatgtatgctgtgtgttcatccaggctgttgagcatacaaagtacaagatatatttaaatgtgtacatacatgcctaatcaaattcactcctattgcttttttcaatcaatcaatttaattcattttcttcaaaatcacagccaatagagccccctgggtgctcctcttgtatcccactgtgactctaggggttcctcacgactctgacataaggtacataacgaagttaatgttaccaaggcataaccgacccagtaggctgatttataaatggaacttgtggagggccagcaggcatttccctacagtctttgatttatacatgcactcattcagtagtacacagaaactgcattcacaacatccttaaaacaccataagctagaaggg

SEQ ID NO: 9320 - DNA, 409 bp, Homo sapiens
aagaaacatgtaactgcctcccacccccagccatgaaaccagaatgcttaattgtaggagtggattttggtaacaaatcgttttgaaccatatgatcacagaattttctgagcatttctatcagagagaattctgatagaattggaccctaagtcttacctaattggctatatcaacggctattctatggtagaagggtcataacctaagtgatgaaaattatgcttttcatttgatagtctgaagatttgagattctatgaagagggagggggagaaagtggaataggggtgtgagacacataagataatgaaggggctgctgctgaaactggggaaagcatctaaaagcatgagttttcagaatcttccattcagttttttctataggcatgtaattcatgtattgt

SEQ ID NO: 9321 - DNA, 363 bp, Homo sapiens
agatgaggtcttgctatgttgctcaggctggtctctaactgctgggctcaagtgatcctcttaacctcccaagtagctgagactacaggtgcacatcattgtgcttagctaaaaaaaaaacctgttctaaagttattcctaatgatatttatctctataagtctggtactatctttaactgactgcagttaactacaagaattttcaggcggataacaaacaacaataccatcaggcattgtcaaaagcaaataaaacctgttgctttggggaggcatacttacctagcactatttgaattttcatttcagtatgaactttgtttcttcaaaaaggaagcttaactatagatccagaagaagg

SEQ ID NO: 9322 - DNA, 552 bp, Homo sapiens
gtcgaggctgcagtgagctgtggctctgcactctagcctaggcaacagagtgagatcctgtctcaaaaaaatatatgtatatattaaaacctaatatatgtaactactttcatgaaaaaattgaactaaaataattgagactgctgctgtatattttgtgcaactaaaataattgagactgctgctgttatgttttgtgcaattgaaattagatttggtatgttttaaacagctcattctagacagaagttaactgaaattcataaatgttcttagttattccctgccaccctttccccacacacacacttgaactgttctgcactttgaaacacaaagcaacttgtcagttcagtttattcagtcagggtcagttctgtgaaaacaaagccaaggcaattgtttgatttaattgactagacaaactggttatacaggttagtagaacttagttttatttttgtccagctgcatatttgaatgttcataaagtaacttagtaaaataataagattccagtgacattgtaatatattttaaagaataattacc

SEQ ID NO: 9323 - DNA, 570 bp, Homo sapiens
ctacttctaaatactatcaaactggcaacacccgaattttagagaggacacaaaccatgacatgattccccctctattcttactcaaagaaggaaacagacatttcaataatatcattctctctttcacaagtcagcaatgagttaaatgcaaggaggggacttaccctctgctctcccttcaggcttaggtctgattcaggtgcctgagacaatactgtcaaagaatagagaaattatcttgctaggcagacacaagaaaataaatttagccctgacaatgtgtggtgattaagtacttgaatgacaatggaacatgacaatgacaaatgcaggctactgccaccaaagtcattaatatatcagaaacactaatttttataaatctttcaacttcccggttggttgcatttcttgacctactctttttcctgtggaactgacttagagtcagcatcattttcagtttccaactgggaagttaaaaaaacttctacattcccagtggctttgattggccaccaaaaatgagctgtaagcaagagatgaatggcctgggtatgctcgagtg

SEQ ID NO: 9324 - DNA, 300 bp, Homo sapiens
gaaagtcttgaataatgttagcatgagagatcaacttcccagaatatatatttatagattaaatcagtgtggtgacccagcaggtggaaacattctggtaatattttggaataccagtcttccttatggtgagctctgcaattacctagcggtgtaacagtatactacttgtcctttgactgatgtactttttaagtgttttgttgatttcctttggagcagtcaggtctttaatttcttcatatcttccctccttcttagagcttcctccaccctccatcacacaacaatagttatgag

SEQ ID NO: 9325 - DNA, 432 bp, Homo sapiens
gaaaagcagtttttttagagtgctgggactggaaagagtgggaggaaataatttattcttatatatatgaataatagatgtattaatagttctgaacagtagtctcagaaatagcacttacactactaaaacaagtctatcgtgctattcaagtagaatgcaagtttttaaaatgtaggataaatctataactcaaaataagcaaccagcatagagttggtattgtagtttatgatttgcgcagatggggatttaactcttttttccccactgtatgtgattaaaatgtatcagactcatcttgagtacatattcatcataaattgtaaagcaaatgccagttttctaaacctttacttaaactatttgattacatgtaatttttatttttacttaatgaaaaaaaatgatggatcataaactcttttgttt

SEQ ID NO: 9326 - DNA, 379 bp, Homo sapiens
aaccagatgtatcttccagagttatttatgggtacacattgtaattttaggacagatttatttgtaaatgaagtaatgtataagaaagcattttgggctgggcatggtggctcacgcctgtaatcctaacacttttgggaggccgaggcaggtggatcacctgaggtcaggagttcgagaccagcctgacaaacatggtgaaaccctgtctctattaaaaatacaaaaattcaccaggcttggtggcacatgcctgttaattccagctactagggaggctgaggcaggagaatcacttgaacctaggaggtggagagtgcagtgatccgagatcgcctcattgcactccagcctaggcagcaagagtgaaactgtctca

SEQ ID NO: 9327 - DNA, 840 bp, Homo sapiens
accctctcatcagctgtcaattctcagtttaggtctaaactaattctattctcaagattccaagtgagagcattatagtaaaataatacatctcttaagtcatatctacccagttcacattcagtatcctctcagttcagaatcagaagctgtcagaccaacaagtagaggttcctgcacaagcctgagagagatcctgtaacttgtgccttggaaaaacagccccacgaaagaatgcccagacagatcttctcttagcaaacatggtgacttgagctctctgaatttgttcccttatgctacattgtttgttttttaatctctaaaaaaactaaaaaaaatttcaggtaaatttcttcctttttcattatggtttgaattagggtttttgataacttttttccaaattttagggatgttaaaggttcaggaaagtataaagaagaaaataaaaatttcccataatactgccccacaaataataattataaatattttgatgctttgcctatttgagttatttcatcatcattaaatgctcttttattaaaaatgactttaatggctaaatacaaatctgctgtaccagaacttatttaactattccctttattgtttgacaattatttcctctttcctatacttttaatgccatcatctttgcatgaaaaatcttttatttctatttgatatatgtgataggcattcttccatgcttattacaagggtttaataaaagttatttcaatttaaatgaacaaattatttccttttgatagattccaggaaaggaaattattgggtcttaagatatgaacaatttaaagcgcttgttatgtg

SEQ ID NO: 9328 - DNA, 443 bp, Homo sapiens
atatacaatttgcatatagtcaatttctgcctgtttgggaactgtaagtaaatataatcatacataagcattcttccaagacttgctctagggtcaacatgatatttctgagtgttatccatgttgatgccaagagatgttgataattcattttcacagctgtatagtatcctattgcatgaatgtatgacagtctatcatttctatcagttggcagtgctaagtcattgacaaaaatgatggttcagagttaggatttcaagaaggcacaattgccaccaaatttatccctgtttcatgcacaaactacttgagcagagaagtgaaaattttgcctcaagttagaagcaggttttagctaggggacatcaaaggagggaaggggtcttaaatgggagaggaagaaagggctaaagtgactccccaagattaaaaaataaaaa

SEQ ID NO: 9329 - DNA, 998 bp, Homo sapiens
ccattcacttagccaaagtccagcaatgcttctttaataacaggacagtagatattgtcctgttaatggttagtgtataatgagcccaagtgtgattcttcccatttgggaattctgtgaatcctgctgtaggttgttgcctgtctgattataaaagactaggctcatgtttttgctttaaatgtttgagattatggtcttataccttagtgcttctggggcaatctgaacattgtttgctttgtaaaataatttcttttagagtagtctcatgccaaatttactggcctttgattcagtacagttgggtttactgtatgtagtaaagttgagaccctgcgtagattggtctcagtgttagcattcttgggagcctttgacaaatttcccgagttaaaaattccagaaattgatgtccccagatctttagatgaacatttaagcgaagagtattaaatacttctcactgtaaattttcatctattatgaaagatactaaaaataatctcgttttttaagtttggaattgggagaatgtcattgaagtttttcagtgcttgtttttgagatacacatactttgccttaaatctggggttttttcccttaagccatgtgaccctttctacaaactcagtgtatgtttttaatatttcctgggtactctgctatcgtcctaatacataatattagggtaaggctgccctaatacgagaacattttgagtatactattgagtatacatttgagtatacatattgagtatactatttatgccaacgtgaaggatgtgattagttttagccttcaagtcataatacataccatgcttgaaagcatttaaaaaggaatagagtaattttttttcccattccacttggaagctgtgtacctcaagtgtgtgcacatttacaaatgggtgaaacataacttatgttagtccaagcttgatttgacttcagttctgcttcaacgttttagtagatagggcactgaact

SEQ ID NO: 9330 - DNA, 243 bp, Homo sapiens
attctgcttttgaaaatcaaaatcaaacatgaaacagtatgtctctctgtaaagaagtcagatatcttgttgggatattactttggctttctgccaaaaaaaaaaaaatctctattctcctaactctgaagaaatgaagcaaaaaagatatttgaggaaggaggaggggattgtgattgttttattgagactagaatccagatttgcaaagcagcacttcttttttttaactctaacccagac

SEQ ID NO: 9331 - DNA, 231 bp, Homo sapiens
ttagtatctgccctctttaaaggaaatggctcctgcctagaaggtcagatggattcttcgcgctgtgaccctttctccttgaaggacctacacctcctgtgaagaccatttcggacttgacctccacctgagtgcagactttgttcagaagtacacgcattgcctccagccacccctaccatgtttgatgggggattggttactgccagagcatatgagcattttaaccca

SEQ ID NO: 9332 - DNA, 803 bp, Homo sapiens
tcgggtcctttcgactgccacctccctgatgccatcccgtccctacgcctgccctcctgggttctgggcccgaaagtccagtcgctgagttccccaggagccctggccattccctggatactcagaggcaaaagggccaaatccttcacagctggctactgtggggacacacgcctgcctcctgcctctccaaccacaaatctcgatgccaggtcttcgcataggaatgaaaatttggaggtcaagggactagaatgatcacatatgccagggttggttaagcaaacagatacacaacgtcaggtggcgggctgacatcgaatcagtgccgtctgacagagatgaggcagagaggatgacagatacacaacgtcaggtggcgggctgacatcgaattgtgctgtctaacagagacgaggcagagaggatgacagtccccgcctccacagacacaaaagcccagctcaagggcagtttcagggcaggacagggctattgggatggggcagagcctggattgggggccctgcacaagcaccagggctcaggcacctgggagacagtgggagtacaggttagaaaggaactttctaagtattctgaggctaacaatgaaaactggaaaggggatgttaaattcctaaaaaacatcaatacagaaatactgctctaggccgggtgcagtggctcatgcctgtaatcccaacactttgggaggctgaggcgggaagatcacgaggtcaggagatcgaggccatcctggctaacacagtgaaaccaccgtctgtactaaaaatacaaaa

SEQ ID NO: 9333 - DNA, 503 bp, Homo sapiens
  misc_feature (500)..(501): n is a, c, g, or t
aggctttaaagaagtttcttggccaggtgcagtggctcacatctctaatcccaagtagctgggactacaggcacgcactaccacatctggctaactttttgtattttagtggagacagggtttcaccttgttggccaggatggtctcgatctcctgacctcgtgatccgcccaccttgcctcccaaagtgctgggattacaggcatgagccaccgcacccagcctaaaaaacatacatattttttaagtttctagaagcttggtcccatgacatctgtataatctcattggccagaacttggtcacacaaccattcctgctgctgtggagccttatgaagttaaaaatcagggttttattatcaagaaaggaagagagaccagatattggtggtcagttagcatcatgtgccaggaccaggtagtgtttaatcttagaaatgcaaggatgatttaaaatgggaacatccgttagtgtaactcattacattagcaaaaaannaa

SEQ ID NO: 9334 - DNA, 437 bp, Homo sapiens
cttagatacagtaaaaaaaaaagaaagaaaaccataattcataaaagaaaaaatggataaattgagaatgtaaaatggtacaactactttggaagacagtttggcaatttcttaataacctaaacatatacctaccatgtaattcaaccagtctgttcctatctttttaaaccaagagaactgaaagcatatgtaatacaaagacctgtatacaaagcaactttatttgtaatagccaaaaagtggaaacaactcaaataacttaactgtccatcagcaggtgtgaataccaaaacaaattctggtatatccaggaatggactactactcagaaaaaaagttggtgtagggaggtgttgagggaactgttctacatctcaattttggtggcacttacatagctatatgcatttgtcaaaactcacagaacacttcac

SEQ ID NO: 9335 - DNA, 447 bp, Homo sapiens
agagattatactcatgaaagagaatgttagtgttacagagaagcagccgataggaaatcaactgtagagacttggaggtggcggcatcgctccaggtcatcatcagtgtggtgttatctatgagaacttgagcgacagagtatttcttgatgaatttatagatcatttgagatgttgagttacttttgttttcaaataggtagagactattaatttaaaaaaacaagaaaggaaaatgaaatgtgcgtgttgagagcaataatttgtttcttttaaagattctgaaagatctgagacctgtagcattaattatttgagtgccctcccttctcccctcccctccctttctcttctcttctttcatctcctctccttctcctttattcattgttttgctttggaataggttgttcaagtatttggtttggttctggcattttgttccca

SEQ ID NO: 9336 - DNA, 405 bp, Homo sapiens
actagttagaaaaatgcagcatttgcctagagacctctaggaacccacacaaatgggccacatccattttggcttccaggaaatgaccagcactgaggaacagctaagagaagaaaacaatctttgcccagggattgtgaaccaccaaacccatggacccttactgatgaaagcatctgaagtctttaaaagcagttaaagaaaaggagtattcctggcattatttagtcccaggttgcacaagactctcctggagatcaagtcagtgctttccaaattgtagccaaaagaaaatgcacgggaggctgaggcagaagaatcgcttgaacctgggaggtggaggttgcagtgagtggagatcataccactgcaatcctgcctgggcaacagtgtgagactccatct

SEQ ID NO: 9337 - DNA, 939 bp, Homo sapiens
tccatgaagagagcactgtatacagtcagatgacctgggctcactagcctctaagcatagtcttggtttcctgcctgtaaattggtagaataagactgatttactgggcctggcatggtggctcacacctgtaatcccagcactttgagaggctgaggcaggaggatcccttgagcccaggagtttgagaccagcctgggcaacatgacaaaaccccatctctccaaaaatacaaaaattagccaggcatggtggtgcacacttgtagtcccagtaattagggggctgagacaggaggatcacttcagcctatgagtttgaggctgcagtgagctgtgattgcgccactacactccagcctggatgacaggacgaaacctgtctcaaaaacaccaaaaaacaaaaaccggtctcctggggtcatggtagcacaaacgcacatgactgagtgctcaggggttctgaggcttgtccgctgacctggggctctggccctgggagatctgggggacctgctgtcctatatgtgatgctttgaaagaaaggggcatcattccaagccaagaggccccagagagggcaccgtggggtgttcaggcttctgtgaggccccagtgagatcctgtggctgtgcccccatcacctccacccactctgccctcccactagctgcccaacggatgaatcaacgccttggcagagttttccagcagggccttgcagagagtgtgtgtgacctgtgtggccactgccttggggacgggtgaggagttagcctggaacattccagcgtgggcattattgtcctgttgcaagttcagggcaaaaccaggaatccagttttgtcgatccaattgagaaaacatttcatgaacaactacttgtggcatgcattggcactcggaataaagcgcactattgtcactaggttggcatttc

SEQ ID NO: 9338 - DNA, 4768 bp, Homo sapiens
cttcaatcaagtagccttcccactgcagtacacacccaggaaatttgtcatccaccctgagagtaacaaccttattatcattgaaacggaccacaatgcctacactgaggccacgaaagctcagagaaagcagcagatggcagaggaaatggtggaagcagcaggggaggatgagcgggagctggccgcagagatggcagcagcattcctcaatgaaaacctccctgaatccatctttggagctcccaaggctggcaatgggcagtgggcctctgtgatccgagtgatgaatcccattcaagggaacacactggaccttgtccagctggaacagaatgaggcagcttttagtgtggctgtgtgcaggttttccaacactggtgaagactggtatgtgctggtgggtgtggccaaggacctgatactaaacccccgatctgtggcagggggcttcgtctatacttacaagcttgtgaacaatggggaaaaactggagtttttgcacaagactcctgtggaagaggtccctgctgctattgccccattccaggggagggtgttgattggtgtggggaagctgttgcgtgtctatgacctgggaaagaagaagttactccgaaaatgtgagaataagcatattgccaattatatctctgggatccagactattggacatagggtaattgtatctgatgtccaagaaagtttcatctgggttcgctacaagcgtaatgaaaaccagcttatcatctttgctgatgatacctacccccgatgggtcactacagccagcctcctggactatgacactgtggctggggcagacaagtttggcaacatatgtgtggtgaggctcccacctaacaccaatgatgaagtagatgaggatcctacaggaaacaaagccctgtgggaccgtggcttgctcaatggggcctcccagaaggcagaggtgatcatgaactaccatgtcggggagacggtgctgtccttgcagaagaccacgctgatccctggaggctcagaatcacttgtctataccaccttgtctggaggaattggcatccttgtgccattcacgtcccatgaggaccatgacttcttccagcatgtggaaatgcacctgcggtctgaacatccccctctctgtgggcgggaccacctcagctttcgctcctactacttccctgtgaagaatgtgattgatggagacctctgtgagcagttcaattccatggaacccaacaaacaaaagaacgtctctgaagaactggaccgaaccccacccgaagtgtccaagaaactcgaggatatccggacccgctacgccttctgagccctcctttcccggtggggcttgccagagactgtgtgttttgtttcccccaccaccatcactgccacctggcttctgccatgtggcaggagggtgactggataattaagactgcattatgaaagtcaacagctctttcccctcagctcttctcctggaatgactggcttcccctcaaattggcactgagatttgctacacttctccccacctggtacatgatacatgaccccaggttccagtgtagaacctgagtcccccattccccaaagccatccctgcattgatatgtcttgactctcctgtctacttttgcacacacccttaatttttaattggttttcttgtaaatacagttttgtacaatgttatctctgtgggaggaaggaggcaggctgtggtgggactgggtagggtatagtatcactcctgagttccactgctctagaatctaaccagaaatagaaacctagtttttaaggtgactggcatccatgtgtcttgttctggagatgaggatgtaggtgggaggtttgaacccaagttagagcaggaagaactgagtagactccttccttccagataccgacttggacttgcggcactctgtggctccccacccccaggtctgtggtggtttctttgttttttcctggttctttttgctgtgctgatgaaacatgacctcaataaccatgtgtatacccacccctcttcccactgggtattgaggaagggtggctgattcttcctcctcttctactctgaggatgttagtatggggattttagcatgaattccagctggggagtcttaacagatgccccttttactgatagagcacctaaagcgatctttggctccataggaccataggaagggtcagtacagaagaacctagatactgccctgcccctgagaactgtgtatatgtggggcctgtctgcagcacccatctcaggtgggttccagagggcctttagggtataatgagagcctgttaggtggaagaggcccagttccagaaatgttccagcccacccctgagaattcctcctgtttagttgtgtgggaagccctcgtcttccaggctgtccttgcgccttgaacctggagaagtgagctcactgttctcaatacttcacaaatgtaaaactttctttcgtctgcatgtgctcagccatctaaattgagcaaatgatctggtgagcactgggttagaatcaggaatggtggaatacaatctgaacctctcagagcccagaacagagggttcctgacactgtgacactgtctcctggaactaagtatctcttgaatcatgacttggttttagatcagtcaagagagacccaggttttgccaggaatcgaatccctaaataacatgtttttttctcacttagctcatgaatttgcatagtagacagtagttctgaattagattttgaaaacctaatttcagggctcattttttcctgtggccctaaatccattctatcaaattgtgtgatactgacatgcagtcatctgaggaactcagcgtagatacttgagcagctcctcgcctcttttctaactcaagtttgactaaaatacatacactccgtacagaaggtagggggttatgtaagaaaggaaaacctaatctatggaatcaggagttgtcaccaccgagcttcctctggaagtctgcccatcagcttgcttgttctctgttaagaggaagggctaggacaaggatttgggcttgaatatgtggaaaggaattttcatagttgttgctgcaggacctacaaaagtttaaaattagattggatgtgactcaatgacaagtcccatctgtgtaattgttaaggggacctgattgactcctgtggtttgattgagcaaccaggtaaatagagacctctctccagctttggcaaaacccatcagaggctgctgcagaactcagacagagggatctgcccttgggtttgcttccatcctgttccattgctaagcccttgtgacttggatcctaggactgaaaagtttttagctgcctcagctttcccctgaccttactggcagaggttctgcagatgtttcctttggaagatctcttgccaagaatagcattcctttggaggaggggggttctagttggaatgttgcttttcttggttagtgtaaatgtattgctagtgagacagctgccggcgctggaaaaggctcgtctcacagggagagtgctggtccccagaatgtgtgctgttcccacgctgctgcctttcttgagcttgttagaggaaagccagaaaggcattcagatgggatcagtctggctttcaaattttttttaattcctaagttctgttttattttttaattttttaaaaaaaattttattagagacagtctctctctcttgcctagctgggagtgcagtggagtgatcatagctcactgaggcttgaactcctgggctcgagcaatccacctcagcctccagagtaggggagactacagatgtgtgccaccatactcagctaatttttaaactttcgtagagacagggtctccctgtgttgcccaggctggcctcgaactcctgacctcaaaaaatcttcctgccttggcctcccaaagcactttgagaggctgaggcaggaggatcccttgagcccaggagtttgagaccagcctgggcaacatgacaaaaccccatctctccaaaaatacaaaaattagccaggcatggtggtgcacacttgtagtcccagtaattagggggctgagacaggaggatcacttcagcctatgagtttgaggctgcagtgagctgtgattgcgccactacactccagcctggatgacaggacgaaacctgtctcaaaaacaccaaaaaacaaaaaccggtctcctggggtcatggtagcacaaacgcacatgactgagtgctcaggggttctgaggcttgtccgctgacctggggctctggccctgggagatctgggggacctgctgtcctatatgtgatgctttgaaagaaaggggcatcattccaagccaagaggccccagagagggcaccgtggggtgttcaggcttctgtgaggccccagtgagatcctgtggctgtgcccccatcacctccacccactctgccctcccactagctgcccaacggatgaatcaacgccttggcagagttttccagcagggccttgcagagagtgtgtgtgacctgtgtggccactgccttggggacgggtgaggagttagcctggaacattccagcgtgggcattattgtcctgttgcaagttcagggcaaaaccaggaatccagttttgtcgatccaattgagaaaacatttcatgaacaactacttgtggcatgcattggcactcggaataaagcgcactattgtcactaggttggcatttc

SEQ ID NO: 9339 - DNA, 184 bp, Homo sapiens
acgaaagggcgactccacaagggcgactgcttagaagttactaatttggagccgtgagtatatgtgtataagctagtaacacgtgatggtcaagggaagtactaccatttcctgtgggttattagggcctccagctgttatgaggacacactggggaatctcagctttagggagtcgatgatgt

SEQ ID NO: 9340 - DNA, 5709 bp, Homo sapiens
cttcaatcaagtagccttcccactgcagtacacacccaggaaatttgtcatccaccctgagagtaacaaccttattatcattgaaacggaccacaatgcctacactgaggccacgaaagctcagagaaagcagcagatggcagaggaaatggtggaagcagcaggggaggatgagcgggagctggccgcagagatggcagcagcattcctcaatgaaaacctccctgaatccatctttggagctcccaaggctggcaatgggcagtgggcctctgtgatccgagtgatgaatcccattcaagggaacacactggaccttgtccagctggaacagaatgaggcagcttttagtgtggctgtgtgcaggttttccaacactggtgaagactggtatgtgctggtgggtgtggccaaggacctgatactaaacccccgatctgtggcagggggcttcgtctatacttacaagcttgtgaacaatggggaaaaactggagtttttgcacaagactcctgtggaagaggtccctgctgctattgccccattccaggggagggtgttgattggtgtggggaagctgttgcgtgtctatgacctgggaaagaagaagttactccgaaaatgtgagaataagcatattgccaattatatctctgggatccagactattggacatagggtaattgtatctgatgtccaagaaagtttcatctgggttcgctacaagcgtaatgaaaaccagcttatcatctttgctgatgatacctacccccgatgggtcactacagccagcctcctggactatgacactgtggctggggcagacaagtttggcaacatatgtgtggtgaggctcccacctaacaccaatgatgaagtagatgaggatcctacaggaaacaaagccctgtgggaccgtggcttgctcaatggggcctcccagaaggcagaggtgatcatgaactaccatgtcggggagacggtgctgtccttgcagaagaccacgctgatccctggaggctcagaatcacttgtctataccaccttgtctggaggaattggcatccttgtgccattcacgtcccatgaggaccatgacttcttccagcatgtggaaatgcacctgcggtctgaacatccccctctctgtgggcgggaccacctcagctttcgctcctactacttccctgtgaagaatgtgattgatggagacctctgtgagcagttcaattccatggaacccaacaaacaaaagaacgtctctgaagaactggaccgaaccccacccgaagtgtccaagaaactcgaggatatccggacccgctacgccttctgagccctcctttcccggtggggcttgccagagactgtgtgttttgtttcccccaccaccatcactgccacctggcttctgccatgtggcaggagggtgactggataattaagactgcattatgaaagtcaacagctctttcccctcagctcttctcctggaatgactggcttcccctcaaattggcactgagatttgctacacttctccccacctggtacatgatacatgaccccaggttccagtgtagaacctgagtcccccattccccaaagccatccctgcattgatatgtcttgactctcctgtctacttttgcacacacccttaatttttaattggttttcttgtaaatacagttttgtacaatgttatctctgtgggaggaaggaggcaggctgtggtgggactgggtagggtatagtatcactcctgagttccactgctctagaatctaaccagaaatagaaacctagtttttaaggtgactggcatccatgtgtcttgttctggagatgaggatgtaggtgggaggtttgaacccaagttagagcaggaagaactgagtagactccttccttccagataccgacttggacttgcggcactctgtggctccccacccccaggtctgtggtggtttctttgttttttcctggttctttttgctgtgctgatgaaacatgacctcaataaccatgtgtatacccacccctcttcccactgggtattgaggaagggtggctgattcttcctcctcttctactctgaggatgttagtatggggattttagcatgaattccagctggggagtcttaacagatgccccttttactgatagagcacctaaagcgatctttggctccataggaccataggaagggtcagtacagaagaacctagatactgccctgcccctgagaactgtgtatatgtggggcctgtctgcagcacccatctcaggtgggttccagagggcctttagggtataatgagagcctgttaggtggaagaggcccagttccagaaatgttccagcccacccctgagaattcctcctgtttagttgtgtgggaagccctcgtcttccaggctgtccttgcgccttgaacctggagaagtgagctcactgttctcaatacttcacaaatgtaaaactttctttcgtctgcatgtgctcagccatctaaattgagcaaatgatctggtgagcactgggttagaatcaggaatggtggaatacaatctgaacctctcagagcccagaacagagggttcctgacactgtgacactgtctcctggaactaagtatctcttgaatcatgacttggttttagatcagtcaagagagacccaggttttgccaggaatcgaatccctaaataacatgtttttttctcacttagctcatgaatttgcatagtagacagtagttctgaattagattttgaaaacctaatttcagggctcattttttcctgtggccctaaatccattctatcaaattgtgtgatactgacatgcagtcatctgaggaactcagcgtagatacttgagcagctcctcgcctcttttctaactcaagtttgactaaaatacatacactccgtacagaaggtagggggttatgtaagaaaggaaaacctaatctatggaatcaggagttgtcaccaccgagcttcctctggaagtctgcccatcagcttgcttgttctctgttaagaggaagggctaggacaaggatttgggcttgaatatgtggaaaggaattttcatagttgttgctgcaggacctacaaaagtttaaaattagattggatgtgactcaatgacaagtcccatctgtgtaattgttaaggggacctgattgactcctgtggtttgattgagcaaccaggtaaatagagacctctctccagctttggcaaaacccatcagaggctgctgcagaactcagacagagggatctgcccttgggtttgcttccatcctgttccattgctaagcccttgtgacttggatcctaggactgaaaagtttttagctgcctcagctttcccctgaccttactggcagaggttctgcagatgtttcctttggaagatctcttgccaagaatagcattcctttggaggaggggggttctagttggaatgttgcttttcttggttagtgtaaatgtattgctagtgagacagctgccggcgctggaaaaggctcgtctcacagggagagtgctggtccccagaatgtgtgctgttcccacgctgctgcctttcttgagcttgttagaggaaagccagaaaggcattcagatgggatcagtctggctttcaaattttttttaattcctaagttctgttttattttttaattttttaaaaaaaattttattagagacagtctctctctcttgcctagctgggagtgcagtggagtgatcatagctcactgaggcttgaactcctgggctcgagcaatccacctcagcctccagagtaggggagactacagatgtgtgccaccatactcagctaatttttaaactttcgtagagacagggtctccctgtgttgcccaggctggcctcgaactcctgacctcaaaaaatcttcctgccttggcctcccaaagcactgggattataggtgtgagccattgcgcctggtcataaattcttgtttttttgtttgtttgtttattagagatggaatctctctctcttgaccaggctagagggctgtggtgcgatctcagcccactgcaacctctatctcctgagctcaagcgatcctccttagcttcccaaatagctggaactacaggcatgtgccatcacgtccagctaatttttgtatttttagtagagaaggttttaccatgttggacagggtggtctcgaactcctggcctaaagtggtccacctagctcagcctaccaaagtgctgtgattacaggcgtgagccaccatgcccagcctctaaattctgttttctattcaaagtaaaaatgacatgtgtttgagtcatccacttgctcatttgcatatggaatattgtatgtgaatattttattacacccttaaaattaattttcaagggctatatgtagagctcagaagaaacatctctgctgctgaaatcaaacctggtccaaaaaacgtcacaacggaggaaaggaatagatggctctcgaggacaagatagggactcttaaaacacctgcttggccatggttgattgacatttgagtgatctggtagcccaacacaccctgtgaagttcaggtgaactgaaatgggcaggtgtaggctacacaccagtctgaaccagcacaaccaagagttgtttctcttttttttctttttctttttcttttttttcttttttttttttttttttttgagatgaagtcttactctgttgcccaggctagagtacagaggcacaatctcggctcaccacagcctccgcctcctgggttcaagcaattctcctgcctcagcctcccaagtagctgggactacaggcatgcaccaccatgcctggctaatttttgtatttttagtagagatggggtttcaccatgttggccaggctggtttcgaactcgtgacctcaggtgatccacccacactttgggcggccagaggcaggcagattgcttgagcccagaagtttaagaccagcctaggaaacagaccccatctctacaaaaaattcaaaaagccgggcgtgaagccctgttttttttttaaaaaaagagtctgctggtgatgtctgggcatgtgtctgcttcacagtccagtgttatgatcagtagctgtgatggacaatgaacattgctgcttgttcaaaatgaagaaaaaaaatatcaaagaaaaccaggtttggaagtttcagatttggaaaaggagctgggccagcccatctggaatagctgaggggccctgttagccccaccctaccccaccccacccccgtatgcagcatctctggcggtgcccagagagggcaccgtggggtgttcaggcttctgtgaggccccagtgagatcctgtggctgtgcccccatcacctccacccactctgccctcccactagctgcccaacggatgaatcaacgccttggcagagttttccagcagggccttgcagagagtgtgtgtgacctgtgtggccactgccttggggacgggtgaggagttagcctggaacattccagcgtgggcattattgtcctgttgcaagttcagggcaaaaccaggaatccagttttgtcgatccaattgagaaaacatttcatgaacaactacttgtggcatgcattggcactcggaataaagcgcactattgtcactaggttggcatttc

SEQ ID NO: 9341 - DNA, 5108 bp, Homo sapiens
cttcaatcaagtagccttcccactgcagtacacacccaggaaatttgtcatccaccctgagagtaacaaccttattatcattgaaacggaccacaatgcctacactgaggccacgaaagctcagagaaagcagcagatggcagaggaaatggtggaagcagcaggggaggatgagcgggagctggccgcagagatggcagcagcattcctcaatgaaaacctccctgaatccatctttggagctcccaaggctggcaatgggcagtgggcctctgtgatccgagtgatgaatcccattcaagggaacacactggaccttgtccagctggaacagaatgaggcagcttttagtgtggctgtgtgcaggttttccaacactggtgaagactggtatgtgctggtgggtgtggccaaggacctgatactaaacccccgatctgtggcagggggcttcgtctatacttacaagcttgtgaacaatggggaaaaactggagtttttgcacaagactcctgtggaagaggtccctgctgctattgccccattccaggggagggtgttgattggtgtggggaagctgttgcgtgtctatgacctgggaaagaagaagttactccgaaaatgtgagaataagcatattgccaattatatctctgggatccagactattggacatagggtaattgtatctgatgtccaagaaagtttcatctgggttcgctacaagcgtaatgaaaaccagcttatcatctttgctgatgatacctacccccgatgggtcactacagccagcctcctggactatgacactgtggctggggcagacaagtttggcaacatatgtgtggtgaggctcccacctaacaccaatgatgaagtagatgaggatcctacaggaaacaaagccctgtgggaccgtggcttgctcaatggggcctcccagaaggcagaggtgatcatgaactaccatgtcggggagacggtgctgtccttgcagaagaccacgctgatccctggaggctcagaatcacttgtctataccaccttgtctggaggaattggcatccttgtgccattcacgtcccatgaggaccatgacttcttccagcatgtggaaatgcacctgcggtctgaacatccccctctctgtgggcgggaccacctcagctttcgctcctactacttccctgtgaagaatgtgattgatggagacctctgtgagcagttcaattccatggaacccaacaaacaaaagaacgtctctgaagaactggaccgaaccccacccgaagtgtccaagaaactcgaggatatccggacccgctacgccttctgagccctcctttcccggtggggcttgccagagactgtgtgttttgtttcccccaccaccatcactgccacctggcttctgccatgtggcaggagggtgactggataattaagactgcattatgaaagtcaacagctctttcccctcagctcttctcctggaatgactggcttcccctcaaattggcactgagatttgctacacttctccccacctggtacatgatacatgaccccaggttccagtgtagaacctgagtcccccattccccaaagccatccctgcattgatatgtcttgactctcctgtctacttttgcacacacccttaatttttaattggttttcttgtaaatacagttttgtacaatgttatctctgtgggaggaaggaggcaggctgtggtgggactgggtagggtatagtatcactcctgagttccactgctctagaatctaaccagaaatagaaacctagtttttaaggtgactggcatccatgtgtcttgttctggagatgaggatgtaggtgggaggtttgaacccaagttagagcaggaagaactgagtagactccttccttccagataccgacttggacttgcggcactctgtggctccccacccccaggtctgtggtggtttctttgttttttcctggttctttttgctgtgctgatgaaacatgacctcaataaccatgtgtatacccacccctcttcccactgggtattgaggaagggtggctgattcttcctcctcttctactctgaggatgttagtatggggattttagcatgaattccagctggggagtcttaacagatgccccttttactgatagagcacctaaagcgatctttggctccataggaccataggaagggtcagtacagaagaacctagatactgccctgcccctgagaactgtgtatatgtggggcctgtctgcagcacccatctcaggtgggttccagagggcctttagggtataatgagagcctgttaggtggaagaggcccagttccagaaatgttccagcccacccctgagaattcctcctgtttagttgtgtgggaagccctcgtcttccaggctgtccttgcgccttgaacctggagaagtgagctcactgttctcaatacttcacaaatgtaaaactttctttcgtctgcatgtgctcagccatctaaattgagcaaatgatctggtgagcactgggttagaatcaggaatggtggaatacaatctgaacctctcagagcccagaacagagggttcctgacactgtgacactgtctcctggaactaagtatctcttgaatcatgacttggttttagatcagtcaagagagacccaggttttgccaggaatcgaatccctaaataacatgtttttttctcacttagctcatgaatttgcatagtagacagtagttctgaattagattttgaaaacctaatttcagggctcattttttcctgtggccctaaatccattctatcaaattgtgtgatactgacatgcagtcatctgaggaactcagcgtagatacttgagcagctcctcgcctcttttctaactcaagtttgactaaaatacatacactccgtacagaaggtagggggttatgtaagaaaggaaaacctaatctatggaatcaggagttgtcaccaccgagcttcctctggaagtctgcccatcagcttgcttgttctctgttaagaggaagggctaggacaaggatttgggcttgaatatgtggaaaggaattttcatagttgttgctgcaggacctacaaaagtttaaaattagattggatgtgactcaatgacaagtcccatctgtgtaattgttaaggggacctgattgactcctgtggtttgattgagcaaccaggtaaatagagacctctctccagctttggcaaaacccatcagaggctgctgcagaactcagacagagggatctgcccttgggtttgcttccatcctgttccattgctaagcccttgtgacttggatcctaggactgaaaagtttttagctgcctcagctttcccctgaccttactggcagaggttctgcagatgtttcctttggaagatctcttgccaagaatagcattcctttggaggaggggggttctagttggaatgttgcttttcttggttagtgtaaatgtattgctagtgagacagctgccggcgctggaaaaggctcgtctcacagggagagtgctggtccccagaatgtgtgctgttcccacgctgctgcctttcttgagcttgttagaggaaagccagaaaggcattcagatgggatcagtctggctttcaaattttttttaattcctaagttctgttttattttttaattttttaaaaaaaattttattagagacagtctctctctcttgcctagctgggagtgcagtggagtgatcatagctcactgaggcttgaactcctgggctcgagcaatccacctcagcctccagagtaggggagactacagatgtgtgccaccatactcagctaatttttaaactttcgtagagacagggtctccctgtgttgcccaggctggcctcgaactcctgacctcaaaaaatcttcctgccttggcctcccaaagcactgggattataggtgtgagccattgcgcctggtcataaattcttgtttttttgtttgtttgtttattagagatggaatctctctctcttgaccaggctagagggctgtggtgcgatctcagcccactgcaacctctatctcctgagctcaagcgatcctccttagcttcccaaatagctggaactacaggcatgtgccatcacgtccagctaatttttgtatttttagtagagaaggttttaccatgttggacagggtggtctcgaactcctggcctaaagtggtccacctagctcagcctaccaaagtgctgtgattacaggcgtgagccaccatgcccagcctctaaattctgttttctattcaaagtaaaaatgacatgtgtttgagtcatccacttgctcatttgcatatggaatattgtatgtgaatattttattacacccttaaaattaattttcaagggctatatgtagagctcagaagaaacatctctgctgctgaaatcaaacctggtccaaaaaacgtcacaacggaggaaaggaatagatggctctcgaggacaagatagggactcttaaaacacctgcttggccatggttgattgacatttgagtgatctggtagcccaacacaccctgtgaagttcaggtgaactgaaatgggcaggtgtaggctacacaccagtctgaaccagcacaaccaagagttgtttctcttttttttctttttctttttcttttttttcttttttttttttttttttttgagatgaagtcttactctgttgcccaggctagagtacagaggcacaatctcggctcaccacagcctccgcctcctgggttcaagcaattctcctgcctcagcctcccaagtagctgggactacaggcatgcaccaccatgcctggctaatttttgtatttttagtagagatggggtttcaccatgttggccaggctggtttcgaactcgtgacctcaggtgatccacccaccttggtctcccaaagcgctgggattacaggcgtgagccactgcacttggccaggagctgtttaagccatcaggagacatgctgacccactagaagaggctgctacgctcatttcttccacaaacgtttactgggcacc

SEQ ID NO: 9342 - DNA, 888 bp, Homo sapiens
caggggttttaggtcaggaaatggtaggaaacctgtagttgtggctcataatcctagtgggatattagaaccctcttcatttgtcagaacagattcctggggtctgctcccaattattcacacggtggttcatgcctggtaatcccagcactttgggcggccagaggcaggcagattgcttgagcccagaagtttaagaccagcctaggaaacagaccccatctctacaaaaaattcaaaaagccgggcgtgaagccctgttttttttttaaaaaaagagtctgctggtgatgtctgggcatgtgtctgcttcacagtccagtgttatgatcagtagctgtgatggacaatgaacattgctgcttgttcaaaatgaagaaaaaaaatatcaaagaaaaccaggtttggaagtttcagatttggaaaaggagctgggccagcccatctggaatagctgaggggccctgttagccccaccctaccccaccccacccccgtatgcagcatctctggcggtgcccagagagggcaccgtggggtgttcaggcttctgtgaggccccagtgagatcctgtggctgtgcccccatcacctccacccactctgccctcccactagctgcccaacggatgaatcaacgccttggcagagttttccagcagggccttgcagagagtgtgtgtgacctgtgtggccactgccttggggacgggtgaggagttagcctggaacattccagcgtgggcattattgtcctgttgcaagttcagggcaaaaccaggaatccagttttgtcgatccaattgagaaaacatttcatgaacaactacttgtggcatgcattggcactcggaataaagcgcactattgtcactaggttggcatttc

SEQ ID NO: 9343 - DNA, 331 bp, Homo sapiens
aagaaaaaaaatatcaaagaaaaccaggtttggaagtttcagatttggaaaaggagctgggccagcccatctggaatagctgaggggccctgttagccccaccctaccccaccccacccccgtatgcagcatctctggcggtgcccagaggcaagcccccttcagtttcccacctctcactctgccttccagagcctagtcaagttttaaattcccaggtccactcagcagaacttgctcccttctctgactgcagtctcataatgaaaggagaggtgctttcagttgggtcatttggtagcgtttaggcttagaagttactaatttggag

SEQ ID NO: 9344 - DNA, 5638 bp, Homo sapiens
cttcaatcaagtagccttcccactgcagtacacacccaggaaatttgtcatccaccctgagagtaacaaccttattatcattgaaacggaccacaatgcctacactgaggccacgaaagctcagagaaagcagcagatggcagaggaaatggtggaagcagcaggggaggatgagcgggagctggccgcagagatggcagcagcattcctcaatgaaaacctccctgaatccatctttggagctcccaaggctggcaatgggcagtgggcctctgtgatccgagtgatgaatcccattcaagggaacacactggaccttgtccagctggaacagaatgaggcagcttttagtgtggctgtgtgcaggttttccaacactggtgaagactggtatgtgctggtgggtgtggccaaggacctgatactaaacccccgatctgtggcagggggcttcgtctatacttacaagcttgtgaacaatggggaaaaactggagtttttgcacaagactcctgtggaagaggtccctgctgctattgccccattccaggggagggtgttgattggtgtggggaagctgttgcgtgtctatgacctgggaaagaagaagttactccgaaaatgtgagaataagcatattgccaattatatctctgggatccagactattggacatagggtaattgtatctgatgtccaagaaagtttcatctgggttcgctacaagcgtaatgaaaaccagcttatcatctttgctgatgatacctacccccgatgggtcactacagccagcctcctggactatgacactgtggctggggcagacaagtttggcaacatatgtgtggtgaggctcccacctaacaccaatgatgaagtagatgaggatcctacaggaaacaaagccctgtgggaccgtggcttgctcaatggggcctcccagaaggcagaggtgatcatgaactaccatgtcggggagacggtgctgtccttgcagaagaccacgctgatccctggaggctcagaatcacttgtctataccaccttgtctggaggaattggcatccttgtgccattcacgtcccatgaggaccatgacttcttccagcatgtggaaatgcacctgcggtctgaacatccccctctctgtgggcgggaccacctcagctttcgctcctactacttccctgtgaagaatgtgattgatggagacctctgtgagcagttcaattccatggaacccaacaaacaaaagaacgtctctgaagaactggaccgaaccccacccgaagtgtccaagaaactcgaggatatccggacccgctacgccttctgagccctcctttcccggtggggcttgccagagactgtgtgttttgtttcccccaccaccatcactgccacctggcttctgccatgtggcaggagggtgactggataattaagactgcattatgaaagtcaacagctctttcccctcagctcttctcctggaatgactggcttcccctcaaattggcactgagatttgctacacttctccccacctggtacatgatacatgaccccaggttccagtgtagaacctgagtcccccattccccaaagccatccctgcattgatatgtcttgactctcctgtctacttttgcacacacccttaatttttaattggttttcttgtaaatacagttttgtacaatgttatctctgtgggaggaaggaggcaggctgtggtgggactgggtagggtatagtatcactcctgagttccactgctctagaatctaaccagaaatagaaacctagtttttaaggtgactggcatccatgtgtcttgttctggagatgaggatgtaggtgggaggtttgaacccaagttagagcaggaagaactgagtagactccttccttccagataccgacttggacttgcggcactctgtggctccccacccccaggtctgtggtggtttctttgttttttcctggttctttttgctgtgctgatgaaacatgacctcaataaccatgtgtatacccacccctcttcccactgggtattgaggaagggtggctgattcttcctcctcttctactctgaggatgttagtatggggattttagcatgaattccagctggggagtcttaacagatgccccttttactgatagagcacctaaagcgatctttggctccataggaccataggaagggtcagtacagaagaacctagatactgccctgcccctgagaactgtgtatatgtggggcctgtctgcagcacccatctcaggtgggttccagagggcctttagggtataatgagagcctgttaggtggaagaggcccagttccagaaatgttccagcccacccctgagaattcctcctgtttagttgtgtgggaagccctcgtcttccaggctgtccttgcgccttgaacctggagaagtgagctcactgttctcaatacttcacaaatgtaaaactttctttcgtctgcatgtgctcagccatctaaattgagcaaatgatctggtgagcactgggttagaatcaggaatggtggaatacaatctgaacctctcagagcccagaacagagggttcctgacactgtgacactgtctcctggaactaagtatctcttgaatcatgacttggttttagatcagtcaagagagacccaggttttgccaggaatcgaatccctaaataacatgtttttttctcacttagctcatgaatttgcatagtagacagtagttctgaattagattttgaaaacctaatttcagggctcattttttcctgtggccctaaatccattctatcaaattgtgtgatactgacatgcagtcatctgaggaactcagcgtagatacttgagcagctcctcgcctcttttctaactcaagtttgactaaaatacatacactccgtacagaaggtagggggttatgtaagaaaggaaaacctaatctatggaatcaggagttgtcaccaccgagcttcctctggaagtctgcccatcagcttgcttgttctctgttaagaggaagggctaggacaaggatttgggcttgaatatgtggaaaggaattttcatagttgttgctgcaggacctacaaaagtttaaaattagattggatgtgactcaatgacaagtcccatctgtgtaattgttaaggggacctgattgactcctgtggtttgattgagcaaccaggtaaatagagacctctctccagctttggcaaaacccatcagaggctgctgcagaactcagacagagggatctgcccttgggtttgcttccatcctgttccattgctaagcccttgtgacttggatcctaggactgaaaagtttttagctgcctcagctttcccctgaccttactggcagaggttctgcagatgtttcctttggaagatctcttgccaagaatagcattcctttggaggaggggggttctagttggaatgttgcttttcttggttagtgtaaatgtattgctagtgagacagctgccggcgctggaaaaggctcgtctcacagggagagtgctggtccccagaatgtgtgctgttcccacgctgctgcctttcttgagcttgttagaggaaagccagaaaggcattcagatgggatcagtctggctttcaaattttttttaattcctaagttctgttttattttttaattttttaaaaaaaattttattagagacagtctctctctcttgcctagctgggagtgcagtggagtgatcatagctcactgaggcttgaactcctgggctcgagcaatccacctcagcctccagagtaggggagactacagatgtgtgccaccatactcagctaatttttaaactttcgtagagacagggtctccctgtgttgcccaggctggcctcgaactcctgacctcaaaaaatcttcctgccttggcctcccaaagcactgggattataggtgtgagccattgcgcctggtcataaattcttgtttttttgtttgtttgtttattagagatggaatctctctctcttgaccaggctagagggctgtggtgcgatctcagcccactgcaacctctatctcctgagctcaagcgatcctccttagcttcccaaatagctggaactacaggcatgtgccatcacgtccagctaatttttgtatttttagtagagaaggttttaccatgttggacagggtggtctcgaactcctggcctaaagtggtccacctagctcagcctaccaaagtgctgtgattacaggcgtgagccaccatgcccagcctctaaattctgttttctattcaaagtaaaaatgacatgtgtttgagtcatccacttgctcatttgcatatggaatattgtatgtgaatattttattacacccttaaaattaattttcaagggctatatgtagagctcagaagaaacatctctgctgctgaaatcaaacctggtccaaaaaacgtcacaacggaggaaaggaatagatggctctcgaggacaagatagggactcttaaaacacctgcttggccatggttgattgacatttgagtgatctggtagcccaacacaccctgtgaagttcaggtgaactgaaatgggcaggtgtaggctacacaccagtctgaaccagcacaaccaagagttgtttctcttttttttctttttctttttcttttttttcttttttttttttttttttttgagatgaagtcttactctgttgcccaggctagagtacagaggcacaatctcggctcaccacagcctccgcctcctgggttcaagcaattctcctgcctcagcctttgagaggctgaggcaggaggatcccttgagcccaggagtttgagaccagcctgggcaacatgacaaaaccccatctctccaaaaatacaaaaattagccaggcatggtggtgcacacttgtagtcccagtaattagggggctgagacaggaggatcacttcagcctatgagtttgaggctgcagtgagctgtgattgcgccactacactccagcctggatgacaggacgaaacctgtctcaaaaacaccaaaaaacaaaaaccggtctcctggggtcatggtagcacaaacgcacatgactgagtgctcaggggttctgaggcttgtccgctgacctggggctctggccctgggagatctgggggacctgctgtcctatatgtgatgctttgaaagaaaggggcatcattccaagccaagaggccccagagagggcaccgtggggtgttcaggcttctgtgaggccccagtgagatcctgtggctgtgcccccatcacctccacccactctgccctcccactagctgcccaacggatgaatcaacgccttggcagagttttccagcagggccttgcagagagtgtgtgtgacctgtgtggccactgccttggggacgggtgaggagttagcctggaacattccagcgtgggcattattgtcctgttgcaagttcagggcaaaaccaggaatccagttttgtcgatccaattgagaaaacatttcatgaacaactacttgtggcatgcattggcactcggaataaagcgcactattgtcactaggttggcatttc

SEQ ID NO: 9345 - DNA, 5413 bp, Homo sapiens
cttcaatcaagtagccttcccactgcagtacacacccaggaaatttgtcatccaccctgagagtaacaaccttattatcattgaaacggaccacaatgcctacactgaggccacgaaagctcagagaaagcagcagatggcagaggaaatggtggaagcagcaggggaggatgagcgggagctggccgcagagatggcagcagcattcctcaatgaaaacctccctgaatccatctttggagctcccaaggctggcaatgggcagtgggcctctgtgatccgagtgatgaatcccattcaagggaacacactggaccttgtccagctggaacagaatgaggcagcttttagtgtggctgtgtgcaggttttccaacactggtgaagactggtatgtgctggtgggtgtggccaaggacctgatactaaacccccgatctgtggcagggggcttcgtctatacttacaagcttgtgaacaatggggaaaaactggagtttttgcacaagactcctgtggaagaggtccctgctgctattgccccattccaggggagggtgttgattggtgtggggaagctgttgcgtgtctatgacctgggaaagaagaagttactccgaaaatgtgagaataagcatattgccaattatatctctgggatccagactattggacatagggtaattgtatctgatgtccaagaaagtttcatctgggttcgctacaagcgtaatgaaaaccagcttatcatctttgctgatgatacctacccccgatgggtcactacagccagcctcctggactatgacactgtggctggggcagacaagtttggcaacatatgtgtggtgaggctcccacctaacaccaatgatgaagtagatgaggatcctacaggaaacaaagccctgtgggaccgtggcttgctcaatggggcctcccagaaggcagaggtgatcatgaactaccatgtcggggagacggtgctgtccttgcagaagaccacgctgatccctggaggctcagaatcacttgtctataccaccttgtctggaggaattggcatccttgtgccattcacgtcccatgaggaccatgacttcttccagcatgtggaaatgcacctgcggtctgaacatccccctctctgtgggcgggaccacctcagctttcgctcctactacttccctgtgaagaatgtgattgatggagacctctgtgagcagttcaattccatggaacccaacaaacaaaagaacgtctctgaagaactggaccgaaccccacccgaagtgtccaagaaactcgaggatatccggacccgctacgccttctgagccctcctttcccggtggggcttgccagagactgtgtgttttgtttcccccaccaccatcactgccacctggcttctgccatgtggcaggagggtgactggataattaagactgcattatgaaagtcaacagctctttcccctcagctcttctcctggaatgactggcttcccctcaaattggcactgagatttgctacacttctccccacctggtacatgatacatgaccccaggttccagtgtagaacctgagtcccccattccccaaagccatccctgcattgatatgtcttgactctcctgtctacttttgcacacacccttaatttttaattggttttcttgtaaatacagttttgtacaatgttatctctgtgggaggaaggaggcaggctgtggtgggactgggtagggtatagtatcactcctgagttccactgctctagaatctaaccagaaatagaaacctagtttttaaggtgactggcatccatgtgtcttgttctggagatgaggatgtaggtgggaggtttgaacccaagttagagcaggaagaactgagtagactccttccttccagataccgacttggacttgcggcactctgtggctccccacccccaggtctgtggtggtttctttgttttttcctggttctttttgctgtgctgatgaaacatgacctcaataaccatgtgtatacccacccctcttcccactgggtattgaggaagggtggctgattcttcctcctcttctactctgaggatgttagtatggggattttagcatgaattccagctggggagtcttaacagatgccccttttactgatagagcacctaaagcgatctttggctccataggaccataggaagggtcagtacagaagaacctagatactgccctgcccctgagaactgtgtatatgtggggcctgtctgcagcacccatctcaggtgggttccagagggcctttagggtataatgagagcctgttaggtggaagaggcccagttccagaaatgttccagcccacccctgagaattcctcctgtttagttgtgtgggaagccctcgtcttccaggctgtccttgcgccttgaacctggagaagtgagctcactgttctcaatacttcacaaatgtaaaactttctttcgtctgcatgtgctcagccatctaaattgagcaaatgatctggtgagcactgggttagaatcaggaatggtggaatacaatctgaacctctcagagcccagaacagagggttcctgacactgtgacactgtctcctggaactaagtatctcttgaatcatgacttggttttagatcagtcaagagagacccaggttttgccaggaatcgaatccctaaataacatgtttttttctcacttagctcatgaatttgcatagtagacagtagttctgaattagattttgaaaacctaatttcagggctcattttttcctgtggccctaaatccattctatcaaattgtgtgatactgacatgcagtcatctgaggaactcagcgtagatacttgagcagctcctcgcctcttttctaactcaagtttgactaaaatacatacactccgtacagaaggtagggggttatgtaagaaaggaaaacctaatctatggaatcaggagttgtcaccaccgagcttcctctggaagtctgcccatcagcttgcttgttctctgttaagaggaagggctaggacaaggatttgggcttgaatatgtggaaaggaattttcatagttgttgctgcaggacctacaaaagtttaaaattagattggatgtgactcaatgacaagtcccatctgtgtaattgttaaggggacctgattgactcctgtggtttgattgagcaaccaggtaaatagagacctctctccagctttggcaaaacccatcagaggctgctgcagaactcagacagagggatctgcccttgggtttgcttccatcctgttccattgctaagcccttgtgacttggatcctaggactgaaaagtttttagctgcctcagctttcccctgaccttactggcagaggttctgcagatgtttcctttggaagatctcttgccaagaatagcattcctttggaggaggggggttctagttggaatgttgcttttcttggttagtgtaaatgtattgctagtgagacagctgccggcgctggaaaaggctcgtctcacagggagagtgctggtccccagaatgtgtgctgttcccacgctgctgcctttcttgagcttgttagaggaaagccagaaaggcattcagatgggatcagtctggctttcaaattttttttaattcctaagttctgttttattttttaattttttaaaaaaaattttattagagacagtctctctctcttgcctagctgggagtgcagtggagtgatcatagctcactgaggcttgaactcctgggctcgagcaatccacctcagcctccagagtaggggagactacagatgtgtgccaccatactcagctaatttttaaactttcgtagagacagggtctccctgtgttgcccaggctggcctcgaactcctgacctcaaaaaatcttcctgccttggcctcccaaagcactgggattataggtgtgagccattgcgcctggtcataaattcttgtttttttgtttgtttgtttattagagatggaatctctctctcttgaccaggctagagggctgtggtgcgatctcagcccactgcaacctctatctcctgagctcaagcgatcctccttagcttcccaaatagctggaactacaggcatgtgccatcacgtccagctaatttttgtatttttagtagagaaggttttaccatgttggacagggtggtctcgaactcctggcctaaagtggtccacctagctcagcctaccaaagtgctgtgattacaggcgtgagccaccatgcccagcctctaaattctgttttctattcaaagtaaaaatgacatgtgtttgagtcatccacttgctcatttgcatatggaatattgtatgtgaatattttattacacccttaaaattaattttcaagggctatatgtagagctcagaagaaacatctctgctgctgaaatcaaacctggtccaaaaaacgtcacaacggaggaaaggaatagatggctctcgaggacaagatagggactcttaaaacacctgcttggccatggttgattgacatttgagtgatctggtagcccaacacaccctgtgaagttcaggtgaactgaaatgggcaggtgtaggctacacaccagtctgaaccagcacaaccaagagttgtttctcttttttttctttttctttttcttttttttcttttttttttttttttttttgagatgaagtcttactctgttgcccaggctagagtacagaggcacaatctcggctcaccacagcctccgcctcctgggttcaagcaattctcctgcctcagcctcccaagtagctgggactacaggcatgcaccaccatgcctggctaatttttgtatttttagtagagatggggtttcaccatgttggccaggctggtttcgaactcgtgacctcaggtgatccacccacactttgggcggccagaggcaggcagattgcttgagcccagaagtttaagaccagcctaggaaacagaccccatctctacaaaaaattcaaaaagccgggcgtgaagccctgttttttttttaaaaaaagagtctgctggtgatgtctgggcatgtgtctgcttcacagtccagtgttatgatcagtagctgtgatggacaatgaacattgctgcttgttcaaaatgaagaaaaaaaatatcaaagaaaaccaggtttggaagtttcagatttggaaaaggagggaacattccagcgtgggcattattgtcctgttgcaagttcagggcaaaaccaggaatccagttttgtcgatccaattgagaaaacatttcatgaacaactacttgtggcatgcattggcactcggaataaagcgcactattgtcactaggttggcatttc

SEQ ID NO: 9346 - DNA, 302 bp, Homo sapiens
tggaaattaaacaacaaactcataaataatgaatggttaaagaaaatcacaagggaaattagaaaatatttggaatgaattaaagtgaagacataacaccaaaacttacgggaagcaataaatgcagagcttagaaggaaatttatattaataagagatctcagtcacaatgtcttgtgcctataatcccagggacttgcaaggctgaggcaggaggatcacttgagcccaggagttggaagctgccatgagctgtggtcacaccattgcactccagtctgggccatagagtgagactaaaa

SEQ ID NO: 9347 - DNA, 365 bp, Homo sapiens
ccttgagatctacacccacttaacttccacctccagatcgtctccatgtggaaactgcagaaagcttttgctgactcctcagcggggcccgtgggacctgtggaatcattctgtggaatgaggcagagggtcccctccccaacgcccacagggcagctactgcctgttgccatggagatgctggatagctttaaacagaccctacctgctacccacttctggggcggctgccttgcaagatgaaagggcctggctagaactcagaaggtctgctgtcctcttaggcccttgggttgatcgcctcatggaggctgttttgatcatcatcatcaatgcaaataattaaaatttttaaaaacaatttt

SEQ ID NO: 9348 - DNA, 1197 bp, Homo sapiens
ttaggcctccacgtcctcgctggagctgcggacctcagtcgtccatccacacctcccccctgccgcccccgcccatctcactctcccaaccctgggcaccagggcaggtcgacagcccgaggcactcctctactgcgtttccaggcccaggagacccactccagcgccgcggttccttgcgacccggcagccgttcagcagacctcccattctttcctgcatcatcgggcattgtggaggcaccctacggtgattcctctcagagcctgtttgtaggtgaccgtgacagagacaaaaccatggaagtgactgggtttggagtgaccaggtgttcctccctcccctttcccagacacgcctcttgctgtaggtctctggttaagtctctctctctcattcccttcctgggagacagtagctccctaggcctgcaatgagggaggctggcttggggaaggagacgggaattgggcgtctttgaagacctgtgggcagagggagggagggagggtgtttgtcctgggtggggctctgggccaggtcctctgggtagctgtgaagtggtgaaagaaggggtgggaacgctggacttctggactttgggcagggcagatcctctgactctctggctgcagaacagtttcttccgtgctctggcctgagtgccacagccagggcctctgctctgtacacaggtaagaaggcttcaaagatgagaaacaagacccctctgaggaagtgggaacacagtctgagtcctggggggtgggaagtatgggttgaaggttagtgggaaaatatgcagggctgaccaggtttggagatgctgggcttagttctgcaggtgatgcagcctgaagaccttgagctttctgggaccctgtaatgtggatcctgcaaggaaggctcttgttttcttcttttccctttcttccctgatttaactttgcagagattccttccgttttttctagacccctgcattattttctgcatatctcccactttaaccctgtgccatttgcagctctcccacagaccttctgtgatccccatagtgctgtctctcatcccttgattccttttcctaactcaggctgtaactgcttttttgttcttttcctaagtcctaaatccttctgctagttctaagcacctttgttcctactatagtcttcctttatttaagtcagttca

SEQ ID NO: 9349 - DNA, 441 bp, Homo sapiens
tcatatatttataaaatgtgtttttactgttttttatttttaacggcaagtgaaaggatttttattttactaatgtttcttaacctatatttggctgataactgcttctaatttttaaatacattttcttttttgaacttgttatggaaatttttagtcacaaatatagactagcacagtggactccctgaaccaccactcaaacttagcaaacgtcagctttattgctgctcttgtttgatctattgcctcgtccccgccaatatttttttctttgaccatttaaagcaaatcctaaccatcgtatttcacccaacagaattaatatccttaatatctaatatgtagtctgctcagttttcccatgttgtctcaaaaatgtattttgactgtttatttgttcaaattaagatctaaataagagccacactgtgcatttga

SEQ ID NO: 9350 - DNA, 330 bp, Homo sapiens
gtgcctgtagtgccatctactaaggaggatgaggcaggaggatcactggagtccaggagtttgataccatactggacaatatggtgagaccccgtctcaaaataataataataattttttgtgcttaaatcatatatttgccatataaattaaaattacctgaaaatatgtaagacaggttgattgggaagaacaaactttgtctttatattccacaaatactatctaagctctattaatgtatttctaattttaaatattttattttaaataactatcactaaaaaatgtcaaaattattctaaaattccttagggtatttgagaggct

SEQ ID NO: 9351 - DNA, 939 bp, Homo sapiens
gaactaaaaaatatttaccataagtccaagttatgacttgaggatcatatctgattagaactgtggcagaactactagaaaaagattctgcaaattggtttcagtgattcttgttgatgtaatcaacaagattacataatcaacaataatagatattgaaccaaaatgatcctttttttaagtttaaggttatttagtttctcttgcaaggatatgatttagtcacacactaatagggaatatgtgtatgtactggtggggagcagtgggcttgctgcatgtatgtatgttttaaaattaataaatattatcttactgggctccatagatggtttaaatttagatttatttaattaagaggctataaataatatatacactactgtatggtatttaacaaataagttttaaatctgttaattcttctggaaaactttggatgtagggatggcaagctaattttcttgtatagctggtgatataagcagcatggtgataaaataacatttcttataaagactaactggtaatagttgtgacagaacctggttttcctgactgagaatcccttgcttgcttagaatatctgacttcccattgaaatggaacatagaaaatgtgttttcttatgtgactctcattattggttcctttatcttagttgtgctacaatataaggctggacctgtaatacactatgtatcagactagactgaaaaatgtgatcgatttgttttctaagtcctcctctatataactgaaccatggtcaggggattagagaagcaacagagcactgctcctaaggctttaggctagtcttagtgaattggactgaatggatttttctctgttgttttttgcattaagtgtttttgcactagaagagggtgcttaacactcctctatctatatgaataaaaaattatgttctcacaaa

SEQ ID NO: 9352 - DNA, 379 bp, Homo sapiens
gaacaccattcagcccatgacagagagaaaaccacagaaattcaccttcggaaacattttctgaaaactaaagcttacggttagggtatcagtgcccttttcccagaaacattatctctacctcaataagggccagaaaattcataaatcccaccttcatccctgtagcatcactgctagaaaaccatcacgtctccagggtgagaaatacttttggaattgaactaacctctgattaggttccccttgatgtctttgccacgtggtgccctctaacagggtggttagaaggtaagtagttttatttcattccaccttttgatttctcccttcctggccctttggaaggtgcccatttctcattaaagatggagagaac

SEQ ID NO: 9353 - DNA, 5764 bp, Homo sapiens
ttcatgggaaggagttggcccggcttgtctctctgtcagtggcggctgctgcctgctctggaggcaggctgggcggtggcggccgagactggcgggggtggacgcccgggccgggctgcgcccgcttcttgcagctgtgaattcctttggacaattgatgatatttatcattgtgcccagtttctacaaataaaagatgggtggattattttctcgatggaggacaaaaccttcaactgtagaagttctagaaagtatagataaggaaattcaagcattggaagaatttagggaaaaaaatcagagattacaaaaattatgggttggaagattaattctgtattcctcagttctctatctgtttacatgcttaattgtatatttgtggtatcttcctgatgaatttacagcaagacttgccatgacactcccattttttgcttttccattgatcatctggagcataagaacagtaattattttcttcttttccaagagaacagaaagaaataatgaagcattggatgatttaaaatcccagaggaaaaaaatacttgaagaagtcatggaaaaagaaacttacaagacggctaaattaattcttgaaaggtttgatccggactcaaagaaagcaaaggagtgtgagccgccatctgctggagcagctgtaactgcaagacctggacaagagattcgtcagcgaactgcagctcaaagaaacctttctccaacaccagcaagccctaaccagggccctcctccacaagttccagtatctcctggaccaccaaaggacagttctgcccctggtggacccccagaaaggactgttactccagccctatcatcaaatgtgttaccaagacatcttggatcccctgctacttcagtgcctggaatgggtcttcatcctccaggtccacctttagcaagacctattctcccccgagaacgaggtgctttggatagaattgttgaatatttggttggtgatggtccacaaaacaggtatgcacttatatgtcagcagtgtttttctcataatggcatggctttgaaggaagaatttgaatacattgcttttcgatgtgcctactgttttttcttgaaccctgcaagaaaaaccagacctcaggctccaagacttcctgagtttagttttgagaagaggcaggtggtggaaggttcaagttcagttggtcccttgccatcaggaagtgtgctttcatcagacaaccagtttaatgaagaatctttagaacacgatgttcttgatgataatacagagcagacagatgacaaaataccagctacagaacagacaaaccaagtgattgaaaaagcatctgactcagaggaaccagaggagaaacaagagactgagaatgaggaagcctcagtgattgaaaccaactccacagttcctggagctgattctattcctgatcctgaactaagtggagaatctttgacggcagagtagtaaatgcttccacgtgccttcaactggatatttatagtcttactgatgtcagttattgctttttcggtggcacttactttttttgcccctctaagggtatgcttgtgtatcatttgaattcagattgcctagctatttgaacatctcaaagttatatatactgggtattaaaattaaaagcaagttatatcagtgaagtaagatccttttgaatgtacaaagacccacactattgagacagcttttagatacttttttgtccattctaaaagtaagcaaacatgattgccttcttgttttctgtatgtataacccgtaaatatccattttgacataggaagaactttggttaagagtaagttctctaattgtgtttgttttaaggaatgaaacttggttaagattttgactacttcattattaaaaattgatagaattttagctcctgagatatttacaactgggagaaatgtctatttaggtgtttacattaagcggtatgaaagttgttaccacataggcactggtacgaattctcaataagaatgcagtggaacagttaagtagaactgtaactacgttggcactggtacgaattctcagtgagaatgcaatgaaacagtcaactgcagtgtttctttttgatgtcttttattttacaactgggccaaaggcacattatgtatataattagtttatatttacacactagcatataggaaatatttctgcacttgaccctatttgaattctgagcattatttataagtataaaatgatgatatataagtgaattttgtgctcttgtttgtattttattaaggaaaatgaaaataatctggcatcagtttcattttgctaaatatctagtcttcttcaaacagtatcttggtgggtgacttggctacctgaaaaatcttaggaggaatagctcacaatacaataaatctgtagattctgcttagagcaaattatggtacttttattcagacttgtttcctttctagttaacagaaatagtgacatttagaggttttaatcagaagttaggtttttctgattcaggaacatcgtaggccagccatttgtaatttttaactttgagaaacaaattttgtgagaataggtagtgggttgctggtagttaattggatttaatatttgtattaaggattaactggaaaaaatgtgtctcagtgctaattcttggacctttaatacagtgtgcttatctgttacggcctccttttatctctcttctccaatattaaaaaaaatggaaatcaaattattatgctgaagggaaaaatatacctgtataagaatggtgtgtttggctaatgtttctaagttgcacacagtttattaacaactgaacaaaacatttttatcatttaaaaatctatttttatgatttaatatctcatatgtgacagtttttttttttttttttttttggaactcaatctgttaacagtctgggacatccggtatagtaaccagagtttttgagcctgccgtattgggcttaaatttcaggtctgtagtcttgggcaagtcacctataaactcactgagattattttttcatctgtaaaatgggaagagttatgtttatttttgaagggtattaggataattaaaaataatgtaatgtgcctagcacactacctgaaaacgatggcatttgttcttattaatgtctttaaaatatgcaaggaccataagtttttcctcttgcagatgaggaaagtaaaaaataatacgaacatgtaattcagcttctcagattcaagccaatgttttttgcatcaacttttctatattgtatgtatgtatataaatacatagattaaggaaataggaaactgaaactctgtggaatataaactttttaaaaataatttcatcaggttttttgtatgttactgacccatatggattttagtaacatcttgcttagtcatgttgttataaaacattcaaattctgatatacattgcttgaaaatgagtgagtacctcagagaaatttgatagactcaaacagatagtatgagaaatatctttgaaagaaatatggaggaaggttaaaaggggattagtaaaattaatgcgataggtaacatgtttgtaaccatatagtatccttttagatacaaaagcttattttcattattattataataaacagttaatggttgaaacttagtaaaatgtcctatttctgattattaagactagtataaatgagaaaatccaagctattaagtaccattagctacagtgatcttagcttccttgcttacaattgttcagtgggtcatctaaattcttctatgtcctgagcatgatctacaaacatggtctagcttctgtctctccgtcttcccgccatcattgtgctgtagccatatggaactcctttcagttctctgaccatgccctttcctgcctcagatttcagcttaaattttgcctcctcagagagatgccttcccaaactccccatctgaagctggcctctgccttttactccctatcatgtcactctctgctcaccatccttatcacaatgtgtatttgatttgtttgctagtttactgtcttcacaacataatgtccgtttgtgcaagggtcttatttttcttattcatgtctgtatctcaagggtctagcacaatgcttgatgcatattgtgtgaataaatactttgttgccaaatccagtgaaaactctcagttcttgtttcactgcttggcagtattgacattgaatattctctgagatactttttttcttttggcttttcatatatcacactattattctcttatttctctggcctcttgctctcaacgtcctgtaagtgttggtgttccttaagttctacctagtgtcatcatttcttcattctgcatattctttccctagggtttcttcccaacaccaaaggacttaccatctgtctctctgaatctcagatctccagctttgatctgtttcctttactttagagctatatatttgcctgcctactggcctgtctctcacaatccatatattcaagaatgaacactatactttgcttcaaaccttcagaacattcaaaccgtttatgtttctcatctaatcaaatagagttactctctaagccagaagttactctccctttattcaagctgtcaatttttgtctcctaaacatcttctagttatattctcatttctctgttcacattgcattaataatgatgataaacatttgcattcttattctgtgccaggcaacatgctaactgctgtatatatattattatatttgtactttggcaagaatcctgtgaagatttttatctttggactactagaagagaaagctgagttgtagagagagtatgtatttaagtccgtttgggctgctataacagaataccacagactgggtaacgtgatgaacaaaaatttatttggctcacagttctggaacctgggaaatccaaaggcatgatgctagcatctggtgagggcctttgtgctttgtcatcccatgccagaaggcagaagggtaagagagggcaagagtgagcaagagatggaagttgcaacctcaagctcttttataatgagcattaatccattcatgagggcttcaccctcatgacctaaacatctccattaggctccaccttccaatgcaacagttagcataagttttcaacacatgctttttgtagcattcaaaccatagcaggaagcaactttgcttaaaattgtatacctggtaagtggaaaaagagggatttgaatataggcaaatgacttcagaggatttactcttaatttctgttgtactgccttctaatcttggcctccatcatttcagattaccaaagctgtctcttaactggtttctttgtctccaaccttgtgcacttgctatctattctgtgtgctgcagcctgagtttttaaaaaacagaaaatgaggggccaggtgtggtggtggctcacgcctgtaatcccagcaagttgggaggctgaggcgggcagatcatctggggtcaggagttcgagaccagcctgaccaacgtggagaaacactatctctactaaaaatacaaaattagccaggcgtggtggtgcatgcctgtaatcctagctactcaggagcctgaggcaggagaattgcttgaacacgggaggcagaggttgcagtgagcagagattgcgccattgtactccagcctgggcaacaagagtgaaactccatctcaaaaaaaa

SEQ ID NO: 9354 - DNA, 5581 bp, Homo sapiens
caaataaacgatgtgctggcctagttacctcgatgagaggtcaggaccttcaactgtagacgttctagaaagtatagatcaggaaattcaagcattggaagaatttagggaaaaaaatcagagattacaaaaattatgggttggaagattaattctgtattcctcagttctctatctgtttacatgcttaattgtatatttgtggtatcttcctgatgaatttacagcaagacttgccatgacactcccattttttgcttttccattgatcatctggagcataagaacagtaattattttcttcttttccaagagaacagaaagaaataatgaagcattggatgatttaaaatcccagaggaaaaaaatacttgaagaagtcatggaaaaagaaacttacaagacggctaaattaattcttgaaaggtttgatccggactcaaagaaagcaaaggagtgtgagccgccatctgctggagcagctgtaactgcaagacctggacaagagattcgtcagcgaactgcagctcaaagaaacctttctccaacaccagcaagccctaaccagggccctcctccacaagttccagtatctcctggaccaccaaaggacagttctgcccctggtggacccccagaaaggactgttactccagccctatcatcaaatgtgttaccaagacatcttggatcccctgctacttcagtgcctggaatgggtcttcatcctccaggtccacctttagcaagacctattctcccccgagaacgaggtgctttggatagaattgttgaatatttggttggtgatggtccacaaaacaggtatgcacttatatgtcagcagtgtttttctcataatggcatggctttgaaggaagaatttgaatacattgcttttcgatgtgcctactgttttttcttgaaccctgcaagaaaaaccagacctcaggctccaagacttcctgagtttagttttgagaagaggcaggtggtggaaggttcaagttcagttggtcccttgccatcaggaagtgtgctttcatcagacaaccagtttaatgaagaatctttagaacacgatgttcttgatgataatacagagcagacagatgacaaaataccagctacagaacagacaaaccaagtgattgaaaaagcatctgactcagaggaaccagaggagaaacaagagactgagaatgaggaagcctcagtgattgaaaccaactccacagttcctggagctgattctattcctgatcctgaactaagtggagaatctttgacggcagagtagtaaatgcttccacgtgccttcaactggatatttatagtcttactgatgtcagttattgctttttcggtggcacttactttttttgcccctctaagggtatgcttgtgtatcatttgaattcagattgcctagctatttgaacatctcaaagttatatatactgggtattaaaattaaaagcaagttatatcagtgaagtaagatccttttgaatgtacaaagacccacactattgagacagcttttagatacttttttgtccattctaaaagtaagcaaacatgattgccttcttgttttctgtatgtataacccgtaaatatccattttgacataggaagaactttggttaagagtaagttctctaattgtgtttgttttaaggaatgaaacttggttaagattttgactacttcattattaaaaattgatagaattttagctcctgagatatttacaactgggagaaatgtctatttaggtgtttacattaagcggtatgaaagttgttaccacataggcactggtacgaattctcaataagaatgcagtggaacagttaagtagaactgtaactacgttggcactggtacgaattctcagtgagaatgcaatgaaacagtcaactgcagtgtttctttttgatgtcttttattttacaactgggccaaaggcacattatgtatataattagtttatatttacacactagcatataggaaatatttctgcacttgaccctatttgaattctgagcattatttataagtataaaatgatgatatataagtgaattttgtgctcttgtttgtattttattaaggaaaatgaaaataatctggcatcagtttcattttgctaaatatctagtcttcttcaaacagtatcttggtgggtgacttggctacctgaaaaatcttaggaggaatagctcacaatacaataaatctgtagattctgcttagagcaaattatggtacttttattcagacttgtttcctttctagttaacagaaatagtgacatttagaggttttaatcagaagttaggtttttctgattcaggaacatcgtaggccagccatttgtaatttttaactttgagaaacaaattttgtgagaataggtagtgggttgctggtagttaattggatttaatatttgtattaaggattaactggaaaaaatgtgtctcagtgctaattcttggacctttaatacagtgtgcttatctgttacggcctccttttatctctcttctccaatattaaaaaaaatggaaatcaaattattatgctgaagggaaaaatatacctgtataagaatggtgtgtttggctaatgtttctaagttgcacacagtttattaacaactgaacaaaacatttttatcatttaaaaatctatttttatgatttaatatctcatatgtgacagtttttttttttttttttttttggaactcaatctgttaacagtctgggacatccggtatagtaaccagagtttttgagcctgccgtattgggcttaaatttcaggtctgtagtcttgggcaagtcacctataaactcactgagattattttttcatctgtaaaatgggaagagttatgtttatttttgaagggtattaggataattaaaaataatgtaatgtgcctagcacactacctgaaaacgatggcatttgttcttattaatgtctttaaaatatgcaaggaccataagtttttcctcttgcagatgaggaaagtaaaaaataatacgaacatgtaattcagcttctcagattcaagccaatgttttttgcatcaacttttctatattgtatgtatgtatataaatacatagattaaggaaataggaaactgaaactctgtggaatataaactttttaaaaataatttcatcaggttttttgtatgttactgacccatatggattttagtaacatcttgcttagtcatgttgttataaaacattcaaattctgatatacattgcttgaaaatgagtgagtacctcagagaaatttgatagactcaaacagatagtatgagaaatatctttgaaagaaatatggaggaaggttaaaaggggattagtaaaattaatgcgataggtaacatgtttgtaaccatatagtatccttttagatacaaaagcttattttcattattattataataaacagttaatggttgaaacttagtaaaatgtcctatttctgattattaagactagtataaatgagaaaatccaagctattaagtaccattagctacagtgatcttagcttccttgcttacaattgttcagtgggtcatctaaattcttctatgtcctgagcatgatctacaaacatggtctagcttctgtctctccgtcttcccgccatcattgtgctgtagccatatggaactcctttcagttctctgaccatgccctttcctgcctcagatttcagcttaaattttgcctcctcagagagatgccttcccaaactccccatctgaagctggcctctgccttttactccctatcatgtcactctctgctcaccatccttatcacaatgtgtatttgatttgtttgctagtttactgtcttcacaacataatgtccgtttgtgcaagggtcttatttttcttattcatgtctgtatctcaagggtctagcacaatgcttgatgcatattgtgtgaataaatactttgttgccaaatccagtgaaaactctcagttcttgtttcactgcttggcagtattgacattgaatattctctgagatactttttttcttttggcttttcatatatcacactattattctcttatttctctggcctcttgctctcaacgtcctgtaagtgttggtgttccttaagttctacctagtgtcatcatttcttcattctgcatattctttccctagggtttcttcccaacaccaaaggacttaccatctgtctctctgaatctcagatctccagctttgatctgtttcctttactttagagctatatatttgcctgcctactggcctgtctctcacaatccatatattcaagaatgaacactatactttgcttcaaaccttcagaacattcaaaccgtttatgtttctcatctaatcaaatagagttactctctaagccagaagttactctccctttattcaagctgtcaatttttgtctcctaaacatcttctagttatattctcatttctctgttcacattgcattaataatgatgataaacatttgcattcttattctgtgccaggcaacatgctaactgctgtatatatattattatatttgtactttggcaagaatcctgtgaagatttttatctttggactactagaagagaaagctgagttgtagagagagtatgtatttaagtccgtttgggctgctataacagaataccacagactgggtaacgtgatgaacaaaaatttatttggctcacagttctggaacctgggaaatccaaaggcatgatgctagcatctggtgagggcctttgtgctttgtcatcccatgccagaaggcagaagggtaagagagggcaagagtgagcaagagatggaagttgcaacctcaagctcttttataatgagcattaatccattcatgagggcttcaccctcatgacctaaacatctccattaggctccaccttccaatgcaacagttagcataagttttcaacacatgctttttgtagcattcaaaccatagcaggaagcaactttgcttaaaattgtatacctggtaagtggaaaaagagggatttgaatataggcaaatgacttcagaggatttactcttaatttctgttgtactgccttctaatcttggcctccatcatttcagattaccaaagctgtctcttaactggtttctttgtctccaaccttgtgcacttgctatctattctgtgtgctgcagcctgagtttttaaaaaacagaaaatgaggggccaggtgtggtggtggctcacgcctgtaatcccagcaagttgggaggctgaggcgggcagatcatctggggtcaggagttcgagaccagcctgaccaacgtggagaaacactatctctactaaaaatacaaaattagccaggcgtggtggtgcatgcctgtaatcctagctactcaggagcctgaggcaggagaattgcttgaacacgggaggcagaggttgcagtgagcagagattgcgccattgtactccagcctgggcaacaagagtgaaactccatctcaaaaaaaa

SEQ ID NO: 9355 - DNA, 5366 bp, Homo sapiens
atgatttctgcgagagtgaacagacagtcccattttatcgcgtgtaaccattgatcatctggagcataagaacagtaattattttcttcttttccaagagaacagaaagaaataatgaagcattggatgatttaaaatcccagaggaaaaaaatacttgaagaagtcatggaaaaagaaacttacaagacggctaaattaattcttgaaaggtttgatccggactcaaagaaagcaaaggagtgtgagccgccatctgctggagcagctgtaactgcaagacctggacaagagattcgtcagcgaactgcagctcaaagaaacctttctccaacaccagcaagccctaaccagggccctcctccacaagttccagtatctcctggaccaccaaaggacagttctgcccctggtggacccccagaaaggactgttactccagccctatcatcaaatgtgttaccaagacatcttggatcccctgctacttcagtgcctggaatgggtcttcatcctccaggtccacctttagcaagacctattctcccccgagaacgaggtgctttggatagaattgttgaatatttggttggtgatggtccacaaaacaggtatgcacttatatgtcagcagtgtttttctcataatggcatggctttgaaggaagaatttgaatacattgcttttcgatgtgcctactgttttttcttgaaccctgcaagaaaaaccagacctcaggctccaagacttcctgagtttagttttgagaagaggcaggtggtggaaggttcaagttcagttggtcccttgccatcaggaagtgtgctttcatcagacaaccagtttaatgaagaatctttagaacacgatgttcttgatgataatacagagcagacagatgacaaaataccagctacagaacagacaaaccaagtgattgaaaaagcatctgactcagaggaaccagaggagaaacaagagactgagaatgaggaagcctcagtgattgaaaccaactccacagttcctggagctgattctattcctgatcctgaactaagtggagaatctttgacggcagagtagtaaatgcttccacgtgccttcaactggatatttatagtcttactgatgtcagttattgctttttcggtggcacttactttttttgcccctctaagggtatgcttgtgtatcatttgaattcagattgcctagctatttgaacatctcaaagttatatatactgggtattaaaattaaaagcaagttatatcagtgaagtaagatccttttgaatgtacaaagacccacactattgagacagcttttagatacttttttgtccattctaaaagtaagcaaacatgattgccttcttgttttctgtatgtataacccgtaaatatccattttgacataggaagaactttggttaagagtaagttctctaattgtgtttgttttaaggaatgaaacttggttaagattttgactacttcattattaaaaattgatagaattttagctcctgagatatttacaactgggagaaatgtctatttaggtgtttacattaagcggtatgaaagttgttaccacataggcactggtacgaattctcaataagaatgcagtggaacagttaagtagaactgtaactacgttggcactggtacgaattctcagtgagaatgcaatgaaacagtcaactgcagtgtttctttttgatgtcttttattttacaactgggccaaaggcacattatgtatataattagtttatatttacacactagcatataggaaatatttctgcacttgaccctatttgaattctgagcattatttataagtataaaatgatgatatataagtgaattttgtgctcttgtttgtattttattaaggaaaatgaaaataatctggcatcagtttcattttgctaaatatctagtcttcttcaaacagtatcttggtgggtgacttggctacctgaaaaatcttaggaggaatagctcacaatacaataaatctgtagattctgcttagagcaaattatggtacttttattcagacttgtttcctttctagttaacagaaatagtgacatttagaggttttaatcagaagttaggtttttctgattcaggaacatcgtaggccagccatttgtaatttttaactttgagaaacaaattttgtgagaataggtagtgggttgctggtagttaattggatttaatatttgtattaaggattaactggaaaaaatgtgtctcagtgctaattcttggacctttaatacagtgtgcttatctgttacggcctccttttatctctcttctccaatattaaaaaaaatggaaatcaaattattatgctgaagggaaaaatatacctgtataagaatggtgtgtttggctaatgtttctaagttgcacacagtttattaacaactgaacaaaacatttttatcatttaaaaatctatttttatgatttaatatctcatatgtgacagtttttttttttttttttttttggaactcaatctgttaacagtctgggacatccggtatagtaaccagagtttttgagcctgccgtattgggcttaaatttcaggtctgtagtcttgggcaagtcacctataaactcactgagattattttttcatctgtaaaatgggaagagttatgtttatttttgaagggtattaggataattaaaaataatgtaatgtgcctagcacactacctgaaaacgatggcatttgttcttattaatgtctttaaaatatgcaaggaccataagtttttcctcttgcagatgaggaaagtaaaaaataatacgaacatgtaattcagcttctcagattcaagccaatgttttttgcatcaacttttctatattgtatgtatgtatataaatacatagattaaggaaataggaaactgaaactctgtggaatataaactttttaaaaataatttcatcaggttttttgtatgttactgacccatatggattttagtaacatcttgcttagtcatgttgttataaaacattcaaattctgatatacattgcttgaaaatgagtgagtacctcagagaaatttgatagactcaaacagatagtatgagaaatatctttgaaagaaatatggaggaaggttaaaaggggattagtaaaattaatgcgataggtaacatgtttgtaaccatatagtatccttttagatacaaaagcttattttcattattattataataaacagttaatggttgaaacttagtaaaatgtcctatttctgattattaagactagtataaatgagaaaatccaagctattaagtaccattagctacagtgatcttagcttccttgcttacaattgttcagtgggtcatctaaattcttctatgtcctgagcatgatctacaaacatggtctagcttctgtctctccgtcttcccgccatcattgtgctgtagccatatggaactcctttcagttctctgaccatgccctttcctgcctcagatttcagcttaaattttgcctcctcagagagatgccttcccaaactccccatctgaagctggcctctgccttttactccctatcatgtcactctctgctcaccatccttatcacaatgtgtatttgatttgtttgctagtttactgtcttcacaacataatgtccgtttgtgcaagggtcttatttttcttattcatgtctgtatctcaagggtctagcacaatgcttgatgcatattgtgtgaataaatactttgttgccaaatccagtgaaaactctcagttcttgtttcactgcttggcagtattgacattgaatattctctgagatactttttttcttttggcttttcatatatcacactattattctcttatttctctggcctcttgctctcaacgtcctgtaagtgttggtgttccttaagttctacctagtgtcatcatttcttcattctgcatattctttccctagggtttcttcccaacaccaaaggacttaccatctgtctctctgaatctcagatctccagctttgatctgtttcctttactttagagctatatatttgcctgcctactggcctgtctctcacaatccatatattcaagaatgaacactatactttgcttcaaaccttcagaacattcaaaccgtttatgtttctcatctaatcaaatagagttactctctaagccagaagttactctccctttattcaagctgtcaatttttgtctcctaaacatcttctagttatattctcatttctctgttcacattgcattaataatgatgataaacatttgcattcttattctgtgccaggcaacatgctaactgctgtatatatattattatatttgtactttggcaagaatcctgtgaagatttttatctttggactactagaagagaaagctgagttgtagagagagtatgtatttaagtccgtttgggctgctataacagaataccacagactgggtaacgtgatgaacaaaaatttatttggctcacagttctggaacctgggaaatccaaaggcatgatgctagcatctggtgagggcctttgtgctttgtcatcccatgccagaaggcagaagggtaagagagggcaagagtgagcaagagatggaagttgcaacctcaagctcttttataatgagcattaatccattcatgagggcttcaccctcatgacctaaacatctccattaggctccaccttccaatgcaacagttagcataagttttcaacacatgctttttgtagcattcaaaccatagcaggaagcaactttgcttaaaattgtatacctggtaagtggaaaaagagggatttgaatataggcaaatgacttcagaggatttactcttaatttctgttgtactgccttctaatcttggcctccatcatttcagattaccaaagctgtctcttaactggtttctttgtctccaaccttgtgcacttgctatctattctgtgtgctgcagcctgagtttttaaaaaacagaaaatgaggggccaggtgtggtggtggctcacgcctgtaatcccagcaagttgggaggctgaggcgggcagatcatctggggtcaggagttcgagaccagcctgaccaacgtggagaaacactatctctactaaaaatacaaaattagccaggcgtggtggtgcatgcctgtaatcctagctactcaggagcctgaggcaggagaattgcttgaacacgggaggcagaggttgcagtgagcagagattgcgccattgtactccagcctgggcaacaagagtgaaactccatctcaaaaaaaa

SEQ ID NO: 9356 - DNA, 4959 bp, Homo sapiens
aaaatttctaacaagtataggtagttcttggtaatggaattaaattttatgtgtatttcatgtatataaattttgtatgtatttatttatttaataggtcttcatcctccaggtccacctttagcaagacctattctcccccgagaacgaggtgctttggatagaattgttgaatatttggttggtgatggtccacaaaacaggtatgcacttatatgtcagcagtgtttttctcataatggcatggctttgaaggaagaatttgaatacattgcttttcgatgtgcctactgttttttcttgaaccctgcaagaaaaaccagacctcaggctccaagacttcctgagtttagttttgagaagaggcaggtggtggaaggttcaagttcagttggtcccttgccatcaggaagtgtgctttcatcagacaaccagtttaatgaagaatctttagaacacgatgttcttgatgataatacagagcagacagatgacaaaataccagctacagaacagacaaaccaagtgattgaaaaagcatctgactcagaggaaccagaggagaaacaagagactgagaatgaggaagcctcagtgattgaaaccaactccacagttcctggagctgattctattcctgatcctgaactaagtggagaatctttgacggcagagtagtaaatgcttccacgtgccttcaactggatatttatagtcttactgatgtcagttattgctttttcggtggcacttactttttttgcccctctaagggtatgcttgtgtatcatttgaattcagattgcctagctatttgaacatctcaaagttatatatactgggtattaaaattaaaagcaagttatatcagtgaagtaagatccttttgaatgtacaaagacccacactattgagacagcttttagatacttttttgtccattctaaaagtaagcaaacatgattgccttcttgttttctgtatgtataacccgtaaatatccattttgacataggaagaactttggttaagagtaagttctctaattgtgtttgttttaaggaatgaaacttggttaagattttgactacttcattattaaaaattgatagaattttagctcctgagatatttacaactgggagaaatgtctatttaggtgtttacattaagcggtatgaaagttgttaccacataggcactggtacgaattctcaataagaatgcagtggaacagttaagtagaactgtaactacgttggcactggtacgaattctcagtgagaatgcaatgaaacagtcaactgcagtgtttctttttgatgtcttttattttacaactgggccaaaggcacattatgtatataattagtttatatttacacactagcatataggaaatatttctgcacttgaccctatttgaattctgagcattatttataagtataaaatgatgatatataagtgaattttgtgctcttgtttgtattttattaaggaaaatgaaaataatctggcatcagtttcattttgctaaatatctagtcttcttcaaacagtatcttggtgggtgacttggctacctgaaaaatcttaggaggaatagctcacaatacaataaatctgtagattctgcttagagcaaattatggtacttttattcagacttgtttcctttctagttaacagaaatagtgacatttagaggttttaatcagaagttaggtttttctgattcaggaacatcgtaggccagccatttgtaatttttaactttgagaaacaaattttgtgagaataggtagtgggttgctggtagttaattggatttaatatttgtattaaggattaactggaaaaaatgtgtctcagtgctaattcttggacctttaatacagtgtgcttatctgttacggcctccttttatctctcttctccaatattaaaaaaaatggaaatcaaattattatgctgaagggaaaaatatacctgtataagaatggtgtgtttggctaatgtttctaagttgcacacagtttattaacaactgaacaaaacatttttatcatttaaaaatctatttttatgatttaatatctcatatgtgacagtttttttttttttttttttttggaactcaatctgttaacagtctgggacatccggtatagtaaccagagtttttgagcctgccgtattgggcttaaatttcaggtctgtagtcttgggcaagtcacctataaactcactgagattattttttcatctgtaaaatgggaagagttatgtttatttttgaagggtattaggataattaaaaataatgtaatgtgcctagcacactacctgaaaacgatggcatttgttcttattaatgtctttaaaatatgcaaggaccataagtttttcctcttgcagatgaggaaagtaaaaaataatacgaacatgtaattcagcttctcagattcaagccaatgttttttgcatcaacttttctatattgtatgtatgtatataaatacatagattaaggaaataggaaactgaaactctgtggaatataaactttttaaaaataatttcatcaggttttttgtatgttactgacccatatggattttagtaacatcttgcttagtcatgttgttataaaacattcaaattctgatatacattgcttgaaaatgagtgagtacctcagagaaatttgatagactcaaacagatagtatgagaaatatctttgaaagaaatatggaggaaggttaaaaggggattagtaaaattaatgcgataggtaacatgtttgtaaccatatagtatccttttagatacaaaagcttattttcattattattataataaacagttaatggttgaaacttagtaaaatgtcctatttctgattattaagactagtataaatgagaaaatccaagctattaagtaccattagctacagtgatcttagcttccttgcttacaattgttcagtgggtcatctaaattcttctatgtcctgagcatgatctacaaacatggtctagcttctgtctctccgtcttcccgccatcattgtgctgtagccatatggaactcctttcagttctctgaccatgccctttcctgcctcagatttcagcttaaattttgcctcctcagagagatgccttcccaaactccccatctgaagctggcctctgccttttactccctatcatgtcactctctgctcaccatccttatcacaatgtgtatttgatttgtttgctagtttactgtcttcacaacataatgtccgtttgtgcaagggtcttatttttcttattcatgtctgtatctcaagggtctagcacaatgcttgatgcatattgtgtgaataaatactttgttgccaaatccagtgaaaactctcagttcttgtttcactgcttggcagtattgacattgaatattctctgagatactttttttcttttggcttttcatatatcacactattattctcttatttctctggcctcttgctctcaacgtcctgtaagtgttggtgttccttaagttctacctagtgtcatcatttcttcattctgcatattctttccctagggtttcttcccaacaccaaaggacttaccatctgtctctctgaatctcagatctccagctttgatctgtttcctttactttagagctatatatttgcctgcctactggcctgtctctcacaatccatatattcaagaatgaacactatactttgcttcaaaccttcagaacattcaaaccgtttatgtttctcatctaatcaaatagagttactctctaagccagaagttactctccctttattcaagctgtcaatttttgtctcctaaacatcttctagttatattctcatttctctgttcacattgcattaataatgatgataaacatttgcattcttattctgtgccaggcaacatgctaactgctgtatatatattattatatttgtactttggcaagaatcctgtgaagatttttatctttggactactagaagagaaagctgagttgtagagagagtatgtatttaagtccgtttgggctgctataacagaataccacagactgggtaacgtgatgaacaaaaatttatttggctcacagttctggaacctgggaaatccaaaggcatgatgctagcatctggtgagggcctttgtgctttgtcatcccatgccagaaggcagaagggtaagagagggcaagagtgagcaagagatggaagttgcaacctcaagctcttttataatgagcattaatccattcatgagggcttcaccctcatgacctaaacatctccattaggctccaccttccaatgcaacagttagcataagttttcaacacatgctttttgtagcattcaaaccatagcaggaagcaactttgcttaaaattgtatacctggtaagtggaaaaagagggatttgaatataggcaaatgacttcagaggatttactcttaatttctgttgtactgccttctaatcttggcctccatcatttcagattaccaaagctgtctcttaactggtttctttgtctccaaccttgtgcacttgctatctattctgtgtgctgcagcctgagtttttaaaaaacagaaaatgaggggccaggtgtggtggtggctcacgcctgtaatcccagcaagttgggaggctgaggcgggcagatcatctggggtcaggagttcgagaccagcctgaccaacgtggagaaacactatctctactaaaaatacaaaattagccaggcgtggtggtgcatgcctgtaatcctagctactcaggagcctgaggcaggagaattgcttgaacacgggaggcagaggttgcagtgagcagagattgcgccattgtactccagcctgggcaacaagagtgaaactccatctcaaaaaaaa

SEQ ID NO: 9357 - DNA, 5320 bp, Homo sapiens
caggtttcttcctatataatgtacagcccctaggccagttgttctcaaaccccactgtgcatcacaatcacccaaagagcttaaaataattatgatacccaggacccatttacaaagagtctcctttaatggactgagtatgaggtccaggcatcagtatattttttaaagctctgcagatgattctcatgtgtagccactattaaaaactactgtggtaaattgaaaatgcttctgaaatattatgtactacattttcatgggtaaatgtgcaagcttctggattttaaaatacctaatgattctggttactagaaatgtaatctcactaattcatttaaatcattaatattattctgctgtcaacctgctgtgtaacttattacatagttagcctgctatgtaacctgttatgccttttctgcctttaattttaaaaattaaaattctaataattaggaagtatgctttagttctgtttagagcatctaccatattattatttaaataacatacacagtaacttttaaaaggttcttttgaatatctgcaaaagtgatcttgtgagttaactaattagttcttgaactttgcttggtttgtggttttgcttatttttaaaaaattctctgcagcttttcgatgtgcctactgttttttcttgaaccctgcaagaaaaaccagacctcaggctccaagacttcctgagtttagttttgagaagaggcaggtggtggaaggttcaagttcagttggtcccttgccatcaggaagtgtgctttcatcagacaaccagtttaatgaagaatctttagaacacgatgttcttgatgataatacagagcagacagatgacaaaataccagctacagaacagacaaaccaagtgattgaaaaagcatctgactcagaggaaccagaggagaaacaagagactgagaatgaggaagcctcagtgattgaaaccaactccacagttcctggagctgattctattcctgatcctgaactaagtggagaatctttgacggcagagtagtaaatgcttccacgtgccttcaactggatatttatagtcttactgatgtcagttattgctttttcggtggcacttactttttttgcccctctaagggtatgcttgtgtatcatttgaattcagattgcctagctatttgaacatctcaaagttatatatactgggtattaaaattaaaagcaagttatatcagtgaagtaagatccttttgaatgtacaaagacccacactattgagacagcttttagatacttttttgtccattctaaaagtaagcaaacatgattgccttcttgttttctgtatgtataacccgtaaatatccattttgacataggaagaactttggttaagagtaagttctctaattgtgtttgttttaaggaatgaaacttggttaagattttgactacttcattattaaaaattgatagaattttagctcctgagatatttacaactgggagaaatgtctatttaggtgtttacattaagcggtatgaaagttgttaccacataggcactggtacgaattctcaataagaatgcagtggaacagttaagtagaactgtaactacgttggcactggtacgaattctcagtgagaatgcaatgaaacagtcaactgcagtgtttctttttgatgtcttttattttacaactgggccaaaggcacattatgtatataattagtttatatttacacactagcatataggaaatatttctgcacttgaccctatttgaattctgagcattatttataagtataaaatgatgatatataagtgaattttgtgctcttgtttgtattttattaaggaaaatgaaaataatctggcatcagtttcattttgctaaatatctagtcttcttcaaacagtatcttggtgggtgacttggctacctgaaaaatcttaggaggaatagctcacaatacaataaatctgtagattctgcttagagcaaattatggtacttttattcagacttgtttcctttctagttaacagaaatagtgacatttagaggttttaatcagaagttaggtttttctgattcaggaacatcgtaggccagccatttgtaatttttaactttgagaaacaaattttgtgagaataggtagtgggttgctggtagttaattggatttaatatttgtattaaggattaactggaaaaaatgtgtctcagtgctaattcttggacctttaatacagtgtgcttatctgttacggcctccttttatctctcttctccaatattaaaaaaaatggaaatcaaattattatgctgaagggaaaaatatacctgtataagaatggtgtgtttggctaatgtttctaagttgcacacagtttattaacaactgaacaaaacatttttatcatttaaaaatctatttttatgatttaatatctcatatgtgacagtttttttttttttttttttttggaactcaatctgttaacagtctgggacatccggtatagtaaccagagtttttgagcctgccgtattgggcttaaatttcaggtctgtagtcttgggcaagtcacctataaactcactgagattattttttcatctgtaaaatgggaagagttatgtttatttttgaagggtattaggataattaaaaataatgtaatgtgcctagcacactacctgaaaacgatggcatttgttcttattaatgtctttaaaatatgcaaggaccataagtttttcctcttgcagatgaggaaagtaaaaaataatacgaacatgtaattcagcttctcagattcaagccaatgttttttgcatcaacttttctatattgtatgtatgtatataaatacatagattaaggaaataggaaactgaaactctgtggaatataaactttttaaaaataatttcatcaggttttttgtatgttactgacccatatggattttagtaacatcttgcttagtcatgttgttataaaacattcaaattctgatatacattgcttgaaaatgagtgagtacctcagagaaatttgatagactcaaacagatagtatgagaaatatctttgaaagaaatatggaggaaggttaaaaggggattagtaaaattaatgcgataggtaacatgtttgtaaccatatagtatccttttagatacaaaagcttattttcattattattataataaacagttaatggttgaaacttagtaaaatgtcctatttctgattattaagactagtataaatgagaaaatccaagctattaagtaccattagctacagtgatcttagcttccttgcttacaattgttcagtgggtcatctaaattcttctatgtcctgagcatgatctacaaacatggtctagcttctgtctctccgtcttcccgccatcattgtgctgtagccatatggaactcctttcagttctctgaccatgccctttcctgcctcagatttcagcttaaattttgcctcctcagagagatgccttcccaaactccccatctgaagctggcctctgccttttactccctatcatgtcactctctgctcaccatccttatcacaatgtgtatttgatttgtttgctagtttactgtcttcacaacataatgtccgtttgtgcaagggtcttatttttcttattcatgtctgtatctcaagggtctagcacaatgcttgatgcatattgtgtgaataaatactttgttgccaaatccagtgaaaactctcagttcttgtttcactgcttggcagtattgacattgaatattctctgagatactttttttcttttggcttttcatatatcacactattattctcttatttctctggcctcttgctctcaacgtcctgtaagtgttggtgttccttaagttctacctagtgtcatcatttcttcattctgcatattctttccctagggtttcttcccaacaccaaaggacttaccatctgtctctctgaatctcagatctccagctttgatctgtttcctttactttagagctatatatttgcctgcctactggcctgtctctcacaatccatatattcaagaatgaacactatactttgcttcaaaccttcagaacattcaaaccgtttatgtttctcatctaatcaaatagagttactctctaagccagaagttactctccctttattcaagctgtcaatttttgtctcctaaacatcttctagttatattctcatttctctgttcacattgcattaataatgatgataaacatttgcattcttattctgtgccaggcaacatgctaactgctgtatatatattattatatttgtactttggcaagaatcctgtgaagatttttatctttggactactagaagagaaagctgagttgtagagagagtatgtatttaagtccgtttgggctgctataacagaataccacagactgggtaacgtgatgaacaaaaatttatttggctcacagttctggaacctgggaaatccaaaggcatgatgctagcatctggtgagggcctttgtgctttgtcatcccatgccagaaggcagaagggtaagagagggcaagagtgagcaagagatggaagttgcaacctcaagctcttttataatgagcattaatccattcatgagggcttcaccctcatgacctaaacatctccattaggctccaccttccaatgcaacagttagcataagttttcaacacatgctttttgtagcattcaaaccatagcaggaagcaactttgcttaaaattgtatacctggtaagtggaaaaagagggatttgaatataggcaaatgacttcagaggatttactcttaatttctgttgtactgccttctaatcttggcctccatcatttcagattaccaaagctgtctcttaactggtttctttgtctccaaccttgtgcacttgctatctattctgtgtgctgcagcctgagtttttaaaaaacagaaaatgaggggccaggtgtggtggtggctcacgcctgtaatcccagcaagttgggaggctgaggcgggcagatcatctggggtcaggagttcgagaccagcctgaccaacgtggagaaacactatctctactaaaaatacaaaattagccaggcgtggtggtgcatgcctgtaatcctagctactcaggagcctgaggcaggagaattgcttgaacacgggaggcagaggttgcagtgagcagagattgcgccattgtactccagcctgggcaacaagagtgaaactccatctcaaaaaaaa

SEQ ID NO: 9358 - DNA, 2276 bp, Homo sapiens
ttcatgggaaggagttggcccggcttgtctctctgtcagtggcggctgctgcctgctctggaggcaggctgggcggtggcggccgagactggcgggggtggacgcccgggccgggctgcgcccgcttcttgcagctgtgaattcctttggacaattgatgatatttatcattgtgcccagtttctacaaataaaagatgggtggattattttctcgatggaggacaaaaccttcaactgtagaagttctagaaagtatagataaggaaattcaagcattggaagaatttagggaaaaaaatcagagattacaaaaattatgggttggaagattaattctgtattcctcagttctctatctgtttacatgcttaattgtatatttgtggtatcttcctgatgaatttacagcaagacttgccatgacactcccattttttgcttttccattgatcatctggagcataagaacagtaattattttcttcttttccaagagaacagaaagaaataatgaagcattggatgatttaaaatcccagaggaaaaaaatacttgaagaagtcatggaaaaagaaacttacaagacggctaaattaattcttgaaaggtttgatccggactcaaagaaagcaaaggagtgtgagccgccatctgctggagcagctgtaactgcaagacctggacaagagattcgtcagcgaactgcagctcaaagaaacctttctccaacaccagcaagccctaaccagggccctcctccacaagttccagtatctcctggaccaccaaaggacagttctgcccctggtggacccccagaaaggactgttactccagccctatcatcaaatgtgttaccaagacatcttggatcccctgctacttcagtgcctggaatgggtcttcatcctccaggtccacctttagcaagacctattctcccccgagaacgaggtgctttggatagaattgttgaatatttggttggtgatggtccacaaaacaggtatgcacttatatgtcagcagtgtttttctcataatggcatggctttgaaggaagaatttgaatacattgcttttcgatgtgcctactgttttttcttgaaccctgcaagaaaaaccagacctcaggctccaagacttcctgagtttagttttgagaagaggcaggtggtggaaggttcaagttcagttggtcccttgccatcaggaagtgtgctttcatcagacaaccagtttaatgaagaatctttagaacacgatgttcttgatgataatacagagcagacagatgacaaaataccagctacagaacagacaaaccaagtgattgaaaaagcatctgactcagaggaaccagaggagaaacaagagactgagaatgaggaagcctcagtgattgaaaccaactccacagttcctggagctgattctattcctgatcctgaactaagtggagaatctttgacggcagagtagtaaatgcttccacgtgccttcaactggatatttatagtcttactgatgtcagttattgctttttcggtggcacttactttttttgcccctctaagggtatgcttgtgtatcatttgaattcagattgcctagctatttgaacatctcaaagttatatatactgggtattaaaattaaaagcaagttatatcagtgaagtaagatccttttgaatgtacaaagacccacactattgagacagcttttagatacttttttgtccattctaaaagtaagcaaacatgattgccttcttgttttctgtatgtataacccgtaaatatccattttgacataggaagaactttggttaagagtaagttctctaattgtgtttgttttaaggaatgaaacttggttaagattttgactacttcattattaaaaattgatagaattttagctcctgagatatttacaactgggagaaatgtctatttaggtgtttacattaagcggtatgaaagttgttaccacataggcactggtacgaattctcaataagaatgcagtggaacagttaagtagaactgtaactacgttggcactggtacgaattctcagtgagaatgcaatgaaacagtcaactgcagtgtttctttttgatgtcttttattttacaactgggccaaaggcacattatgtatataattagtttatatttacacactagcatataggaaatatttctgcacttgaccctatttgaattctgagcattatttataagtataaaatgatgatatataagtga

SEQ ID NO: 9359 - DNA, 5534 bp, Homo sapiens
ttcatgggaaggagttggcccggcttgtctctctgtcagtggcggctgctgcctgctctggaggcaggctgggcggtggcggccgagactggcgggggtggacgcccgggccgggctgcgcccgcttcttgcagctgtgaattcctttggacaattgatgatatttatcattgtgcccagtttctacaaataaaagatgggtggattattttctcgatggaggcatctggagcataagaacagtaattattttcttcttttccaagagaacagaaagaaataatgaagcattggatgatttaaaatcccagaggaaaaaaatacttgaagaagtcatggaaaaagaaacttacaagacggctaaattaattcttgaaaggtttgatccggactcaaagaaagcaaaggagtgtgagccgccatctgctggagcagctgtaactgcaagacctggacaagagattcgtcagcgaactgcagctcaaagaaacctttctccaacaccagcaagccctaaccagggccctcctccacaagttccagtatctcctggaccaccaaaggacagttctgcccctggtggacccccagaaaggactgttactccagccctatcatcaaatgtgttaccaagacatcttggatcccctgctacttcagtgcctggaatgggtcttcatcctccaggtccacctttagcaagacctattctcccccgagaacgaggtgctttggatagaattgttgaatatttggttggtgatggtccacaaaacaggtatgcacttatatgtcagcagtgtttttctcataatggcatggctttgaaggaagaatttgaatacattgcttttcgatgtgcctactgttttttcttgaaccctgcaagaaaaaccagacctcaggctccaagacttcctgagtttagttttgagaagaggcaggtggtggaaggttcaagttcagttggtcccttgccatcaggaagtgtgctttcatcagacaaccagtttaatgaagaatctttagaacacgatgttcttgatgataatacagagcagacagatgacaaaataccagctacagaacagacaaaccaagtgattgaaaaagcatctgactcagaggaaccagaggagaaacaagagactgagaatgaggaagcctcagtgattgaaaccaactccacagttcctggagctgattctattcctgatcctgaactaagtggagaatctttgacggcagagtagtaaatgcttccacgtgccttcaactggatatttatagtcttactgatgtcagttattgctttttcggtggcacttactttttttgcccctctaagggtatgcttgtgtatcatttgaattcagattgcctagctatttgaacatctcaaagttatatatactgggtattaaaattaaaagcaagttatatcagtgaagtaagatccttttgaatgtacaaagacccacactattgagacagcttttagatacttttttgtccattctaaaagtaagcaaacatgattgccttcttgttttctgtatgtataacccgtaaatatccattttgacataggaagaactttggttaagagtaagttctctaattgtgtttgttttaaggaatgaaacttggttaagattttgactacttcattattaaaaattgatagaattttagctcctgagatatttacaactgggagaaatgtctatttaggtgtttacattaagcggtatgaaagttgttaccacataggcactggtacgaattctcaataagaatgcagtggaacagttaagtagaactgtaactacgttggcactggtacgaattctcagtgagaatgcaatgaaacagtcaactgcagtgtttctttttgatgtcttttattttacaactgggccaaaggcacattatgtatataattagtttatatttacacactagcatataggaaatatttctgcacttgaccctatttgaattctgagcattatttataagtataaaatgatgatatataagtgaattttgtgctcttgtttgtattttattaaggaaaatgaaaataatctggcatcagtttcattttgctaaatatctagtcttcttcaaacagtatcttggtgggtgacttggctacctgaaaaatcttaggaggaatagctcacaatacaataaatctgtagattctgcttagagcaaattatggtacttttattcagacttgtttcctttctagttaacagaaatagtgacatttagaggttttaatcagaagttaggtttttctgattcaggaacatcgtaggccagccatttgtaatttttaactttgagaaacaaattttgtgagaataggtagtgggttgctggtagttaattggatttaatatttgtattaaggattaactggaaaaaatgtgtctcagtgctaattcttggacctttaatacagtgtgcttatctgttacggcctccttttatctctcttctccaatattaaaaaaaatggaaatcaaattattatgctgaagggaaaaatatacctgtataagaatggtgtgtttggctaatgtttctaagttgcacacagtttattaacaactgaacaaaacatttttatcatttaaaaatctatttttatgatttaatatctcatatgtgacagtttttttttttttttttttttggaactcaatctgttaacagtctgggacatccggtatagtaaccagagtttttgagcctgccgtattgggcttaaatttcaggtctgtagtcttgggcaagtcacctataaactcactgagattattttttcatctgtaaaatgggaagagttatgtttatttttgaagggtattaggataattaaaaataatgtaatgtgcctagcacactacctgaaaacgatggcatttgttcttattaatgtctttaaaatatgcaaggaccataagtttttcctcttgcagatgaggaaagtaaaaaataatacgaacatgtaattcagcttctcagattcaagccaatgttttttgcatcaacttttctatattgtatgtatgtatataaatacatagattaaggaaataggaaactgaaactctgtggaatataaactttttaaaaataatttcatcaggttttttgtatgttactgacccatatggattttagtaacatcttgcttagtcatgttgttataaaacattcaaattctgatatacattgcttgaaaatgagtgagtacctcagagaaatttgatagactcaaacagatagtatgagaaatatctttgaaagaaatatggaggaaggttaaaaggggattagtaaaattaatgcgataggtaacatgtttgtaaccatatagtatccttttagatacaaaagcttattttcattattattataataaacagttaatggttgaaacttagtaaaatgtcctatttctgattattaagactagtataaatgagaaaatccaagctattaagtaccattagctacagtgatcttagcttccttgcttacaattgttcagtgggtcatctaaattcttctatgtcctgagcatgatctacaaacatggtctagcttctgtctctccgtcttcccgccatcattgtgctgtagccatatggaactcctttcagttctctgaccatgccctttcctgcctcagatttcagcttaaattttgcctcctcagagagatgccttcccaaactccccatctgaagctggcctctgccttttactccctatcatgtcactctctgctcaccatccttatcacaatgtgtatttgatttgtttgctagtttactgtcttcacaacataatgtccgtttgtgcaagggtcttatttttcttattcatgtctgtatctcaagggtctagcacaatgcttgatgcatattgtgtgaataaatactttgttgccaaatccagtgaaaactctcagttcttgtttcactgcttggcagtattgacattgaatattctctgagatactttttttcttttggcttttcatatatcacactattattctcttatttctctggcctcttgctctcaacgtcctgtaagtgttggtgttccttaagttctacctagtgtcatcatttcttcattctgcatattctttccctagggtttcttcccaacaccaaaggacttaccatctgtctctctgaatctcagatctccagctttgatctgtttcctttactttagagctatatatttgcctgcctactggcctgtctctcacaatccatatattcaagaatgaacactatactttgcttcaaaccttcagaacattcaaaccgtttatgtttctcatctaatcaaatagagttactctctaagccagaagttactctccctttattcaagctgtcaatttttgtctcctaaacatcttctagttatattctcatttctctgttcacattgcattaataatgatgataaacatttgcattcttattctgtgccaggcaacatgctaactgctgtatatatattattatatttgtactttggcaagaatcctgtgaagatttttatctttggactactagaagagaaagctgagttgtagagagagtatgtatttaagtccgtttgggctgctataacagaataccacagactgggtaacgtgatgaacaaaaatttatttggctcacagttctggaacctgggaaatccaaaggcatgatgctagcatctggtgagggcctttgtgctttgtcatcccatgccagaaggcagaagggtaagagagggcaagagtgagcaagagatggaagttgcaacctcaagctcttttataatgagcattaatccattcatgagggcttcaccctcatgacctaaacatctccattaggctccaccttccaatgcaacagttagcataagttttcaacacatgctttttgtagcattcaaaccatagcaggaagcaactttgcttaaaattgtatacctggtaagtggaaaaagagggatttgaatataggcaaatgacttcagaggatttactcttaatttctgttgtactgccttctaatcttggcctccatcatttcagattaccaaagctgtctcttaactggtttctttgtctccaaccttgtgcacttgctatctattctgtgtgctgcagcctgagtttttaaaaaacagaaaatgaggggccaggtgtggtggtggctcacgcctgtaatcccagcaagttgggaggctgaggcgggcagatcatctggggtcaggagttcgagaccagcctgaccaacgtggagaaacactatctctactaaaaatacaaaattagccaggcgtggtggtgcatgcctgtaatcctagctactcaggagcctgaggcaggagaattgcttgaacacgggaggcagaggttgcagtgagcagagattgcgccattgtactccagcctgggcaacaagagtgaaactccatctcaaaaaaaa

SEQ ID NO: 9360 - DNA, 3693 bp, Homo sapiens
ttcatgggaaggagttggcccggcttgtctctctgtcagtggcggctgctgcctgctctggaggcaggctgggcggtggcggccgagactggcgggggtggacgcccgggccgggctgcgcccgcttcttgcagctgtgaattcctttggacaattgatgatatttatcattgtgcccagtttctacaaataaaagatgggtggattattttctcgatggaggacaaaaccttcaactgtagaagttctagaaagtatagataaggaaattcaagcattggaagaatttagggaaaaaaatcagagattacaaaaattatgggttggaagattaattctgtattcctcagttctctatctgtttacatgcttaattgtatatttgtggtatcttcctgatgaatttacagcaagacttgccatgacactcccattttttgcttttccattgatcatctggagcataagaacagtaattattttcttcttttccaagagaacagaaagaaataatgaagcattggatgatttaaaatcccagaggaaaaaaatacttgaagaagtcatggaaaaagaaacttacaagacggctaaattaattcttgaaaggtttgatccggactcaaagaaagcaaaggagtgtgagccgccatctgctggagcagctgtaactgcaagacctggacaagagattcgtcagcgaactgcagctcaaagaaacctttctccaacaccagcaagccctaaccagggccctcctccacaagttccagtatctcctggaccaccaaaggacagttctgcccctggtggacccccagaaaggactgttactccagccctatcatcaaatgtgttaccaagacatcttggatcccctgctacttcagtgcctggaatgggtcttcatcctccaggtccacctttagcaagacctattctcccccgagaacgaggtgctttggatagaattgttgaatatttggttggtgatggtccacaaaacaggtatgcacttatatgtcagcagtgtttttctcataatggcatggctttgaaggaagaatttgaatacattgcttttcgatgtgcctactgttttttcttgaaccctgcaagaaaaaccagacctcaggctccaagacttcctgagtttagttttgagaagaggcaggtggtggaaggttcaagttcagttggtcccttgccatcaggaagtgtgctttcatcagacaaccagtttaatgaagaatctttagaacacgatgttcttgatgataatacagagcagacagatgacaaaataccagctacagaacagacaaaccaagtgattgaaaaagcatctgactcagaggaaccagaggagaaacaagagactgagaatgaggaagcctcagtgattgaaaccaactccacagttcctggagctgattctattcctgatcctgaactaagtggagaatctttgacggcagagtagtaaatgcttccacgtgccttcaactggatatttatagtcttactgatgtcagttattgctttttcggtggcacttactttttttgcccctctaagggtatgcttgtgtatcatttgaattcagattgcctagctatttgaacatctcaaagttatatatactgggtattaaaattaaaagcaagttatatcagtgaagtaagatccttttgaatgtacaaagacccacactattgagacagcttttagatacttttttgtccattctaaaagtaagcaaacatgattgccttcttgttttctgtatgtataacccgtaaatatccattttgacataggaagaactttggttaagagtaagttctctaattgtgtttgttttaaggaatgaaacttggttaagattttgactacttcattattaaaaattgatagaattttagctcctgagatatttacaactgggagaaatgtctatttaggtgtttacattaagcggtatgaaagttgttaccacataggcactggtacgaattctcaataagaatgcagtggaacagttaagtagaactgtaactacgttggcactggtacgaattctcagtgagaatgcaatgaaacagtcaactgcagtgtttctttttgatgtcttttattttacaactgggccaaaggcacattatgtatataattagtttatatttacacactagcatataggaaatatttctgcacttgaccctatttgaattctgagcattatttataagtataaaatgatgatatataagtgaattttgtgctcttgtttgtattttattaaggaaaatgaaaataatctggcatcagtttcattttgctaaatatctagtcttcttcaaacagtatcttggtgggtgacttggctacctgaaaaatcttaggaggaatagctcacaatacaataaatctgtagattctgcttagagcaaattatggtacttttattcagacttgtttcctttctagttaacagaaatagtgacatttagaggttttaatcagaagttaggtttttctgattcaggaacatcgtaggccagccatttgtaatttttaactttgagaaacaaattttgtgagaataggtagtgggttgctggtagttaattggatttaatatttgtattaaggattaactggaaaaaatgtgtctcagtgctaattcttggacctttaatacagtgtgcttatctgttacggcctccttttatctctcttctccaatattaaaaaaaatggaaatcaaattattatgctgaagggaaaaatatacctgtataagaatggtgtgtttggctaatgtttctaagttgcacacagtttattaacaactgaacaaaacatttttatcatttaaaaatctatttttatgatttaatatctcatatgtgacagtttttttttttttttttttttggaactcaatctgttaacagtctgggacatccggtatagtaaccagagtttttgagcctgccgtattgggcttaaatttcaggtctgtagtcttgggcaagtcacctataaactcactgagattattttttcatctgtaaaatgggaagagttatgtttatttttgaagggtattaggataattaaaaataatgtaatgtgcctagcacactacctgaaaacgatggcatttgttcttattaatgtctttaaaatatgcaaggaccataagtttttcctcttgcagatgaggaaagtaaaaaataatacgaacatgtaattcagcttctcagattcaagccaatgttttttgcatcaacttttctatattgtatgtatgtatataaatacatagattaaggaaataggaaactgaaactctgtggaatataaactttttaaaaataatttcatcaggttttttgtatgttactgacccatatggattttagtaacatcttgcttagtcatgttgttataaaacattcaaattctgatatacattgcttgaaaatgagtgagtacctcagagaaatttgatagactcaaacagatagtatgagaaatatctttgaaagaaatatggaggaaggttaaaaggggattagtaaaattaatgcgataggtaacatgtttgtaaccatatagtatccttttagatacaaaagcttattttcattattattataataaacagttaatggttgaaactta

SEQ ID NO: 9361 - DNA, 4565 bp, Homo sapiens
ggggggggggggagggtcaaccaaacccctccctatcgcccccatcccctgaatctttagaacacgatgttcttgatgataatacagagcagacagatgacaaaataccagctacagaacagacaaaccaagtgattgaaaaagcatctgactcagaggaaccagaggagaaacaagagactgagaatgaggaagcctcagtgattgaaaccaactccacagttcctggagctgattctattcctgatcctgaactaagtggagaatctttgacggcagagtagtaaatgcttccacgtgccttcaactggatatttatagtcttactgatgtcagttattgctttttcggtggcacttactttttttgcccctctaagggtatgcttgtgtatcatttgaattcagattgcctagctatttgaacatctcaaagttatatatactgggtattaaaattaaaagcaagttatatcagtgaagtaagatccttttgaatgtacaaagacccacactattgagacagcttttagatacttttttgtccattctaaaagtaagcaaacatgattgccttcttgttttctgtatgtataacccgtaaatatccattttgacataggaagaactttggttaagagtaagttctctaattgtgtttgttttaaggaatgaaacttggttaagattttgactacttcattattaaaaattgatagaattttagctcctgagatatttacaactgggagaaatgtctatttaggtgtttacattaagcggtatgaaagttgttaccacataggcactggtacgaattctcaataagaatgcagtggaacagttaagtagaactgtaactacgttggcactggtacgaattctcagtgagaatgcaatgaaacagtcaactgcagtgtttctttttgatgtcttttattttacaactgggccaaaggcacattatgtatataattagtttatatttacacactagcatataggaaatatttctgcacttgaccctatttgaattctgagcattatttataagtataaaatgatgatatataagtgaattttgtgctcttgtttgtattttattaaggaaaatgaaaataatctggcatcagtttcattttgctaaatatctagtcttcttcaaacagtatcttggtgggtgacttggctacctgaaaaatcttaggaggaatagctcacaatacaataaatctgtagattctgcttagagcaaattatggtacttttattcagacttgtttcctttctagttaacagaaatagtgacatttagaggttttaatcagaagttaggtttttctgattcaggaacatcgtaggccagccatttgtaatttttaactttgagaaacaaattttgtgagaataggtagtgggttgctggtagttaattggatttaatatttgtattaaggattaactggaaaaaatgtgtctcagtgctaattcttggacctttaatacagtgtgcttatctgttacggcctccttttatctctcttctccaatattaaaaaaaatggaaatcaaattattatgctgaagggaaaaatatacctgtataagaatggtgtgtttggctaatgtttctaagttgcacacagtttattaacaactgaacaaaacatttttatcatttaaaaatctatttttatgatttaatatctcatatgtgacagtttttttttttttttttttttggaactcaatctgttaacagtctgggacatccggtatagtaaccagagtttttgagcctgccgtattgggcttaaatttcaggtctgtagtcttgggcaagtcacctataaactcactgagattattttttcatctgtaaaatgggaagagttatgtttatttttgaagggtattaggataattaaaaataatgtaatgtgcctagcacactacctgaaaacgatggcatttgttcttattaatgtctttaaaatatgcaaggaccataagtttttcctcttgcagatgaggaaagtaaaaaataatacgaacatgtaattcagcttctcagattcaagccaatgttttttgcatcaacttttctatattgtatgtatgtatataaatacatagattaaggaaataggaaactgaaactctgtggaatataaactttttaaaaataatttcatcaggttttttgtatgttactgacccatatggattttagtaacatcttgcttagtcatgttgttataaaacattcaaattctgatatacattgcttgaaaatgagtgagtacctcagagaaatttgatagactcaaacagatagtatgagaaatatctttgaaagaaatatggaggaaggttaaaaggggattagtaaaattaatgcgataggtaacatgtttgtaaccatatagtatccttttagatacaaaagcttattttcattattattataataaacagttaatggttgaaacttagtaaaatgtcctatttctgattattaagactagtataaatgagaaaatccaagctattaagtaccattagctacagtgatcttagcttccttgcttacaattgttcagtgggtcatctaaattcttctatgtcctgagcatgatctacaaacatggtctagcttctgtctctccgtcttcccgccatcattgtgctgtagccatatggaactcctttcagttctctgaccatgccctttcctgcctcagatttcagcttaaattttgcctcctcagagagatgccttcccaaactccccatctgaagctggcctctgccttttactccctatcatgtcactctctgctcaccatccttatcacaatgtgtatttgatttgtttgctagtttactgtcttcacaacataatgtccgtttgtgcaagggtcttatttttcttattcatgtctgtatctcaagggtctagcacaatgcttgatgcatattgtgtgaataaatactttgttgccaaatccagtgaaaactctcagttcttgtttcactgcttggcagtattgacattgaatattctctgagatactttttttcttttggcttttcatatatcacactattattctcttatttctctggcctcttgctctcaacgtcctgtaagtgttggtgttccttaagttctacctagtgtcatcatttcttcattctgcatattctttccctagggtttcttcccaacaccaaaggacttaccatctgtctctctgaatctcagatctccagctttgatctgtttcctttactttagagctatatatttgcctgcctactggcctgtctctcacaatccatatattcaagaatgaacactatactttgcttcaaaccttcagaacattcaaaccgtttatgtttctcatctaatcaaatagagttactctctaagccagaagttactctccctttattcaagctgtcaatttttgtctcctaaacatcttctagttatattctcatttctctgttcacattgcattaataatgatgataaacatttgcattcttattctgtgccaggcaacatgctaactgctgtatatatattattatatttgtactttggcaagaatcctgtgaagatttttatctttggactactagaagagaaagctgagttgtagagagagtatgtatttaagtccgtttgggctgctataacagaataccacagactgggtaacgtgatgaacaaaaatttatttggctcacagttctggaacctgggaaatccaaaggcatgatgctagcatctggtgagggcctttgtgctttgtcatcccatgccagaaggcagaagggtaagagagggcaagagtgagcaagagatggaagttgcaacctcaagctcttttataatgagcattaatccattcatgagggcttcaccctcatgacctaaacatctccattaggctccaccttccaatgcaacagttagcataagttttcaacacatgctttttgtagcattcaaaccatagcaggaagcaactttgcttaaaattgtatacctggtaagtggaaaaagagggatttgaatataggcaaatgacttcagaggatttactcttaatttctgttgtactgccttctaatcttggcctccatcatttcagattaccaaagctgtctcttaactggtttctttgtctccaaccttgtgcacttgctatctattctgtgtgctgcagcctgagtttttaaaaaacagaaaatgaggggccaggtgtggtggtggctcacgcctgtaatcccagcaagttgggaggctgaggcgggcagatcatctggggtcaggagttcgagaccagcctgaccaacgtggagaaacactatctctactaaaaatacaaaattagccaggcgtggtggtgcatgcctgtaatcctagctactcaggagcctgaggcaggagaattgcttgaacacgggaggcagaggttgcagtgagcagagattgcgccattgtactccagcctgggcaacaagagtgaaactccatctcaaaaaaaa

SEQ ID NO: 9362 - DNA, 1127 bp, Homo sapiens
ttcatgggaaggagttggcccggcttgtctctctgtcagtggcggctgctgcctgctctggaggcaggctgggcggtggcggccgagactggcgggggtggacgcccgggccgggctgcgcccgcttcttgcagctgtgaattcctttggacaattgatgatatttatcattgtgcccagtttctacaaataaaagatgggtggattattttctcgatggaggacaaaaccttcaactgtagaagttctagaaagtatagataaggaaattcaagcattggaagaatttagggaaaaaaatcagagattacaaaaattatgggttggaagattaattctgtattcctcagttctctatctgtttacatgcttaattgtatatttgtggtatcttcctgatgaatttacagcaagacttgccatgacactcccattttttgcttttccattgatcatctggagcataagaacagtaattattttcttcttttccaagagaacagaaagaaataatgaagcattggatgatttaaaatcccagaggaaaaaaatacttgaagaagtcatggaaaaagaaacttacaagacggctaaattaattcttgaaaggtttgatccggactcaaagaaagcaaaggagtgtgagccgccatctgctggagcagctgtaactgcaagacctggacaagagattcgtcagcgaactgcagctcaaagaaacctttctccaacaccagcaagccctaaccagggccctcctccacaagttccagtatctcctggaccaccaaaggacagttctgcccctggtggacccccagaaaggactgttactccagccctatcatcaaatgtgttaccaagacatcttggatcccctgctacttcagtgcctggaatgggtaaacagagcacttaatgttatttacagtttatattgttttctctggttaccaataaaacgggccattttcaggtggtatggaaatggcatttcatttggaaatagcagagcagttatctgattaagcaggagttccatattcaattagccataactctttacagctggcaccttgtgatactgaaacctatttcttgagctcatttaactgttatggcttctt

SEQ ID NO: 9363 - DNA, 833 bp, Homo sapiens
cagcttttactgtgtgcgaggcactattggagaaagcaaaacagaaatccagaaactttaagtagccaattgttatgttagtttcctttagttgtatgaaacaaaggttctctcggtgcagcgtctttaaaaaaggaagatttattgttgtgctctgtgtggtgtagaactagcgtgccagaaaatctgaagccacttagtggctggttcctctctcggtagtagtgactgctctgagtgcctgttgtgtcttccttttgctaactaaaggcattctgttcacacttctttagtttaaatcctacagaagtctgtctgattttttttcagaattaattctattgagctgtagtttgcatacaataaaatacaactattttaagtttgatgactttggcaaatttaggtacccatgtaaccatcaccattaaagatacagaacatttccatcaccccagagagtttccttttgcccctttgcattcacccccactccctgcccccagccagcctcagctccaaggaaaccattaatctgctttctgtacttgtagattagagttgccttttctataatttcatataaatggaatgatagaatatatagtcttttgtgttggtcttttgttttaaaacttatcctgatatttcatgtattattcctttttattgctgactatagtattctatgaaatacatttcatagaatatgtttatctgtttcattcaatttcatagaaattgtttatctgttcactagttgatggacaattgagttgttttcagtttgggatattatgaataaaattctgtgaccactcatgtacaagtct

SEQ ID NO: 9364 - DNA, 1051 bp, Homo sapiens
gggacccctccttaggcctcgttaagtctcaaacacagtacagctcacccagcattgctgacgactgaagattcagaaacaaaacctacacacagcactgaggtcttaatcatagcaaaatgtgataaaccatgttgtgaaaaacttttatacattgaagccatgaccattttgtgtctatcttactctagcacaaaaattgggggatgttaaaagatagttgtgtggaagctataaggttctgtctgtcgtgttactctctgtggaaatgagaggggtctcccatttacactaagcaaatttccattggtcaattttaatgatgtcttgaagcacaatttagctgagcactgagtagccatatgctttctgagtacaagtgtgtctgccttcttcaacatgtagggttgatcaagctaatacttaattgcaaatatcccttgtatgaggttaactaaaaaaattttgctatgtctgatctacatgtttgcattttgttcaactaaattaatatttgtagattgcaagttttgtttaaaataactttattgagtttttaagtcctgatctgttctaaggtgcctttctcacctcccattgattcagtgattctgaagttcttaatttgcaagtaaaataagtctactagagaggaggaaatcaggcacaaattgaccaattctcatgccatttgcaaagcaaaactgtaaggatgatgaaacctggctaactaaattaatggatcatttcactaaatcagatagaggaaatatcataaatattaacttgtctccctagaagctgagatttttcgccttaaatgacatggttgtgtttttgtaagagaaacttaatctaatctaataatgtgcatttaagtaagcagttctaagtcatgtatgacaatgcaattgtctgtttcctgaaaacaaataaatcgggaacaccatatccatttcaagctatcattaaagtgtaatttcctttgctctcttttactgggattatttgttttaaagtaaaacattaaaaagatgtctataaacagcta

SEQ ID NO: 9365 - DNA, 347 bp, Homo sapiens
tgagtcagaacagggactactgggactgtgtcatcctggaatccagtcttttcctctcctttacaccaggaatagaatagatttcctggcatcagatgccagagagacgcatttactgttcactgtgtgtaagttatcagaatcagaagtactactaacaactctcagcaaaaaggcattgggacaaaggcaatgaggaacagttgtttctgaggtagcttcactttatgagaatgagcagcaagggaaatttatggtgaaggaaacagtttctatgttttttgtataattaatagcttcttcaagatgtcacagcatctgggtggcttttgagaggagcacaccat

SEQ ID NO: 9366 - DNA, 914 bp, Homo sapiens
  misc_feature (24)..(24): n is a, c, g, or t
  misc_feature (204)..(204): n is a, c, g, or t
  misc_feature (278)..(278): n is a, c, g, or t
gagcaaatacagcaaggtagtatntgaaacagaagggtaaatacagagtggcagaaccctcagatccctcctttatgtctgagagagaggtagctgtagagatgtcttattaagactagaggtgctggcttgagaaatgctggctggacttctacagctgggtagatgttagacatgaagccggccgctgagtctggtgggagnaaactgcccgccttaacatcaccctgagcgcagcactaagatcctgagagacccctgggtcattctctaagctnggtctttttgatctggttatgctgctgctttttactttcccttcctgggtcattttctcctacacatcttctagtttgacaccttggggtagatccaagagactgagaagatggaggcatcctagtcatggcctcaacaaagctggggaaagaaaaactccttctgtcctctcttgacctttcatggaggggcactgtgtgttctactcaccatcctcactggaaacagaagagaggaaaaagcatcagattttagcagaaaggatagagggaagacatatggaaaaacttactcatgggatgaaagacttcagattggacctgcttctcttctgagatttttcttctgcctgccggtttgtttttgtgtctacctaagaggcattggatgaagcacagttacttttccaggcctcttccagacagcctcagcacagtttccatacagtgcactgcttcttggttcttctaaatgtcatgtagtatgtgtggtggttagatcacaagttttggagacagacagccctgggttccagtgccatctctgccacttaccagctgtgctaccttggtaattcacttaacctctttgagtcctagtttccttgtaaaatgcagaaaaacaactactcctta

SEQ ID NO: 9367 - DNA, 389 bp, Homo sapiens
aaaagggtagaagaaagcagaaatggaacaaaaagtagattggtcggttcaaaatttctttccttatagtgttaaaacagggaacatcctcatcatgctagcttaggtaatccgtactcctgattggctgctatgaatcttctgtttttggaaaactggcctgtttcagaggtcagtttgattatgtggcacctaatgtgaacgacttcattctggttggtttgatctcttggaacctcgtgcaggaagctagtccaaacagtggcctcccatactttgtttacatggcatagttcagaatataagctcatattatggtgtcatattatctaggtacaaattctgccttctctactccctagtttgtgataaggacaagttacttagca

SEQ ID NO: 9368 - DNA, 420 bp, Homo sapiens
accccacaaagtagaggtataaaggggttttgactaagcaagtgtcgtttgctccctggaggatgtgtcagctcttgcttcttttcaattgcttaagagttaaaaacgattactgtggtctcagaggacagacaccagcactgtgagctggatctcacccacagatgtgttcggcttgacccacatagttgtatacgcatatgtcagtttgttgcaacatacaaaaactggggggtttcacataaaaatctgcattttcaatttcttttttttaactgccaaatctgacaacactgtgtcttccctgcttcccctgtggaaacagtctgcctgactggggtaacagtgggctccctgggtacccacagtttaccagggccccacctgggcccactttcctccactcctgtttgtttccta

SEQ ID NO: 9369 - DNA, 620 bp, Homo sapiens
cgctctgggaggccaaggcaggagaatgacttgagaccagaagtttgagaccagcctgggcaacataacaagaccctgtctctacaaaaataaagatgaaaattagccaagcctggtggcttgtatctgtggttctagctactcagaaggctgaggcaggaggatctttagagcctaggaggtcaaggtggcagtgagctatgatcatgccgctgcactctagcgcttgcaacagaaccagaccctgtctctaaaagaaaaggaaaaacaagtcttatatttttatgataaaatgagttcacagctttgagagattcaaggcccatgcctcaatgactatgtcatttagccttagtttccttatctgtaaagcaatctgagcagggattatctctgtatcaccgggtgattgtagacatccaaagtaggtgctcacttcagcagcacatacattaaaattagaatgatacagagaagattagcgtggctcctgcacaaggatgacatgtttaaaaaaatatttttttaaaggagaaagaaaaaaaatcaaaagtagatgcaaaccattttatgatctcatgatctcaaaacaaagggaaaagagtaagattccatgtctc

SEQ ID NO: 9370 - DNA, 408 bp, Homo sapiens
tttttaagagacagggtctcactctgctattcaggctggagtgtagtggcatgatcatagctcattgcagcctcaaacttctgggctcaagtgattctcccacctcagcctcccaagtatctgggactacaggcacacaccaccatgcccagctaattaattttcttttatacagtattccagggaaaaggaaaggatgtttctctttaaatatgaccttctagtccaaatatgcttcactaattgagatattcaaagccactgtgtttataaagtctcaagttctcttccagattaaaagggaagaaaaacttcaaattcttctttataggaatctcaggaagaagaggcaagtgataacaatattctcctgaggcaaaaggactgtaacataatctgtccaaagaa

SEQ ID NO: 9371 - DNA, 1216 bp, Homo sapiens
aaaagtcccatatatttgacttcagcagttaaattgtattttcctgttttaccaaacctttttaattatcgtttcttgctgtagaaaaatcacataaaatctgctctttgcttaacaaattacagggtcgcttctgatttgtgtgctcgaaatactagtcaccaagcagaaactgatgactgtgagaataggcgactaattaacaaacaaacaaaaaaagccctttctcaacattggattgaccgagtgaaagttgacaggggaaagacacctcgattcagccatctttctccaacaggttgtactgctgactgcacagtctcccctgaaggactccggtcgctgtagccttggagagcgaccagattcctcaccccactcaggaggagccagggcaagattagggtgcagagaaatcggtttcctccagcctcctaccccagggaagaggaccgaagccagccccggcctcacgtgcatgcccagtcgggaggacgccctcagtgggagagccctgctcaggttctccccgaggccgaggtggtggtgggagcgggcggtggccccgggatcaaaggacctccgccgggttagctttggcagtgccgcagccaacccagcaggacgcttattttcaagcctggggaacgtagttcctcccgctttcacagcaggatggagcccgacggcaccccggttaaagggcctttccagagccctccggggaacggaaggccgcgctcctccgggagggagaacgacacactcttcgaggaaatcctggggcgggcgctctcctcgctgccgggacctttgtttctaagctggccacagctagagcagccttaagtgtcccaatgacacgcctgctatcgagcgccctcccggcggcccctcctcagccagctgcccagcgggcgtcctcaggtgtccccaagaggcgcaggcctagtcgcctacacgtcctttccaacttcgtcagctctggcttcccaccacccctcccggctctgcggcggcccagcctcttctccggttaattccggcctgtgcggcccggtcgtcccgtaaagaaggcaagcccgggttccgggtgaggggttggtgggtcagggtgggaaagcaaggcagcggtgagtcctctgctagcagatcgggctcaatatccccattccctgttttctccgggcccgccctccgcctctcaggcggccgc

SEQ ID NO: 9372 - DNA, 488 bp, Homo sapiens
acacaattccttcaccacaacacctaagattagtatttgattgagttactgggtgctacaacctagccaagttgagtcataaaactgaccatctctggaggtgtactctgcagtaaaaagctagctgaggcattattcacaccaagaaatgcagtgggtaccgaacaggagctccaaaaatatccaacgtctcattgacagaaagaagccactttagaatctgccttaccagaaggcaccaattgcagattacagctctgtcagtcacgtatggattaaacccctttcctctaacctcctccctctctttccaaccttggagggaccttccacaggagccagttagggaggagaagggaagagagagaatgaagcaggtaaccaggcccacccctctggaggagacagacctgaacaggggttgcttacaagcattgcatttggatcccaagatttgctattacaactaaattttgtctgttttgtaa

SEQ ID NO: 9373 - DNA, 3854 bp, Homo sapiens
tcttgcagtgtatgaaagtctgtgcacaggccgccttgttatcaagtgtcatgactggaatctccgtggggagcactaagagtatgtagtgttgcatgatataatccaagcctgtgggctgtgtcatccgggattgttggaattttgcatgtgtctgttccatatcccgctggtaaccagcttacagaccttctgtcaggttggcttacattatcatcaacaggttgccgtagtgatgatatgatgctggacacaatcattgtgcactttgttaatttggtatggtggtgccacacattatcactgtacagcattaacaaggctggaatatggccctctgctgtagggggcgtggcacctgtgacttgcactggaataagtaggaggctttccccaaaggatatggagactgatgtgtgctccatatcttgaggggagctctcttggtttcctttggccgggtctgttagttacttttgaaggccatgccaacccttttaggccattaaatttttctcaaacaatagccagcctcatttctgcttcatctctgtggtaggaaccattccctactcttactccctcctcttgtccaacttccaccaaacactcaatccgagtcctggctgctttcttgcttaggtctgtggctggtaactgtggtgaaagagtcaaggtgggcagtgtttggggtaggaaatgagtagtggtgaagcagcagcagtgtgtgtgtgggtgtgggtgtgtgtgcatgcgtgtgcatttgcatgtgtgtatgttgacaaatgagagtgtagccataagatttcattgttactactagtctttgtgtacctatctggagggacattaaaaaaatatggccattctcccatctagggggttcccatctcagacttctctgataagagtaatttgagaacaaatacagattcatctatgggaaaagatgtttaaactcagcatgaaggagaaacaaatttaggagtggaaagcaaggcaggtagttaggtgatttccatgaccacatttgcttgggccagggaagtggtgcacctcttttataacaatgggagatttcagaaacagtttgagtgttggcagaccaatgccctgataagcttgtggtatagaggtaggaagggagggaggccagagattagataaaatgatggtgggtgggatcttagctctaaatgaaaagaactggacttactaagtgggtggattacttgctagccataacttttagggaagggtaggtctggagagaaggtgaagaccagcagaaatatactgtgaaattgccaaatatgtttggttgcagaaaacacagcctggctctttgtggctagatgtgacttccaacttctgaagacaggattgccaagagatgtgatctttccacatacagctcctgtccccatctctttatgtgtagagacctggatttggggtagtggggtagtaaaccatatatttccaaaagatggtgtgaagagtcgtttctcttcgtctgggatgtgattggcttttgttttttgttttttgtttttgagacggagtctcgctctgtcgctttgtcaccaggctggagtgcaatggcacaatctcagctcactgcaacctccgcctcctggcttcaagtgattctcctgcctcagcctcctgagtagctgggactataggcgcgcaccaccatgcccagctaatttttgtatttttagtagagatgggatttcaccatgttggccaggatggtcttgatctcttgacctcatgatccacccgccttggcctcccaaagtgctgggattacaggcttgagctactgcgcccggccagtgattggcttttaaattaatcacaaatgtttgataaaattctggtatgtgctaagtcccaggcttggttgatatctcagactatgatagctgtgaccttcaagaaatttctggcttggggaatctgtagtttctggttgtccaaaaaagatagttcttagtcctactttattttctacccactcaactctccagacttccctcttagtaaaggaattcataattctccctgcatcttctctgtttatttcaatgtccatgttctgagtctcaagttttcctgaagcacaggagcaggcttggccccagagcccctggctttttcaacgagcatcagaaatgctatcaatatattctctctgttgctttatcagcttctctaaatttattttgtaaggaagttagcacctccttccaggactttaaacagttgtctttgccaatttgttcctggattttccttgaacttctcaggtttccaagccacatcctagcagggcatccaggagccttgcactgaacctctcagctcttttgactttcttctggtcataggtgttgggcctcccattaggtagaagtcctttgagcagacccgaaatggccaaatgagacatcatccaagttcctccctcctttactgtctcggctttttcaagcacccctttcacctctcttttctgccttttcctcagtctgtcaagttctttggaggaaagaagttcttggtcagaggtcctaaaaccaccaccagctgggggtgctgagaatggtgaggagttggacagtcccggggcttttttgaaaggggactttatggtcatttcccctgtttagggtgagggactaagaattctcaagccttcagtttcatccatatttcaatgtaagcagaaaagcacatctcaaagccaaatagaaatgattttctactaagcctatcctttgtgattcttggttcccttggtctcttaatattaattatagagaatgggcagttgagtcagttaacatcttttcatcagaaaggagggtaatattcataaccaaaagagatgtaaaggaagtatattactgcttgaagtgtgaaaagaggaaaggagtgttatgtgaaccttttcagtagggaaattcagaaaatggaatgattcatccataggcataattcttttaggagattctgtgctcaaagggaagggaatggtttctgatccttctgaagagaaaaggaatagcatttttcttaaacctaacccagtttcagcattggagaatacagaactttttcttctagctgatggcattaatatttcttgagagagagaactcacccatggcacttttctgagcccagcagaaatcagcggagcttgggcttcgcttagcaggtttgcaattgacttcaacatgcaggcttttcacatgtgcaataatgctggaaacagaagcaccaaactgattgtgcaattactccttttgtagaagaggccaaaatcctcctcctccttcctttctcctatattcactcctccaggatcataaagcctccctcttgtttatctgtgtctgtctgtctgattggttagatttggctccccttccaagctaatggtgtcaggtggagaacagagcaaccttccctcggaaggagacaattcgaggtgctggtacatttcccttgttttctatgttcttctttctagtgggtctcatgtagagatagagatatttttttgttttagagattccaaagtatatatttttagtgtaagaaatgtaccctctccacactccatgatgtaaatagaaccaggaataaatgtgtcattgtgataatcccatagcaatttatggtaagaacaagacccctttccctcaccaccgagtctcgtggtctgtgtctgtgaaccagggcaggtaattgtgacactgcatctcatagaactctgcctgcccagatttttgtgtgctcacctcaatgggtgaaaaataaagtctgtgtaaactgtt

SEQ ID NO: 9374 - DNA, 576 bp, Homo sapiens
cagggttttacgacaccagggtatcccaccttttttgcaacataggcagaaacaccaagctgtgggtaattgatgtgcgtgtcactgattcctgcaacagctttgaatgtattaaatctgttttcaacagcccttgcataggtgttatctctcaaatctctgtaaagagcactaagagtatgtagtgttgcatgatataatccaagcctgtgggctgtgtcatccgggattgttggaattttgcatgtgtctgttccatatcccgctggtaaccagcttacagaccttctgtcaggttggcttacattatcatcaacaggttgccgtagtgatgatatgatgctggacacaatcattgtgcactttgttaatttggtatggtggtgccacacattatcactgtacagcattaacaaggctggaatatggccctctgctgtagggggcgtggcacctgtgacttgcactggaataagtaggaggctttccccaaaggatatggagactgatgtgtgctccatatcttgaggggagctctcttggtttcctttggccgggtctgttagttacttttga

SEQ ID NO: 9375 - DNA, 323 bp, Homo sapiens
tccatctcgtttcatactaaggtgaggtgattcagatctgttgatggacccataaataatcatagtagatttgctttgttcctcagaagcagcagtttcttaggaagaggaagaaggcccttttaaactgtaaatcactcccgttccctctcagctcctgtttgcttagggtgtgtggttccccgacgtcgccatgtggacacagcatatgagccacactctggctggaatatcagcacacgcatttgagaacactgccttactgttctgtggcatatttagctttttctgttcctgactgcaaacggcattactcttttctt

SEQ ID NO: 9376 - DNA, 336 bp, Homo sapiens
aaacaaagagagagagatagagagatatcagaggatacattctgccacctgtgttcattcatgactgattatcaaaagaaatttctggttcttgacaaaacattttctgttcatagagaaattgttcagttcaactgggcatgggtttgctttctgtcacttgctggaaattctttactggaacaaaaagtctagtgcttgtgcataagggaagacatagacatgtggtccttcctcacacctgcttcctcactcctgcttcctttttgctcctcatttttcttttccatcttaacttttccccatcacttgagccttcagtaagtgtgagataat

SEQ ID NO: 9377 - DNA, 452 bp, Homo sapiens
ctaggttgcctaggaatctgcagtttaaataagcacccctggctaatcagtgaatgtggtctgcaaccatactttgagaaacattgagtggatagcctttatttaactcctgagacagaaatgtggggggaaccttcaaacactgaccaaccgacactgcctatccatgctattaattcaagaagggctagttttgcatgcactttctctcatgtgcagagcaactacacataggtgagtcaagtttcactcacaggatgacattctgtctgttccgggctcatcatgtgagactacagaggggtgacttactcagcctctaaaagttcagccaacagaggaaaaactggcacagctgtgaataccactatccccttggctctcactcttgtaacacaaggcagtggagattcagagaccaaggaaccccagagctgtgtaatggatcagga

SEQ ID NO: 9378 - DNA, 339 bp, Homo sapiens
aatgcaagcgtgacagagaaacctctttcgaatgacttactacaactctggcattggttagttccatgtattgtaagattctggtgctaatgctccatacagaattgatcaggactgattactcttctgtggaccaattgctattgaactacccagctgaagagggtttggggagagaacgttcattattatggactccacttttgtcccctggtagtttaagggtgatactagaatccagagaagttcctgtctccttgtggcctcaaacactcaggccgtctcaaaagcttttcaccaaggtgcaaaatcatttacctgcattccacacatcttttc

SEQ ID NO: 9379 - DNA, 585 bp, Homo sapiens
cagaaacacagtgtgggtccaacaatctgttttaacaagtcctctggttcgctccaggctccagggtgggacagtcactggtgcttctgctggctgggacaacagggccccactgtggaacttgaagcctgtgaccccctcctaacggctcctctcagttcccgtggtcccaaaagccctctgtcccgtgcagggctgccccacagtggccttccacatcctcctgatagcagaggcccccgccacccccagggccacctctgcagctgtgccgcagcttctctgcccaggcacctgcactgacacggagcaccctgtaggttgtctgcttgaggcctttacctaaatgcttgccgcagctgtttctaaactacaaaagcacacaatcatgaaatgaggcagaggtgggctgagtgccacaatggatgccaagaggaagagagatggacatggcgctgggaggctctgggcaccactggaggggggcgctgagttcccgggctgccccggctgggagaggagtcgagtcttaatctcctttaaggaaacataataaataaactactttgccactaaaaaaaaata

SEQ ID NO: 9380 - DNA, 214 bp, Homo sapiens
gtgcatttgataaacaaacaaaaacaggaaattaaaaagaaggaatggtagaatatcctcggaaatacttgactaagaaaagccaaaaaacatataacacacacacatagaagtccttctctttcttttgaaatgatccaaattgaaaatgatatcgatgcctaagtaaaaactgccttagtatgtcacaggcctggagaaagcaaaatgaaat

SEQ ID NO: 9381 - DNA, 412 bp, Homo sapiens
catagttctccccacataagacactgtgacatatttctgggccaattacataagttaaatgagtctttgcttatgcctggatctcaccctcagaagaacttatgacatgttgctggacccagcacctagctacaggtgggattgtgacatatgcctgggacgtggtcactggtacaatgatgacacccacaaacttcaacccacaaaccaggagaaatattgattctgtctgctaggctttgggcaacagcagagacggggtttcaccacgttggccaggctggtcctgaactcctgacctcagatcaacttgtaactgctcctaatcaaagtgtagatgacaggcaacttgaaggtttgctcccaggttacaatcctcaagctttgcccaaataaacggtctacttacatt

SEQ ID NO: 9382 - DNA, 507 bp, Homo sapiens
gcaaatactacccattatttaagtccagaggagggcagctcacctgagtatccagctgcactgtaataatgacgaatctgggtggtagagccagaagcctcagcttaaatcctgacgctgccagaacctacatttggcttatgcaaaatttcctcaaagactggcagtgagggctaaataacttagcccctgaaagttctcagaatagtgtctggagtatagtaagttttcattaaatgttggctattaacattgagacttctgttagaccaaatataacagtccatacaacttgcagaatattgaaaacaaaatggtaaacatataaatgacagagggcaacttaattggaggttgtagagaaatatttagaatcattaaaaatgaaatcattttgaattttctattgtgttacatactaaaattaacattaggaaacaatgtgaagtaaaggtgtagagtgaaatggctaaacttattttcataaagtgaaagcatttcccttcc

SEQ ID NO: 9383 - DNA, 5142 bp, Homo sapiens
gccgccgctgcccggagcctgggctcggctacccccccgccggcccccaccgagcggagctctgcttcctcctcgccgcatccctgagggaagcgccgcctctgctcccgggttctccgcccgccgactccttcctggccggaccccgctgcgctccaccccagtggctggaggagcagctctccagtcagcctttgcagcccctctctttttccctttccaccgggcctcctcggatcccttggctgggcactgaggcgggggaagaggctggggtcgccacggcggaggttgctgccgccacccccctgcgggggtggccggggttcccggctgggggggtaccgttctgggtgaggcatccaccatggtgaggcccctgtgccgtgcccccgcgcccccccggccgccgctgcctcctgcccctcggtgctgctgttgctcccccgcctgctgttgctcctccatctccagatcggatcacggtgagggaaacgatgagcgaggagacggcgacttctgacaacgataatagttatgcacgagtgcgagctgtggtgatgacccgagatgactcaagtggtggatggttaccacttggagggagtggactaagcagcgtcactgtcttcaaagtccctcatcaggaagagaatggctgtgctgacttttttatccgtggagagcgactcagggacaaaatggtggttttggaatgtatgcttaaaaaagacctcatttataataaggtcactccaacatttcaccactggaagattgatgacaaaaagtttggtcttacgtttcaaagtcctgctgatgctaggggcttttgatagaggtatccgaagagctatagaggatatttctcaaggatgccccgaatcaaaaaatgaagctgaaggggcagatgacttacaagcaaatgaagaggattcttccagttctctagtgaaggatcacctttttcagcaagagacagttgttaccagtgagccttatagaagctcaaatataagaccttctccctttgaagatctgaatgccagaagagtctacatgcaaagccaagccaatcagataacatttggtcagccaggcttggacattcagagcagaagtatggaatacgtacagcggcaaatatccaaggaatgtggaagcctaaagtcccaaaatagggtccctttgaaatcaatcagacatgtcagctttcaagatgaggatgagattgtcagaataaaccctcgagatatcttaatacgtcgctatgcagactacagacatcctgacatgtggaaaaatgacttggaaagagatgatgctgattccagtattcagttttctaaaccagacagtaaaaaatcagactatctgtactcttgtggggatgagactaagttaagttcacccaaagactctgtggtatttaagacgcagccttcctcattaaaaattaagaagtcaaaacgaagaaaagaggatggtgaacgttctcgctgcgtatactgccaggaaaggtttaatcatgaagaaaatgtcaggggaaaatgtcaggatgctccagaccctattaaaagatgcatatatcaagttagttgcatgctctgtgcagagagcatgttgtatcattgtatgtcagactcagagggagatttttctgatccctgttcgtgtgacactagcgacgacaagttctgcttgcgatggttagccctggtagctttgtctttcattgtaccatgtatgtgctgctacgtccctttgagaatgtgccatcgctgtggtgaggcatgtggttgctgtggtgggaaacataaagctgctggatgaaatggtccagtgccaaaatgagcttaaaatctttgtttccaggaattagctaacttggatttgtggaagcttttggcaagcaatatggaatcttgcctggtatcattgagcccacacatggaggaagcagaactcatcagttcttggcgtttcacgccatgcctaacttttcccttgagtgcatggcatgttttgttacaggttgtagagtatttgcagaaggaaaccatttctggttatttggctataaaaagtcagcataaaatatgatccaactaaaagggattaatttttggcatttttgtatatttatgcattaggtgatgggacttttaaaggtttgaatttattaggacacgaactaaaaataaaagtgcactaggggacagttgatttcaatctaagaaaagttaacacttgggaattacaagaagtaaaacaagtgcaactaaatcatttattagttgttttttgaaagcagttttatgtataaataacaaatgtttatatttaactaaatgtaaggtacgaattattacatattaaacttttcttccccttcctagttctgaagtagatatatatatatatatatctactgtcacattccatatattttgaatatttaactcatctagttaataatgtttttattccatgcgaatgatttgatattttcatccttatttctctttggctacaatttatattgagttatatctgtacattctggtaatctaaaatccttaaaaatactctaatagccttgagtgaccaactttttttttaaagcacagatgtaattgtctaatgttctgatgggaacgtaacacttatttttatataaaaagagactgagtaaacaaacattatagaaaaaaagtgaagttttttagttgttttttgtggtattcaaccagcaagttgttttctttcagagtttcctccttcaaaaagttatattgcatttacaaatgttttacaaggcagaaagtttgactggatagttagtgtaaaagcttcatgttgagatcttcacgtatcattctgctaaaccagaatatgttcagctgtgttactaatttttcagcttaatcctcagtgcttattatttacataacaataactttttatcagttacattttatttttatttaaactggccaaaagcaaaattattttatgttaaaatgtgtgctaaactatcccaggaaagtatttaatccaacattgtaaatgaagtatcttgtacatataaatttatttcttttgcagagcattatattactggatgtttaatttacaaaatagttgggtaaatgttccaacaaactttaaagtaccttgaagtcaaattgtctgtttttgttttgttgttgttgttgttgttttcttaagtgttacattaaaactctaaccaaggaaagggttctttaagaacattcccttagagggataaagttgagaagtgtgccttttttttaatggcttgaagtttcagaggtgataaaaattaaaatcacactactatttgaagctcattttctatgcaggtttttaaacgtcatttatgtatcattctttttatatatcacacttaagcttgtgttagcttttttcttttgccccagatcaaactgaacaatgtatatacactatctgtctgtaaaatactttttttaagaaagcatttatatttatatgacagcttgaactgacaacattgtgtatatagatcatcttgaagtattatttcacattgaaaagaagaaaatatattgataactatagatgttatgaagaagagggtatttctagttttgtactaaaaatcaattggatgaactaaatccaaaacatgacactgtaggcagcagttttaagtcttatttttactgtttatatatttgaatgctgctacaacagatgatcttcatccctgaagttttcagctaaacttggtttcctagaatagactgttaactttcaaaatttttattggtgaaatggaaatactgtttttccttgtgaatgaattttcatatttgtaagtgctaagtttataattcaggtttgatcaaggtgtgaataactgaagaaaataacttgctggctatataggaaaatgctgtggaaatgaactgtgtatatacttctgggaggaacaaatttaatcatttcttctgttaagcactaatcagtatagtgcaactcctggttctgtactgtattttatatgcaacatatatgctttaatattttaatgtttgtgcattaatattttcaatttgtttaaccactttgctgctaagattttgccgtcccattcccattttttcctttacaattttaaacaagtttcttcattaaaaactatggtgatgaaatggtttttattttaccttggatctttatagttaacatacccagtttcttaatcagtctacaagactaactgatgatataatgttctctgaatccctatatggaaattttcttttgagtaaatgagaattcctttgtgaaagcaaatgggtagtttaaatcactgattcttaaacatgtgtataggcaccttcaggaacattttctcattctctgtacagattcggcactgccaattggcttttcctctaaaacttttctttgtttttatctgatataagcagatggctcaagacaactgcttgagtaatagtattgaaaatggaatcatctagacggcatgacaagcaagactggtctgatgaacttgttcagaattgataattcttaaatatttctcttggcttcaaaagggacatcatttgatttctgaagaagtatgtcgtgtggagcttcagcaccacctactggatgatttccaggccagagacatgagatggcaatagggatctgacagggttcatcactactaccattaaagggctatttatgtggtgaccacctctaccagggaaaccaggaataagaactgtctcaaaggaattgtaaaatggttatttacctaatgtgtcttgttggcttgctgaaagattttaagcacttttttcttacatatcctgttttaaaatatttgttgatatttgggactggcaatcaaacttaatggatgtactgaggcatttatagaaccagttgctttaactctcaaaagccattaccaaaatggtatttttttcctccttccgccagtcagggagaatttttaaaaataataatcaaaacatgaaaaaacataatcacacctgtattttatcatcactgcactccagcctgagtgacaagaacaagactccatttcaaaag

SEQ ID NO: 9384 - DNA, 3882 bp, Homo sapiens
gccgccgctgcccggagcctgggctcggctacccccccgccggcccccaccgagcggagctctgcttcctcctcgccgcatccctgagggaagcgccgcctctgctcccgggttctccgcccgccgactccttcctggccggaccccgctgcgctccaccccagtggctggaggagcagctctccagtcagcctttgcagcccctctctttttccctttccaccgggcctcctcggatcccttggctgggcactgaggcgggggaagaggctggggtcgccacggcggaggttgctgccgccacccccctgcgggggtggccggggttcccggctgggggggtaccgttctgggtgaggcatccaccatggtgaggcccctgtgccgtgcccccgcgcccccccggccgccgctgcctcctgcccctcggtgctgctgttgctcccccgcctgctgttgctcctccatctccagatcggatcacggtgagggaaacgatgagcgaggagacggcgacttctgacaacgataatagttatgcacgagtgcgagctgtggtgatgacccgagatgactcaagtggtggatggttaccacttggagggagtggactaagcagcgtcactgtcttcaaagtccctcatcaggaagagaatggctgtgctgacttttttatccgtggagagcgactcagggacaaaatggtggttttggaatgtatgcttaaaaaagacctcatttataataaggtcactccaacatttcaccactggaagattgatgacaaaaagtttggtcttacgtttcaaagtcctgctgatgctaggggcttttgatagaggtatccgaagagctatagaggatatttctcaaggatgccccgaatcaaaaaatgaagctgaaggggcagatgacttacaagcaaatgaagaggattcttccagttctctagtgaaggatcacctttttcagcaagagacagttgttaccagtgagccttatagaagctcaaatataagaccttctccctttgaagatctgaatgccagaagagtctacatgcaaagccaagccaatcagataacatttggtcagccaggcttggacattcagagcagaagtatggaatacgtacagcggcaaatatccaaggaatgtggaagcctaaagtcccaaaatagggtccctttgaaatcaatcagacatgtcagctttcaagatgaggatgagattgtcagaataaaccctcgagatatcttaatacgtcgctatgcagactacagacatcctgacatgtggaaaaatgacttggaaagagatgatgctgattccagtattcagttttctaaaccagacagtaaaaaatcagactatctgtactcttgtggggatgagactaagttaagttcacccaaagactctgtggtatttaagacgcagccttcctcattaaaaattaagaagtcaaaacgaagaaaagaggatggtgaacgttctcgctgcgtatactgccaggaaaggtttaatcatgaagaaaatgtcaggggaaaatgtcaggatgctccagaccctattaaaagatgcatatatcaagttagttgcatgctctgtgcagagagcatgttgtatcattgtatgtcagactcagagggagatttttctgatccctgttcgtgtgacactagcgacgacaagttctgcttgcgatggttagccctggtagctttgtctttcattgtaccatgtatgtgctgctacgtccctttgagaatgtgccatcgctgtggtgaggcatgtggttgctgtggtgggaaacataaagctgctggatgaaatggtccagtgccaaaatgagcttaaaatctttgtttccaggaattagctaacttggatttgtggaagcttttggcaagcaatatggaatcttgcctggtatcattgagcccacacatggaggaagcagaactcatcagttcttggcgtttcacgccatgcctaacttttcccttgagtgcatggcatgttttgttacaggttgtagagtatttgcagaaggaaaccatttctggttatttggctataaaaagtcagcataaaatatgatccaactaaaagggattaatttttggcatttttgtatatttatgcattaggtgatgggacttttaaaggtttgaatttattaggacacgaactaaaaataaaagtgcactaggggacagttgatttcaatctaagaaaagttaacacttgggaattacaagaagtaaaacaagtgcaactaaatcatttattagttgttttttgaaagcagttttatgtataaataacaaatgtttatatttaactaaatgtaaggtacgaattattacatattaaacttttcttccccttcctagttctgaagtagatatatatatatatatatctactgtcacattccatatattttgaatatttaactcatctagttaataatgtttttattccatgcgaatgatttgatattttcatccttatttctctttggctacaatttatattgagttatatctgtacattctggtaatctaaaatccttaaaaatactctaatagccttgagtgaccaactttttttttaaagcacagatgtaattgtctaatgttctgatgggaacgtaacacttatttttatataaaaagagactgagtaaacaaacattatagaaaaaaagtgaagttttttagttgttttttgtggtattcaaccagcaagttgttttctttcagagtttcctccttcaaaaagttatattgcatttacaaatgttttacaaggcagaaagtttgactggatagttagtgtaaaagcttcatgttgagatcttcacgtatcattctgctaaaccagaatatgttcagctgtgttactaatttttcagcttaatcctcagtgcttattatttacataacaataactttttatcagttacattttatttttatttaaactggccaaaagcaaaattattttatgttaaaatgtgtgctaaactatcccaggaaagtatttaatccaacattgtaaatgaagtatcttgtacatataaatttatttcttttgcagagcattatattactggatgtttaatttacaaaatagttgggtaaatgttccaacaaactttaaagtaccttgaagtcaaattgtctgtttttgttttgttgttgttgttgttgttttcttaagtgttacattaaaactctaaccaaggaaagggttctttaagaacattcccttagagggataaagttgagaagtgtgccttttttttaatggcttgaagtttcagaggtgataaaaattaaaatcacactactatttgaagctcattttctatgcaggtttttaaacgtcatttatgtatcattctttttatatatcacacttaagcttgtgttagcttttttcttttgccccagatcaaactgaacaatgtatatacactatctgtctgtaaaatactttttttaagaaagcatttatatttatatgacagcttgaactgacaacattgtgtatatagatcatcttgaagtattatttcacattgaaaagaagaaaatatattgataactatagatgttatgaagaagagggtatttctagttttgtactaaaaatcaattggatgaactaaatccaaaacatgacactgtaggcagcagttttaagtcttatttttatttaagaaatacatttaataaggctgtagctgccctaactagtgattcctctgaagagtctgggcaaagtctaattgaaaaccttctgggaagcatttagcattctagatgcctactaagaacattctgattcatgggaggcggtcgaatatgc

SEQ ID NO: 9385 - DNA, 3287 bp, Homo sapiens
tcccactgctcatcagtagcgacactgtttatatatttgaatgctgctacaacagatgatcttcatccctgaagttttcagctaaacttggtttcctagaatagactgttaactttcaaaatttttattggtgaaatggaaatactgtttttccttgtgaatgaattttcatatttgtaagtgctaagtttataattcaggtttgatcaaggtgtgaataactgaagaaaataacttgctggctatataggaaaatgctgtggaaatgaactgtgtatatacttctgggaggaacaaatttaatcatttcttctgttaagcactaatcagtatagtgcaactcctggttctgtactgtattttatatgcaacatatatgctttaatattttaatgtttgtgcattaatattttcaatttgtttaaccactttgctgctaagattttgccgtcccattcccattttttcctttacaattttaaacaagtttcttcattaaaaactatggtgatgaaatggtttttattttaccttggatctttatagttaacatacccagtttcttaatcagtctacaagactaactgatgatataatgttctctgaatccctatatggaaattttcttttgagtaaatgagaattcctttgtgaaagcaaatgggtagtttaaatcactgattcttaaacatgtgtataggcaccttcaggaacattttctcattctctgtacagattcggcactgccaattggcttttcctctaaaacttttctttgtttttatctgatataagcagatggctcaagacaactgcttgagtaatagtattgaaaatggaatcatctagacggcatgacaagcaagactggtctgatgaacttgttcagaattgataattcttaaatatttctcttggcttcaaaagggacatcatttgatttctgaagaagtatgtcgtgtggagcttcagcaccacctactggatgatttccaggccagagacatgagatggcaatagggatctgacagggttcatcactactaccattaaagggctatttatgtggtgaccacctctaccagggaaaccaggaataagaactgtctcaaaggaattgtaaaatggttatttacctaatgtgtcttgttggcttgctgaaagattttaagcacttttttcttacatatcctgttttaaaatatttgttgatatttgggactggcaatcaaacttaatggatgtactgaggcatttatagaaccagttgctttaactctcaaaagccattaccaaaatggtatttttttcctccttccgccagtcagggagaatttttaaaaataataatcaaaacatgaaaaaacataatcacacctgtattttatcatgacagcttcagagagtgtgtgtgtacgtttttctctcttttatttgagacggagtttcactcttgttgcccaggctggagtgcaatggtgcgatctcagctcactgcaacctccgcctcctgggttcaagcgattctcctgcctcagcctcccaagtagctgggattacaggcacccaccaccatgcccagctaagttttggtattttagtagagatggggtttcaccatgttggccaggctggtcttgaactcctgaccttaggtgatccacccacctcggcctcccaaagtgctgggattacaggcatgagctactgcgcccagccgtgtgtatgtttctgaaatgatgatggggtggggttaaaatctaaagggaaaaacttgaaactacctattttcattggttattcagcagtgcctaaaatgagcttttgaagtaatgtaaatgcactttcaattcatgtgtatagtgccatctgatatcttgggtaagtcttgctttttcttttctttttcctctcccctgcccccttaattaaatggcacggaaatgtttcttaatatgcacgtgagtctccagagtacaggaaatgtgctttcctctaaatggtcaatgtaaagaatcttaaggatatttcttgtgttgaaatttacattcgattttgtgattacacttggaaatatgtgttaaattgggtttttaattgtagcccaaaggtgcattaagcaagtgtaacattttttccacataaaacttagaaaactttagttacctgaaaagcaaggattctttactaattattatgctcattcttgatttgacttccatgttcacacttcaaagtgtaagaggaagcactagaaactggcattattgttgcactaaaaaagtctataaatcataatagcaccatgaggtgttttgcaatgagacaaacatgaagaatgaatttctttaagagagaaacacaaccggaggtgatttatataaaccaaaagaaaaaaaaaggctttaaggtattaggtactgtttgcctagcagccaggtggttataaaagattcatatgctttggtacactgataaatgttagccattattcctgaaagcttcttaaattgcatcagttgttttgaaattttttcaagaataaactagttgaaaagtctttgtattaaaaatacacatagatttttgtgaacatttccagtgtgtagtgtcgtttgctttctatttctgacctcaaaagtgcctcacttgtatattatttccattaaaagcttgactgcattctttctaatgaacaatgaaaaactgtttaactcatgtcataatgtgtctcctcagatatagttaactagcttgatagttttgagtatataatgtaaataatacataataagtttgtaaccatttctgttacttcatacccgtgtaattggacatagcagatgattatcataagaatttgttttaatggtttttttccctcctggaattacctgattaacctgtcatgaattataaaaggactttttcttattctcctagagcttatcaaattatcacataagagataattactggaggagaaagtaaaaatggaagcttttgataattagctctgttctttaaaagtatacttttaaactgaaagttcacatatagttcatcttaataacatatttattcatccttaattgtattcagatttttttttaagtctctaagctaataatgttatatttattggtttggtaacatgttgcagctaagctaatgaccttaagtggcaattgtttaacccaggactactgatttttttatattcaagtcagtttcatcgttttacttaactcgccatataaccaaaaataacgaataatctaaaggaa

SEQ ID NO: 9386 - DNA, 162 bp, Homo sapiens
cattgagggttgttcccaataggcaaatgaagaggattcttccagttctctagtgaaggatcacctttttcagcaagagacagttgttaccagtgagccttatagaagctcaaatataagaccttctccctttgaagatctgaatgccagaagagtctacat

SEQ ID NO: 9387 - DNA, 6991 bp, Homo sapiens
gccgccgctgcccggagcctgggctcggctacccccccgccggcccccaccgagcggagctctgcttcctcctcgccgcatccctgagggaagcgccgcctctgctcccgggttctccgcccgccgactccttcctggccggaccccgctgcgctccaccccagtggctggaggagcagctctccagtcagcctttgcagcccctctctttttccctttccaccgggcctcctcggatcccttggctgggcactgaggcgggggaagaggctggggtcgccacggcggaggttgctgccgccacccccctgcgggggtggccggggttcccggctgggggggtaccgttctgggtgaggcatccaccatggtgaggcccctgtgccgtgcccccgcgcccccccggccgccgctgcctcctgcccctcggtgctgctgttgctcccccgcctgctgttgctcctccatctccagatcggatcacggtgagggaaacgatgagcgaggagacggcgacttctgacaacgataatagttatgcacgagtgcgagctgtggtgatgacccgagatgactcaagtggtggatggttaccacttggagggagtggactaagcagcgtcactgtcttcaaagtccctcatcaggaagagaatggctgtgctgacttttttatccgtggagagcgactcagggacaaaatggtggttttggaatgtatgcttaaaaaagacctcatttataataaggtcactccaacatttcaccactggaagattgatgacaaaaagtttggtcttacgtttcaaagtcctgctgatgctaggggcttttgatagaggtatccgaagagctatagaggatatttctcaaggatgccccgaatcaaaaaatgaagctgaaggggcagatgacttacaagcaaatgaagaggattcttccagttctctagtgaaggatcacctttttcagcaagagacagttgttaccagtgagccttatagaagctcaaatataagaccttctccctttgaagatctgaatgccagaagagtctacatgcaaagccaagccaatcagataacatttggtcagccaggcttggacattcagagcagaagtatggaatacgtacagcggcaaatatccaaggaatgtggaagcctaaagtcccaaaatagggtccctttgaaatcaatcagacatgtcagctttcaagatgaggatgagattgtcagaataaaccctcgagatatcttaatacgtcgctatgcagactacagacatcctgacatgtggaaaaatgacttggaaagagatgatgctgattccagtattcagttttctaaaccagacagtaaaaaatcagactatctgtactcttgtggggatgagactaagttaagttcacccaaagactctgtggtatttaagacgcagccttcctcattaaaaattaagaagtcaaaacgaagaaaagaggatggtgaacgttctcgctgcgtatactgccaggaaaggtttaatcatgaagaaaatgtcaggggaaaatgtcaggatgctccagaccctattaaaagatgcatatatcaagttagttgcatgctctgtgcagagagcatgttgtatcattgtatgtcagactcagagggagatttttctgatccctgttcgtgtgacactagcgacgacaagttctgcttgcgatggttagccctggtagctttgtctttcattgtaccatgtatgtgctgctacgtccctttgagaatgtgccatcgctgtggtgaggcatgtggttgctgtggtgggaaacataaagctgctggatgaaatggtccagtgccaaaatgagcttaaaatctttgtttccaggaattagctaacttggatttgtggaagcttttggcaagcaatatggaatcttgcctggtatcattgagcccacacatggaggaagcagaactcatcagttcttggcgtttcacgccatgcctaacttttcccttgagtgcatggcatgttttgttacaggttgtagagtatttgcagaaggaaaccatttctggttatttggctataaaaagtcagcataaaatatgatccaactaaaagggattaatttttggcatttttgtatatttatgcattaggtgatgggacttttaaaggtttgaatttattaggacacgaactaaaaataaaagtgcactaggggacagttgatttcaatctaagaaaagttaacacttgggaattacaagaagtaaaacaagtgcaactaaatcatttattagttgttttttgaaagcagttttatgtataaataacaaatgtttatatttaactaaatgtaaggtacgaattattacatattaaacttttcttccccttcctagttctgaagtagatatatatatatatatatctactgtcacattccatatattttgaatatttaactcatctagttaataatgtttttattccatgcgaatgatttgatattttcatccttatttctctttggctacaatttatattgagttatatctgtacattctggtaatctaaaatccttaaaaatactctaatagccttgagtgaccaactttttttttaaagcacagatgtaattgtctaatgttctgatgggaacgtaacacttatttttatataaaaagagactgagtaaacaaacattatagaaaaaaagtgaagttttttagttgttttttgtggtattcaaccagcaagttgttttctttcagagtttcctccttcaaaaagttatattgcatttacaaatgttttacaaggcagaaagtttgactggatagttagtgtaaaagcttcatgttgagatcttcacgtatcattctgctaaaccagaatatgttcagctgtgttactaatttttcagcttaatcctcagtgcttattatttacataacaataactttttatcagttacattttatttttatttaaactggccaaaagcaaaattattttatgttaaaatgtgtgctaaactatcccaggaaagtatttaatccaacattgtaaatgaagtatcttgtacatataaatttatttcttttgcagagcattatattactggatgtttaatttacaaaatagttgggtaaatgttccaacaaactttaaagtaccttgaagtcaaattgtctgtttttgttttgttgttgttgttgttgttttcttaagtgttacattaaaactctaaccaaggaaagggttctttaagaacattcccttagagggataaagttgagaagtgtgccttttttttaatggcttgaagtttcagaggtgataaaaattaaaatcacactactatttgaagctcattttctatgcaggtttttaaacgtcatttatgtatcattctttttatatatcacacttaagcttgtgttagcttttttcttttgccccagatcaaactgaacaatgtatatacactatctgtctgtaaaatactttttttaagaaagcatttatatttatatgacagcttgaactgacaacattgtgtatatagatcatcttgaagtattatttcacattgaaaagaagaaaatatattgataactatagatgttatgaagaagagggtatttctagttttgtactaaaaatcaattggatgaactaaatccaaaacatgacactgtaggcagcagttttaagtcttatttttactgtttatatatttgaatgctgctacaacagatgatcttcatccctgaagttttcagctaaacttggtttcctagaatagactgttaactttcaaaatttttattggtgaaatggaaatactgtttttccttgtgaatgaattttcatatttgtaagtgctaagtttataattcaggtttgatcaaggtgtgaataactgaagaaaataacttgctggctatataggaaaatgctgtggaaatgaactgtgtatatacttctgggaggaacaaatttaatcatttcttctgttaagcactaatcagtatagtgcaactcctggttctgtactgtattttatatgcaacatatatgctttaatattttaatgtttgtgcattaatattttcaatttgtttaaccactttgctgctaagattttgccgtcccattcccattttttcctttacaattttaaacaagtttcttcattaaaaactatggtgatgaaatggtttttattttaccttggatctttatagttaacatacccagtttcttaatcagtctacaagactaactgatgatataatgttctctgaatccctatatggaaattttcttttgagtaaatgagaattcctttgtgaaagcaaatgggtagtttaaatcactgattcttaaacatgtgtataggcaccttcaggaacattttctcattctctgtacagattcggcactgccaattggcttttcctctaaaacttttctttgtttttatctgatataagcagatggctcaagacaactgcttgagtaatagtattgaaaatggaatcatctagacggcatgacaagcaagactggtctgatgaacttgttcagaattgataattcttaaatatttctcttggcttcaaaagggacatcatttgatttctgaagaagtatgtcgtgtggagcttcagcaccacctactggatgatttccaggccagagacatgagatggcaatagggatctgacagggttcatcactactaccattaaagggctatttatgtggtgaccacctctaccagggaaaccaggaataagaactgtctcaaaggaattgtaaaatggttatttacctaatgtgtcttgttggcttgctgaaagattttaagcacttttttcttacatatcctgttttaaaatatttgttgatatttgggactggcaatcaaacttaatggatgtactgaggcatttatagaaccagttgctttaactctcaaaagccattaccaaaatggtatttttttcctccttccgccagtcagggagaatttttaaaaataataatcaaaacatgaaaaaacataatcacacctgtattttatcatgacagcttcagagagtgtgtgtgtacgtttttctctcttttatttgagacggagtttcactcttgttgcccaggctggagtgcaatggtgcgatctcagctcactgcaacctccgcctcctgggttcaagcgattctcctgcctcagcctcccaagtagctgggattacaggcacccaccaccatgcccagctaagttttggtattttagtagagatggggtttcaccatgttggccaggctggtcttgaactcctgaccttaggtgatccacccacctcggcctcccaaagtgctgggattacaggcatgagctactgcgcccagccgtgtgtatgtttctgaaatgatgatggggtggggttaaaatctaaagggaaaaacttgaaactacctattttcattggttattcagcagtgcctaaaatgagcttttgaagtaatgtaaatgcactttcaattcatgtgtatagtgccatctgatatcttgggtaagtcttgctttttcttttctttttcctctcccctgcccccttaattaaatggcacggaaatgtttcttaatatgcacgtgagtctccagagtacaggaaatgtgctttcctctaaatggtcaatgtaaagaatcttaaggatatttcttgtgttgaaatttacattcgattttgtgattacacttggaaatatgtgttaaattgggtttttaattgtagcccaaaggtgcattaagcaagtgtaacattttttccacataaaacttagaaaactttagttacctgaaaagcaaggattctttactaattattatgctcattcttgatttgacttccatgttcacacttcaaagtgtaagaggaagcactagaaactggcattattgttgcactaaaaaagtctataaatcataatagcaccatgaggtgttttgcaatgagacaaacatgaagaatgaatttctttaagagagaaacacaaccggaggtgatttatataaaccaaaagaaaaaaaaaggctttaaggtattaggtactgtttgcctagcagccaggtggttataaaagattcatatgctttggtacactgataaatgttagccattattcctgaaagcttcttaaattgcatcagttgttttgaaattttttcaagaataaactagttgaaaagtctttgtattaaaaatacacatagatttttgtgaacatttccagtgtgtagtgtcgtttgctttctatttctgacctcaaaagtgcctcacttgtatattatttccattaaaagcttgactgcattctttctaatgaacaatgaaaaactgtttaactcatgtcataatgtgtctcctcagatatagttaactagcttgatagttttgagtatataatgtaaataatacataataagtttgtaaccatttctgttacttcatacccgtgtaattggacatagcagatgattatcataagaatttgttttaatggtttttttccctcctggaattacctgattaacctgtcatgaattataaaaggactttttcttattctcctagagcttatcaaattatcacataagagataattactggaggagaaagtaaaaatggaagcttttgataattagctctgttctttaaaagtatacttttaaactgaaagttcacatatagttcatcttaataacatatttattcatccttaattgtattcagatttttttttaagtctctaagctaataatgttatatttattggtttggtaacatgttgcagctaagctaatgaccttaagtggcaattgtttaacccaggactactgatttttttatattcaagtcagtttcatcgttttacttaactcgccatataaccaaaaataacgaataatctaaaggaa

SEQ ID NO: 9388 - DNA, 4582 bp, Homo sapiens
gccgccgctgcccggagcctgggctcggctacccccccgccggcccccaccgagcggagctctgcttcctcctcgccgcatccctgagggaagcgccgcctctgctcccgggttctccgcccgccgactccttcctggccggaccccgctgcgctccaccccagtggctggaggagcagctctccagtcagcctttgcagcccctctctttttccctttccaccgggcctcctcggatcccttggctgggcactgaggcgggggaagaggctggggtcgccacggcggaggttgctgccgccacccccctgcgggggtggccggggttcccggctgggggggtaccgttctgggtgaggcatccaccatggtgaggcccctgtgccgtgcccccgcgcccccccggccgccgctgcctcctgcccctcggtgctgctgttgctcccccgcctgctgttgctcctccatctccagatcggatcacggtgagggaaacgatgagcgaggagacggcgacttctgacaacgataatagttatgcacgagtgcgagctgtggtgatgacccgagatgactcaagtggtggatggttaccacttggagggagtggactaagcagcgtcactgtcttcaaagtccctcatcaggaagagaatggctgtgctgacttttttatccgtggagagcgactcagggacaaaatggtggttttggaatgtatgcttaaaaaagacctcatttataataaggtcactccaacatttcaccactggaagattgatgacaaaaagtttggtcttacgtttcaaagtcctgctgatgctaggggcttttgatagaggtatccgaagagctatagaggatatttctcaaggatgccccgaatcaaaaaatgaagctgaaggggcagatgacttacaagcaaatgaagaggattcttccagttctctagtgaaggatcacctttttcagcaagagacagttgttaccagtgagccttatagaagctcaaatataagaccttctccctttgaagatctgaatgccagaagagtctacatgcaaagccaagccaatcagataacatttggtcagccaggcttggacattcagagcagaagtatggaatacgtacagcggcaaatatccaaggaatgtggaagcctaaagtcccaaaatagggtccctttgaaatcaatcagacatgtcagctttcaagatgaggatgagattgtcagaataaaccctcgagatatcttaatacgtcgctatgcagactacagacatcctgacatgtggaaaaatgacttggaaagagatgatgctgattccagtattcagttttctaaaccagacagtaaaaaatcagactatctgtactcttgtggggatgagactaagttaagttcacccaaagactctgtggtatttaagacgcagccttcctcattaaaaattaagaagtcaaaacgaagaaaagaggatggtgaacgttctcgctgcgtatactgccaggaaaggtttaatcatgaagaaaatgtcaggggaaaatgtcaggatgctccagaccctattaaaagatgcatatatcaagttagttgcatgctctgtgcagagagcatgttgtatcattgtatgtcagactcagagggagatttttctgatccctgttcgtgtgacactagcgacgacaagttctgcttgcgatggttagccctggtagctttgtctttcattgtaccatgtatgtgctgctacgtccctttgagaatgtgccatcgctgtggtgaggcatgtggttgctgtggtgggaaacataaagctgctggatgaaatggtccagtgccaaaatgagcttaaaatctttgtttccaggaattagctaacttggatttgtggaagcttttggcaagcaatatggaatcttgcctggtatcattgagcccacacatggaggaagcagaactcatcagttcttggcgtttcacgccatgcctaacttttcccttgagtgcatggcatgttttgttacaggttgtagagtatttgcagaaggaaaccatttctggttatttggctataaaaagtcagcataaaatatgatccaactaaaagggattaatttttggcatttttgtatatttatgcattaggtgatgggacttttaaaggtttgaatttattaggacacgaactaaaaataaaagtgcactaggggacagttgatttcaatctaagaaaagttaacacttgggaattacaagaagtaaaacaagtgcaactaaatcatttattagttgttttttgaaagcagttttatgtataaataacaaatgtttatatttaactaaatgtaaggtacgaattattacatattaaacttttcttccccttcctagttctgaagtagatatatatatatatatatctactgtcacattccatatattttgaatatttaactcatctagttaataatgtttttattccatgcgaatgatttgatattttcatccttatttctctttggctacaatttatattgagttatatctgtacattctggtaatctaaaatccttaaaaatactctaatagccttgagtgaccaactttttttttaaagcacagatgtaattgtctaatgttctgatgggaacgtaacacttatttttatataaaaagagactgagtaaacaaacattatagaaaaaaagtgaagttttttagttgttttttgtggtattcaaccagcaagttgttttctttcagagtttcctccttcaaaaagttatattgcatttacaaatgttttacaaggcagaaagtttgactggatagttagtgtaaaagcttcatgttgagatcttcacgtatcattctgctaaaccagaatatgttcagctgtgttactaatttttcagcttaatcctcagtgcttattatttacataacaataactttttatcagttacattttatttttatttaaactggccaaaagcaaaattattttatgttaaaatgtgtgctaaactatcccaggaaagtatttaatccaacattgtaaatgaagtatcttgtacatataaatttatttcttttgcagagcattatattactggatgtttaatttacaaaatagttgggtaaatgttccaacaaactttaaagtaccttgaagtcaaattgtctgtttttgttttgttgttgttgttgttgttttcttaagtgttacattaaaactctaaccaaggaaagggttctttaagaacattcccttagagggataaagttgagaagtgtgccttttttttaatggcttgaagtttcagaggtgataaaaattaaaatcacactactatttgaagctcattttctatgcaggtttttaaacgtcatttatgtatcattctttttatatatcacacttaagcttgtgttagcttttttcttttgccccagatcaaactgaacaatgtatatacactatctgtctgtaaaatactttttttaagaaagcatttatatttatatgacagcttgaactgacaacattgtgtatatagatcatcttgaagtattatttcacattgaaaagaagaaaatatattgataactatagatgttatgaagaagagggtatttctagttttgtactaaaaatcaattggatgaactaaatccaaaacatgacactgtaggcagcagttttaagtcttatttttactgtttatatatttgaatgctgctacaacagatgatcttcatccctgaagttttcagctaaacttggtttcctagaatagactgttaactttcaaaatttttattggtgaaatggaaatactgtttttccttgtgaatgaattttcatatttgtaagtgctaagtttataattcaggtttgatcaaggtgtgaataactgaagaaaataacttgctggctatataggaaaatgctgtggaaatgaactgtgtatatacttctgggaggaacaaatttaatcatttcttctgttaagcactaatcagtatagtgcaactcctggttctgtactgtattttatatgcaacatatatgctttaatattttaatgtttgtgcattaatattttcaatttgtttaaccactttgctgctaagattttgccgtcccattcccattttttcctttacaattttaaacaagtttcttcattaaaaactatggcaaaaaaaaaaaaaaaaaaaaaaaaacaaacaatgtgtgggggcacgcccgctgggaccactggaaaaagagctttcctaaacaccaatctcggttggggggcgcggggccaccaggtgggggtacaagcggcacacgggcgccaaaaacgcgtgggtcccaagaggaaaaaccggggacacgcgaacagagggctgtgggatttttcaccaattataaaaaggcgccgcggggggggcacaaccgagggtgtgttcttgtagaagaaatttcccagagggggcggttcgagaaggggacacaaaacggggggtctctatttcacacgcgggggttgctcacgaggagaaggtcgaaatacttcacattc

SEQ ID NO: 9389 - DNA, 1769 bp, Homo sapiens
  misc_feature (1735)..(1735): n is a, c, g, or t
  misc_feature (1738)..(1738): n is a, c, g, or t
gccgccgctgcccggagcctgggctcggctacccccccgccggcccccaccgagcggagctctgcttcctcctcgccgcatccctgagggaagcgccgcctctgctcccgggttctccgcccgccgactccttcctggccggaccccgctgcgctccaccccagtggctggaggagcagctctccagtcagcctttgcagcccctctctttttccctttccaccgggcctcctcggatcccttggctgggcactgaggcgggggaagaggctggggtcgccacggcggaggttgctgccgccacccccctgcgggggtggccggggttcccggctgggggggtaccgttctgggtgaggcatccaccatggtgaggcccctgtgccgtgcccccgcgcccccccggccgccgctgcctcctgcccctcggtgctgctgttgctcccccgcctgctgttgctcctccatctccagatcggatcacggtgagggaaacgatgagcgaggagacggcgacttctgacaacgataatagttatgcacgagtgcgagctgtggtgatgacccgagatgactcaagtggtggatggttaccacttggagggagtggactaagcagcgtcactgtcttcaaagtccctcatcaggaagagaatggctgtgctgacttttttatccgtggagagcgactcagggacaaaatggtggttttggaatgtatgcttaaaaaagacctcatttataataaggtcactccaacatttcaccactggaagattgatgacaaaaagtttggtcttacgtttcaaagtcctgctgatgctaggggcttttgatagaggtatccgaagagctatagaggatatttctcaaggatgccccgaatcaaaaaatgaagctgaaggggcagatgacttacaagcaaatgaagaggattcttccagttctctagtgaaggatcacctttttcagcaagagacagttgttaccagtgagccttatagaagctcaaatataagaccttctccctttgaagatctgaatgccagaagagtctacatgcaaagccaagccaatcagataacatttggtcagccaggcttggacattcagagcagaagtatggaatacgtacagcggcaaatatccaaggaatgtggaagcctaaagtcccaaaatagggtccctttgaaatcaatcagacatgtcagctttcaagatgaggatgagattgtcagaataaaccctcgagatatcttaatacgtcgctatgcagactacagacatcctgacatgtggaaaaatgacttggaaagagatgatgctgattccagtattcagttttctaaaccagacagtaaaaaatcagactatctgtactcttgtggggatgagactaaaggtttttcagaatttgctttacattcttcacatcaagttaatacccacaaagacaaggtgatgctgtgttacccaagctagtttcgaactcctgggctcaagcaatccttctacttcgacctccccaaagtgctgagatgactggcatgagccaccgcacccggccaggactactactgaaacatgtttcccacaatgagattagtattctctcaaaattactggttctgttaacctggaaataatttataataaccaagatgctatgtgcaattaggaagaaaggaggacaaagaattccagaatattcagtattgaaatgtcaagactattnacnataaaatttaaattaaaatttaacttaaaaa

SEQ ID NO: 9390 - DNA, 2055 bp, Homo sapiens
  misc_feature (2)..(3): n is a, c, g, or t
gnncccgcgccgccgcgggtggccgcgcgggtgaagccggaagcagcagccaggagggcggggccgcgtagggcccactggccagggagggcgccgcgcggaggcgcggggcgtgtctcctgtcaaaagccatgctcggcaggtctgggtaccgggcgctgcccctgggtgattttgaccgcttccagcagtcgagcttcggctttctgggctcgcagaagggctgcttgtccccggagcggggcggcgtggggacaggggccgatgtaccccagagctggccctcctgcctctgtcatggcctcatcagtttcctggggttcttgctgctgttggtcaccttccccatttctggctggtttgccctgaagattgtgcccacctacgagcggatgattgtgttccgcctgggccggatccgcaccccccagggacctggcatggttctgctcttgcccttcattgactcctttcagagggtggatctgaggacacgagccttcaacgtccctccctgcaagctggcctctaaggacggggctgtgctgtccgtgggagccgatgtccagtttcgcatctgggacccggtgctgtcggtgatgactgtgaaagacctgaacacagccacacgcatgacagcccagaacgccatgaccaaggccctgctcaagaggccgctgcgggagatccagatggagaagctcaagatcagcgaccagcttctgctggagatcaacgatgtgaccagggcctgggggctggaggtagaccgcgtggagctggcagtggaggccgtgctccagccgccccaggacagcccagctgggcccaacctggacagcaccctccagcagctggccctgcacttcctgggaggaagcatgaactcaatggcaggaggtgccccgtccccggggccagcagacaccgtggagatggtgagtgaagttgagccacctgcccctcaagttggtgccaggtccagtccgaagcagcctctggcggaggggctactgactgctctacagcccttcctgtctgaggccctggtcagccaagtcggggcctgctaccagttcaatgtcgtcctgcccagcggcacccaaagcgcctacttcctggacctcactacaggacgaggaagagtgggacacggggtgcctgatggcatccctgatgtggtggtggagatggccgaggcagacctgcgggccctgctatgcagagagctgcggcccctgggggcctacatgagtggacggctgaaggtgaagggcgacctggctatggccatgaagctggaggctgtcctcagggccttgaagtagcagccttggctgactttccagagcccagtcccaagcctggcaccaagcctgaggggcctcttggaggaggaggtgttcatctgcaccacagagagttgaggccctaacaaatttcaggcccagccaagagcccatgaatggaggctgcaggaggctgagtccggctgccatgcacgtctcccctacagtggttctctggacaaggctttgtccatcccggtccccagctgagtgcccagcgctgagctgggtgcacggtgtgattccaggaggagagccaggcctgccctgccctgctggcttcctgactggagagacaggacccacagaaacagcctgacagcagctggtttggtccttgtgtgagggaccaagcatgtggcccaggctctaagctctgcggggattggagagggatggggagggaagggaaggcagctccaagaagaggtccctgtggcgaagttacctggggatcctggctggcccaccttcctggctgcagtccaggcccgtgctggcgggattgggcatgggaaggagcagggcctgctgcttccctggcgctgctcccaaagatttctgactcatctgccagctctgtcctgcatgcctggcgagctggggcccagggcagcatgaaggagagccctgcgttctgtgcttcttaccagaggtttgcaagcctcagacaaataaatgtggtgtttacaatgtaaaaaaaaga

SEQ ID NO: 9391 - DNA, 1267 bp, Homo sapiens
  misc_feature (2)..(3): n is a, c, g, or t
gnncccgcgccgccgcgggtggccgcgcgggtgaagccggaagcagcagccaggagggcggggccgcgtagggcccactggccagggagggcgccgcgcggaggcgcggggcgtgtctcctgtcaaaagccatgctcggcaggtctgggtaccgggcgctgcccctgggtgattttgaccgcttccagcagtcgagcttcggctttctgggctcgcagaagggctgcttgtccccggagcggggcggcgtggggacaggggccgatgtaccccagagctggccctcctgcctctgtcatggcctcatcagtttcctggggttcttgctgctgttggtcaccttccccatttctggctggtttgccctgaagctggcctctaaggacggggctgtgctgtccgtgggagccgatgtccagtttcgcatctgggacccggtgctgtcggtgatgactgtgaaagacctgaacacagccacacgcatgacagcccagaacgccatgaccaaggccctgctcaagaggccgctgcgggagatccagatggagaagctcaagatcagcgaccagcttctgctggagatcaacgatgtgaccagggcctgggggctggaggtagaccgcgtggagctggcagtggaggccgtgctccagccgccccaggacagcccagctgggcccaacctggacagcaccctccagcagctggccctgcacttcctgggaggaagcatgaactcaatggcaggaggtgccccgtccccggggccaggacgaggaacaagtgggacaccgggggttcctgttgggcatcccctgatgttgttggttggacgatgtccgatggctgacttggctgcgcctgcctatgcgcacgactgctggcctggctggcccacattagcttggcgggttaaggtcactggtgagccttgctttcgccctcgctggaggggggcccaagcgatgtgcagaaacaaccagggcgtcgactacagagacccaatcacaagacggagccaaccctcttgggccctgatagagaaagagagcatgtcaccaaagaagtgacccgacaaaaataggcaccagcaaacacccaatgtggacgagcgaacacaacttagcagcacccacacaacgagagcagaaagacagcacgcgacccagcacagcgctacagtagacaacaaaaccatccgcagtcagagacacacagcagtagctacaccactcctagtcgatatagcagcgctcatgacgacaaa

SEQ ID NO: 9392 - DNA, 1905 bp, Homo sapiens
  misc_feature (2)..(3): n is a, c, g, or t
gnncccgcgccgccgcgggtggccgcgcgggtgaagccggaagcagcagccaggagggcggggccgcgtagggcccactggccagggagggcgccgcgcggaggcgcggggcgtgtctcctgtcaaaagccatgctcggcaggtctgggtaccgggcgctgcccctgggtgattttgaccgcttccagcagtcgagcttcggctttctgggctcgcagaagggctgcttgtccccggagcggggcggcgtggggacaggggccgatgtaccccagagctggccctcctgcctctgtcatggcctcatcagtttcctggggttcttgctgctgttggtcaccttccccatttctggctggtttgccctgaagctggcctctaaggacggggctgtgctgtccgtgggagccgatgtccagtttcgcatctgggacccggtgctgtcggtgatgactgtgaaagacctgaacacagccacacgcatgacagcccagaacgccatgaccaaggccctgctcaagaggccgctgcgggagatccagatggagaagctcaagatcagcgaccagcttctgctggagatcaacgatgtgaccagggcctgggggctggaggtagaccgcgtggagctggcagtggaggccgtgctccagccgccccaggacagcccagctgggcccaacctggacagcaccctccagcagctggccctgcacttcctgggaggaagcatgaactcaatggcaggaggtgccccgtccccggggccagcagacaccgtggagatggtgagtgaagttgagccacctgcccctcaagttggtgccaggtccagtccgaagcagcctctggcggaggggctactgactgctctacagcccttcctgtctgaggccctggtcagccaagtcggggcctgctaccagttcaatgtcgtcctgcccagcggcacccaaagcgcctacttcctggacctcactacaggacgaggaagagtgggacacggggtgcctgatggcatccctgatgtggtggtggagatggccgaggcagacctgcgggccctgctatgcagagagctgcggcccctgggggcctacatgagtggacggctgaaggtgaagggcgacctggctatggccatgaagctggaggctgtcctcagggccttgaagtagcagccttggctgactttccagagcccagtcccaagcctggcaccaagcctgaggggcctcttggaggaggaggtgttcatctgcaccacagagagttgaggccctaacaaatttcaggcccagccaagagcccatgaatggaggctgcaggaggctgagtccggctgccatgcacgtctcccctacagtggttctctggacaaggctttgtccatcccggtccccagctgagtgcccagcgctgagctgggtgcacggtgtgattccaggaggagagccaggcctgccctgccctgctggcttcctgactggagagacaggacccacagaaacagcctgacagcagctggtttggtccttgtgtgagggaccaagcatgtggcccaggctctaagctctgcggggattggagagggatggggagggaagggaaggcagctccaagaagaggtccctgtggcgaagttacctggggatcctggctggcccaccttcctggctgcagtccaggcccgtgctggcgggattgggcatgggaaggagcagggcctgctgcttccctggcgctgctcccaaagatttctgactcatctgccagctctgtcctgcatgcctggcgagctggggcccagggcagcatgaaggagagccctgcgttctgtgcttcttaccagaggtttgcaagcctcagacaaataaatgtggtgtttacaatgtaaaaaaaaga

SEQ ID NO: 9393 - DNA, 1840 bp, Homo sapiens
gcggggaggaggtagaggcggagagctgcagacctaccgctgacttacgatgtaccccagagctggccctcctgcctctgtcatggcctcatcagtttcctggggttcttgctgctgttggtcaccttccccatttctggctggtttgccctgaagattgtgcccacctacgagcggatgattgtgttccgcctgggccggatccgcaccccccagggacctggcatggttctgctcttgcccttcattgactcctttcagagggtggatctgaggacacgagccttcaacgtccctccctgcaagctggcctctaaggacggggctgtgctgtccgtgggagccgatgtccagtttcgcatctgggacccggtgctgtcggtgatgactgtgaaagacctgaacacagccacacgcatgacagcccagaacgccatgaccaaggccctgctcaagaggccgctgcgggagatccagatggagaagctcaagatcagcgaccagcttctgctggagatcaacgatgtgaccagggcctgggggctggaggtagaccgcgtggagctggcagtggaggccgtgctccagccgccccaggacagcccagctgggcccaacctggacagcaccctccagcagctggccctgcacttcctgggaggaagcatgaactcaatggcaggaggtgccccgtccccggggccagcagacaccgtggagatggtgagtgaagttgagccacctgcccctcaagttggtgccaggtccagtccgaagcagcctctggcggaggggctactgactgctctacagcccttcctgtctgaggccctggtcagccaagtcggggcctgctaccagttcaatgtcgtcctgcccagcggcacccaaagcgcctacttcctggacctcactacaggacgaggaagagtgggacacggggtgcctgatggcatccctgatgtggtggtggagatggccgaggcagacctgcgggccctgctatgcagagagctgcggcccctgggggcctacatgagtggacggctgaaggtgaagggcgacctggctatggccatgaagctggaggctgtcctcagggccttgaagtagcagccttggctgactttccagagcccagtcccaagcctggcaccaagcctgaggggcctcttggaggaggaggtgttcatctgcaccacagagagttgaggccctaacaaatttcaggcccagccaagagcccatgaatggaggctgcaggaggctgagtccggctgccatgcacgtctcccctacagtggttctctggacaaggctttgtccatcccggtccccagctgagtgcccagcgctgagctgggtgcacggtgtgattccaggaggagagccaggcctgccctgccctgctggcttcctgactggagagacaggacccacagaaacagcctgacagcagctggtttggtccttgtgtgagggaccaagcatgtggcccaggctctaagctctgcggggattggagagggatggggagggaagggaaggcagctccaagaagaggtccctgtggcgaagttacctggggatcctggctggcccaccttcctggctgcagtccaggcccgtgctggcgggattgggcatgggaaggagcagggcctgctgcttccctggcgctgctcccaaagatttctgactcatctgccagctctgtcctgcatgcctggcgagctggggcccagggcagcatgaaggagagccctgcgttctgtgcttcttaccagaggtttgcaagcctcagacaaataaatgtggtgtttacaatgtaaaaaaaaga

SEQ ID NO: 9394 - DNA, 2198 bp, Homo sapiens
  misc_feature (2)..(3): n is a, c, g, or t
gnncccgcgccgccgcgggtggccgcgcgggtgaagccggaagcagcagccaggagggcggggccgcgtagggcccactggccagggagggcgccgcgcggaggcgcggggcgtgtctcctgtcaaaagccatgctcggcaggtctgggtaccgggcgctgcccctgggtgattttgaccgcttccagcagtcgagcttcggctttctgggctcgcagaagggctgcttgtccccggagcggggcggcgtggggacaggggccgatgtaccccagagctggccctcctgcctctgtcatggcctcatcagtttcctggggttcttgctgctgttggtcaccttccccatttctggctggtttgccctgaagattgtgcccacctacgagcggatgattgtgttccgcctgggccggatccgcaccccccagggacctggcatggttctgctcttgcccttcattgactcctttcagagggtggatctgaggacacgagccttcaacgtccctccctgcaagctggcctctaaggacggggctgtgctgtccgtgggagccgatgtccagtttcgcatctgggacccggtgctgtcggtgatgactgtgaaagacctgaacacagccacacgcatgacagcccagaacgccatgaccaaggccctgctcaagaggccgctgcgggagatccagatggagaagctcaagatcagcgaccagcttctgctggagatcaacgatgtgaccagggcctgggggctggaggtagaccgcgtggagctggcagtggaggccgtgctccagccgccccaggacagcccagctgggcccaacctggacagcaccctccagcagctggccctgcacttcctgggaggaagcatgaactcaatggcaggaggtgccccgtccccggggccagcagacaccgtggagatggtgagtgaagttgagccacctgcccctcaagttggtgccaggtccagtccgaagcagcctctggcggaggggctactgactgctctacagcccttcctgtctgaggccctggtcagccaagtcggggcctgctaccagttcaatgtcgtcctgcccagcggcacccaaagcgcctacttcctggacctcactacaggacgaggaagagtgggacacggggtgcctgatggcatccctgatgtggtggtggagatggccgaggcagacctgcgggccctgctatgcagagagctgcggcccctgggggcctacatgagtggacggctgaaggtgaagggcgacctggctatggccatgaagctggaggctgtcctcagggccttgaagtagcagccttggctgactttccagagcccagtcccaagcctggcaccaagcctgaggggcctcttggaggaggaggtgttcatctgcaccacagagagttgaggccctaacaaatttcaggcccagccaagagcccatgaatggaggctgcaggaggctgagtccggctgccatgcacgtctcccctacagtggttctctggacaaggctttgtccatcccggtccccagctgagtgcccagcgctgagctgggtgcacggtgtgattccaggaggagagccaggcctgccctgccctgctggcttcctgactggagagacaggacccacagaaacagcctgacagcagctggtttggtccttgtgtgagggaccaagcatgtggcccaggctctaagctctgcggggattggagagggatggggagggaagggaaggcagctccaagaagaggtccctgtggcgaagttacctggggatcctggctggcccaccttcctggctgcagtccaggcccgtgctggcgggattgggcatgggaaggagcagggcctgctgcttccctggcgctgctcccaaagatttctgactcatctgccagctctgtcctgcatgcctggcgagctggggcccagggcagcatgaaggagagccctgcgttctgtgcttcttaccagaggtttgcaagcctcagacaaataaatgtggtgtttacaatgtaaaaaaaagacttcagtcatcccagcaatcgcttggttcagtttcattcagctctctatggaccagtaatctgataaataaccgagctcttctttggggatcactacttcttgacttgtagtaactgccaccaatcaagcagtctctcccctg

SEQ ID NO: 9395 - DNA, 1999 bp, Homo sapiens
atttgtcctcggctcttatcagccctttaggcctgggaagacgtttcaggtttctatttcgcatagaagaaaccgaggtctaggcagaggaggccaccagcaccctaaaggcacctgctgcagggaaatggaagaattttcgccctagggggcacctctagaagcccgggaactaggcatctcctggatgtgcaggccaaaatgacagatgtaccccagagctggccctcctgcctctgtcatggcctcatcagtttcctggggttcttgctgctgttggtcaccttccccatttctggctggtttgccctgaagattgtgcccacctacgagcggatgattgtgttccgcctgggccggatccgcaccccccagggacctggcatggttctgctcttgcccttcattgactcctttcagagggtggatctgaggacacgagccttcaacgtccctccctgcaagctggcctctaaggacggggctgtgctgtccgtgggagccgatgtccagtttcgcatctgggacccggtgctgtcggtgatgactgtgaaagacctgaacacagccacacgcatgacagcccagaacgccatgaccaaggccctgctcaagaggccgctgcgggagatccagatggagaagctcaagatcagcgaccagcttctgctggagatcaacgatgtgaccagggcctgggggctggaggtagaccgcgtggagctggcagtggaggccgtgctccagccgccccaggacagcccagctgggcccaacctggacagcaccctccagcagctggccctgcacttcctgggaggaagcatgaactcaatggcaggaggtgccccgtccccggggccagcagacaccgtggagatggtgagtgaagttgagccacctgcccctcaagttggtgccaggtccagtccgaagcagcctctggcggaggggctactgactgctctacagcccttcctgtctgaggccctggtcagccaagtcggggcctgctaccagttcaatgtcgtcctgcccagcggcacccaaagcgcctacttcctggacctcactacaggacgaggaagagtgggacacggggtgcctgatggcatccctgatgtggtggtggagatggccgaggcagacctgcgggccctgctatgcagagagctgcggcccctgggggcctacatgagtggacggctgaaggtgaagggcgacctggctatggccatgaagctggaggctgtcctcagggccttgaagtagcagccttggctgactttccagagcccagtcccaagcctggcaccaagcctgaggggcctcttggaggaggaggtgttcatctgcaccacagagagttgaggccctaacaaatttcaggcccagccaagagcccatgaatggaggctgcaggaggctgagtccggctgccatgcacgtctcccctacagtggttctctggacaaggctttgtccatcccggtccccagctgagtgcccagcgctgagctgggtgcacggtgtgattccaggaggagagccaggcctgccctgccctgctggcttcctgactggagagacaggacccacagaaacagcctgacagcagctggtttggtccttgtgtgagggaccaagcatgtggcccaggctctaagctctgcggggattggagagggatggggagggaagggaaggcagctccaagaagaggtccctgtggcgaagttacctggggatcctggctggcccaccttcctggctgcagtccaggcccgtgctggcgggattgggcatgggaaggagcagggcctgctgcttccctggcgctgctcccaaagatttctgactcatctgccagctctgtcctgcatgcctggcgagctggggcccagggcagcatgaaggagagccctgcgttctgtgcttcttaccagaggtttgcaagcctcagacaaataaatgtggtgtttacaatgtaaaaaaaaga

SEQ ID NO: 9396 - DNA, 1933 bp, Homo sapiens
  misc_feature (2)..(3): n is a, c, g, or t
gnncccgcgccgccgcgggtggccgcgcgggtgaagccggaagcagcagccaggagggcggggccgcgtagggcccactggccagggagggcgccgcgcggaggcgcggggcgtgtctcctgtcaaaagccatgctcggcagatgtaccccagagctggccctcctgcctctgtcatggcctcatcagtttcctggggttcttgctgctgttggtcaccttccccatttctggctggtttgccctgaagattgtgcccacctacgagcggatgattgtgttccgcctgggccggatccgcaccccccagggacctggcatggttctgctcttgcccttcattgactcctttcagagggtggatctgaggacacgagccttcaacgtccctccctgcaagctggcctctaaggacggggctgtgctgtccgtgggagccgatgtccagtttcgcatctgggacccggtgctgtcggtgatgactgtgaaagacctgaacacagccacacgcatgacagcccagaacgccatgaccaaggccctgctcaagaggccgctgcgggagatccagatggagaagctcaagatcagcgaccagcttctgctggagatcaacgatgtgaccagggcctgggggctggaggtagaccgcgtggagctggcagtggaggccgtgctccagccgccccaggacagcccagctgggcccaacctggacagcaccctccagcagctggccctgcacttcctgggaggaagcatgaactcaatggcaggaggtgccccgtccccggggccagcagacaccgtggagatggtgagtgaagttgagccacctgcccctcaagttggtgccaggtccagtccgaagcagcctctggcggaggggctactgactgctctacagcccttcctgtctgaggccctggtcagccaagtcggggcctgctaccagttcaatgtcgtcctgcccagcggcacccaaagcgcctacttcctggacctcactacaggacgaggaagagtgggacacggggtgcctgatggcatccctgatgtggtggtggagatggccgaggcagacctgcgggccctgctatgcagagagctgcggcccctgggggcctacatgagtggacggctgaaggtgaagggcgacctggctatggccatgaagctggaggctgtcctcagggccttgaagtagcagccttggctgactttccagagcccagtcccaagcctggcaccaagcctgaggggcctcttggaggaggaggtgttcatctgcaccacagagagttgaggccctaacaaatttcaggcccagccaagagcccatgaatggaggctgcaggaggctgagtccggctgccatgcacgtctcccctacagtggttctctggacaaggctttgtccatcccggtccccagctgagtgcccagcgctgagctgggtgcacggtgtgattccaggaggagagccaggcctgccctgccctgctggcttcctgactggagagacaggacccacagaaacagcctgacagcagctggtttggtccttgtgtgagggaccaagcatgtggcccaggctctaagctctgcggggattggagagggatggggagggaagggaaggcagctccaagaagaggtccctgtggcgaagttacctggggatcctggctggcccaccttcctggctgcagtccaggcccgtgctggcgggattgggcatgggaaggagcagggcctgctgcttccctggcgctgctcccaaagatttctgactcatctgccagctctgtcctgcatgcctggcgagctggggcccagggcagcatgaaggagagccctgcgttctgtgcttcttaccagaggtttgcaagcctcagacaaataaatgtggtgtttacaatgtaaaaaaaaga

SEQ ID NO: 9397 - DNA, 2360 bp, Homo sapiens
  misc_feature (2)..(3): n is a, c, g, or t
gnncccgcgccgccgcgggtggccgcgcgggtgaagccggaagcagcagccaggagggcggggccgcgtagggcccactggccagggagggcgccgcgcggaggcgcggggcgtgtctcctgtcaaaagccatgctcggcaggtctgggtaccgggcgctgcccctgggtgattttgaccgcttccagcagtcgagcttcggctttctgggctcgcagaagggctgcttgtccccggagcggggcggcgtggggacaggggccgatgtaccccagagctggccctcctgcctctgtcatggcctcatcagtttcctggggttcttgctgctgttggtcaccttccccatttctggctggtttgccctgaagattgtgcccacctacgagcggatgattgtgttccgcctgggccggatccgcaccccccagggacctggcatggttctgctcttgcccttcattgactcctttcagagggtggatctgaggacacgagccttcaacgtccctccctgcaaggtgaggggcttctcagctgccttgacagaggaactgggggcctgtccagaatgtactgtggtgccaggacctcagcctgtgagtcaccatctgaggggggaagggggaagaagagaccagaaaattgatggaagctaggaggacatccttgcttcatacacctaaccctacatacttggtgacaccatttgcccttgaggagctagctgccaagcaggtggttcaagctgggtggccccagtgggcctgacctccctgcacccccagccccttgagtgtctctctctcatggcctcccccaacagctggcctctaaggacggggctgtgctgtccgtgggagccgatgtccagtttcgcatctgggacccggtgctgtcggtgatgactgtgaaagacctgaacacagccacacgcatgacagcccagaacgccatgaccaaggccctgctcaagaggccgctgcgggagatccagatggagaagctcaagatcagcgaccagcttctgctggagatcaacgatgtgaccagggcctgggggctggaggtagaccgcgtggagctggcagtggaggccgtgctccagccgccccaggacagcccagctgggcccaacctggacagcaccctccagcagctggccctgcacttcctgggaggaagcatgaactcaatggcaggaggtgccccgtccccggggccagcagacaccgtggagatggtgagtgaagttgagccacctgcccctcaagttggtgccaggtccagtccgaagcagcctctggcggaggggctactgactgctctacagcccttcctgtctgaggccctggtcagccaagtcggggcctgctaccagttcaatgtcgtcctgcccagcggcacccaaagcgcctacttcctggacctcactacaggacgaggaagagtgggacacggggtgcctgatggcatccctgatgtggtggtggagatggccgaggcagacctgcgggccctgctatgcagagagctgcggcccctgggggcctacatgagtggacggctgaaggtgaagggcgacctggctatggccatgaagctggaggctgtcctcagggccttgaagtagcagccttggctgactttccagagcccagtcccaagcctggcaccaagcctgaggggcctcttggaggaggaggtgttcatctgcaccacagagagttgaggccctaacaaatttcaggcccagccaagagcccatgaatggaggctgcaggaggctgagtccggctgccatgcacgtctcccctacagtggttctctggacaaggctttgtccatcccggtccccagctgagtgcccagcgctgagctgggtgcacggtgtgattccaggaggagagccaggcctgccctgccctgctggcttcctgactggagagacaggacccacagaaacagcctgacagcagctggtttggtccttgtgtgagggaccaagcatgtggcccaggctctaagctctgcggggattggagagggatggggagggaagggaaggcagctccaagaagaggtccctgtggcgaagttacctggggatcctggctggcccaccttcctggctgcagtccaggcccgtgctggcgggattgggcatgggaaggagcagggcctgctgcttccctggcgctgctcccaaagatttctgactcatctgccagctctgtcctgcatgcctggcgagctggggcccagggcagcatgaaggagagccctgcgttctgtgcttcttaccagaggtttgcaagcctcagacaaataaatgtggtgtttacaatgtaaaaaaaaga

SEQ ID NO: 9398 - DNA, 1885 bp, Homo sapiens
  misc_feature (2)..(3): n is a, c, g, or t
gnncccgcgccgccgcgggtggccgcgcgggtgaagccggaagcagcagccaggagggcggggccgcgtagggcccactggccagggagggcgccgcgcggaggcgcggggcgtgtctcctgtcaaaagccatgctcggcaggtctgggtaccgggcgctgcccctgggtgattttgaccgcttccagcagtcgagcttcggctttctgggctcgcagaagggctgcttgtccccggagcggggcggcgtggggacaggggccgatgtaccccagagctggccctcctgcctctgtcatggcctcatcagtttcctggggttcttgctgctgttggtcaccttccccatttctggctggtttgccctgaagattgtgcccacctacgagcggatgattgtgttccgcctgggccggatccgcaccccccagggacctggcatggttctgctcttgcccttcattgactcctttcagagggtggatctgaggacacgagccttcaacgtccctccctgcaagctggcctctaaggacggggctgtgctgtccgtgggagccgatgtccagtttcgcatctgggacccggtgctgtcggtgatgactgtgaaagacctgaacacagccacacgcatgacagcccagaacgccatgaccaaggccctgctcaagaggccgctgcgggagatccagatggagaagctcaagatcagcgaccagcttctgctggagatcaacgatgtgaccagggcctgggggctggaggtagaccgcgtggagctggcagtggaggccgtgctccagccgccccaggacagcccagctgggcccaacctggacagcaccctccagcagctggccctgcacttcctgggaggaagcatgaactcaatggcaggaggtgccccgtccccggggccagcagacaccgtggagatggtgagtgaagttgagccacctgcccctcaagttggtgccaggtccagtccgaagcagcctctggcggaggggctactgactgctctacagcccttcctgtctgaggccctggtcagccaagtcggggcctgctaccagttcaatgtcgtcctgcccagcggcacccaaagcgcctacttcctggacctcactacaggacgaggaagagtgggacacggggtgcctgatggcatccctgatgtggtggtggagatggccgaggcagacctgcgggccctgctatgcagagagctgcggcccctgggggcctacatgagtggacggctgaaggtgaagggcgacctggctatggccatgaagctggaggctgtcctcagggccttgaagtagcagccttggctgactttccagagcccagtcccaagcctggcaccaagcctgaggggcctcttggaggaggaggtgttcatctgcaccacagagagttgaggccctaacaaatttcaggcccagccaagagcccatgaatggaggctgcaggaggctgagtccggctgccatgcacgtctcccctacagtggttctctggacaaggctttgtccatcccggtccccagctgagtgcccagcgctgagctgggtgcacggtgtgattccaggaggagagccaggcctgccctgccctgctggcttcctgactggagagacaggacccacagaaacagcctgacagcagctggtttggtccttgtgtgagggaccaagcatgtggcccaggctctaagctctgcggggattggagagggatggggatctcaatctctttactaaatttattttataaatttagtaatatataccatcattataaaaatcatctttaactctatgtaaacactatcaattgttcttgagcatatttgactgttaattttccatgatcatta

SEQ ID NO: 9399 - DNA, 567 bp, Homo sapiens
gatctttttttcccagtgacattaagaaaatctgaataacctttatgtgtagttatgcttgctataagttaaaacttgtaagttatgcttaagttaaaactgctttaaaaaaatctttactttgtaatgaaccacaccagttaaaataaactatactagttaaaagctgcctaaatatttgtcagaattgcaatttaaatctaaaaaagctattcataaatattctctagttacctatgtatattaaagtagatatttaaaataaaggatctgatctaagttcatattttttagacactgataggattcatattccaatcaaatcttaatgatttctcatcctaacatagcagaggccccatttcagcccacccaccactgaaaataaaggctttagaataactttctgtgcaacaagaggataactttctgtacttaaaatcagcttactaggaatttcacaagtaacacaggaacttccattgcacttgaaaagtaactgtgatggagcaattacagtaagaattttgatgttcagcgccacccagcgacagatctctgagtata

SEQ ID NO: 9400 - DNA, 642 bp, Homo sapiens
tcctgctctgtcaggcagcctctgccctcagctgccttcctctgaatctatccacccatcaccctgtggcttagcaattacactaactatgcaaatgtttttttagatatattctctcttgatgcctaaaaacaaagtcaaaaaaaattttaaacatcctggaaacctgaagagcaaaatgcaactataaataaatggttgtggcttccttaaagtccttaaggaatcaatgtgtaacctgagtccttgtttaatgggtgaaatttaaaaacataatgtataggcaaaaagctaaaacactggttggttgaatttactattaaactttgtttaactcttgctggaaataaacttagaactgctgaattttacagctttcaacgtttatgtttttcactagttcacaagagatgtctgaacaaaccatcagccttttttaagtaaaaaaaagatgttttctggatagtgtcactcagtatgtcaagcaaatcttgcaagggctagttttcaaaagaaaaaagagctgctaatgtatctggcatttctgcttcttccatcacctcaagtttatcatcttcatgtccacactgcggtcttctctggaataaggcagagctatacgttaggattaacagattttct

SEQ ID NO: 9401 - DNA, 332 bp, Homo sapiens
gttattacttgtaatgattcaaattctgccaatacttccaaaatcaaccaacaaaacctcagttaagccagatttggacggcatcttgcccatctctcactgactgactaaggattaaggcctgagtatttactactgcttaaaaaccacatcaatagtccgtccatcttgtttcctctagctatttttgcagatgtcaccagaaggctccaatgatgggtacacaaaccatacctggcttgtcatctgcttcatctctagtatctctgggagttataagacctttcagatttcagtttagcccaccacccacccccgacccccccaaggct

SEQ ID NO: 9402 - DNA, 138 bp, Homo sapiens
tagttctttattagagcaaatatatcattttatgcaatgatatgcttgttttaccttcttctgtccatcatgataaatatgaaattttatctctgaaaatatagggatcgtcatgctaacttgaggaaatgaaaagaa

SEQ ID NO: 9403 - DNA, 613 bp, Homo sapiens
gtagcatgaggaggctttgtgggacgatggggctgttctgtgccctaaccaaggtggagttttatgcgtctatacatgtattaaaattcatggaactgtaaactaaaaagaaacctattttactataacaattttttaattgtgtaaaaggaggaatgacttaggtttttttcaaacaattttttctctcccctaagaaaactcccaccctcagctgttagaagctcaccttttcttctccccacattagcttctccttcagcgtctataagggaaccactggcctatctagaggagaaccgatatggcccctatggcctcctgggatgccgcagaagcaaatctcctttcgtacattcacattcacaggctgcctctgaagataggaagggcttgcttagttggacccttttaaagaagttttgcagttcactttcctgggctagtggaaagacgagatagttaggcctcggaacccagaattcactcttgcccctgacatggaattgggatcatggctcactgccttggcctgggagaaatttcaagccaggtcagagggaaggactgcaccaggacaggctgttggggctggagggacccggaaaaaaag

SEQ ID NO: 9404 - DNA, 447 bp, Homo sapiens
gcctcccaaagttctgggattacagacatgagccactgtgcctggctgttaacagtctacacatttaaccttctgcacggtcagatccaaaggggaaaaacctcatgagttgtgatgagttgtttggggaagtggcacgggcagaccactcactgtagagggcccagcatatcacagaggactgaaagggccaaggcgagggagaggttggggggaaatgtgttacacaccaatggcccaactctggtgagcctacgcctcttctggtaccaccagcaggaaggcaccatcctttccctgcaaataatgttttagaaatttcctggctggtgtggtggctcactcctgtaatcccagcactttgggaggctggggcaggaggatcacttgaggccaggagttcaagaccagcctgggcaacacgatgagacccccgtcactaccaaa

SEQ ID NO: 9405 - DNA, 454 bp, Homo sapiens
ttgctaaatattttcaacacactttataacataggcataagttatcaatcctatagtcttttccagttctaaaaatcccataagattcctagaattaccctaaatgagaaattagtttaggtttaatggcatatgtattttatctctttaaataatgtaacctaatataactgcccgactttttatttgtgctaaaatacatgtaacataaaattgaccactgtaaccattttaaagtgtataattcagtggcactaagttcattcacaatgatctgcagccaccactatctagtccagaactttctcatcaccccaaatggaaacccagcacctattaggcagtcacgctccattattccctccccccagttccaggcaaccacgaatctgctttctgtctctatggatttacctattataaataaaaccatataatgggtggtctttcgtgt

SEQ ID NO: 9406 - DNA, 726 bp, Homo sapiens
aaccctttttagcttcctcacacaattacatgcttgctacatcttctttcatttgcccagttatcttgggcctgtaaggtcctgtacttgaccctattttatatatgtttttattagtgacttagaaaatgacagtaggccaggtgtggtagctcacgcctgtaatcctaggcaggaggattcctagagcccaggagtttgagatccacctgggtaacatcgggagacccggtttctatttaaaacaaacaaacaaaaaattaaaaataaaaaaaataaaatgacagcaaacatttataagcttgtgcataaaacaaacagttaaaatactagatgacagaacagagattgaagcgaggcaaacgggtatgtaaaacaagacttatttttttttttgagacggagtctcactctgtcgcccaggctggagtgcactggcacgatcttggctcacttgcaagctatgcctccagggtttgcaccattctcctgcctcagcctcccgagtagctaggactacaggtgcccgccaccacgcctggctaattttttttttcttttttttagtagagacggggtttcaccgtgttagccagaatggtctcaatctcctgacctcgttatctgcccgccttggcctcccaaagtgctgggattacaggcgtgagccaccgcgcccggccaacaagatgaattttaaaaggacttcgtacaaagttttgcctt

SEQ ID NO: 9407 - DNA, 1023 bp, Homo sapiens
gatccctaactaaactctgcagtgtcccacgaagtcctggtgcagagcattaaaaataatcatttcataaacttctttcaggaaccttggtagaggtggtggatgctacctaccctgatgctgtctctaattagagaggtttgtaaagattcctttgttgcaaagtgtaacacagtgttatttcctcatgagaaatttattggctcatctacatgaagttttttctaagctttcccttaagaactaattgtattaaattattaccatgttgtgttttaatctcattgttcatcctttctaaaaagaaatgctcagataagttgagagtaaggttaaatatatgagcagttaagtactcatacatgattacagcattctaagagttcaaaccttaaaaattatcagtgctagaaatcgacaaatatattcaagtatacaaacattcaacagatatataaacttagtatccctctacatgctgatatattttcaaataatgtgctttcttttcattgaactgtggtatgatgagaataacatgtcctcgggaattagagaacttagtttgagactatggatttctcaatcatgattttgggtaaaaaaattagctgctttatgtctcagttttgctatgtgtgaaaggaatggctgggatgataattgttagtattccttttagtttccaattcatatggtcctattatataaatatttagcttaatattgggaaactagttttataaaactattatatcttttggaatatattctgtttatttttggatatatatatatatatatactgtatctgtggctttacaaagaatataacactatcagtattattttcaacttgttgaattatgtgaaatttatcctttaaatggaactgtgctttagttttacaggataaattttagtattttaatatcagaaggaagctatacttagtaacgtatttgctactttatagtgaatagtaaaagacattaataaaatttctttttcatgatgctctta

SEQ ID NO: 9408 - DNA, 1134 bp, Homo sapiens
gatccctaactaaactctgcagtgtcccacgaagtcctggtgcagagcattaaaaataatcatttcataaacttctttcaggaaccttggtagaggtggtggatgctacctaccctgatgctgtctctaattagagaggtttgtaaagattcctttgttgcaaagtgtaacacagtgttatttcctcatgagaaatttattggctcatctacatgaagttttttctaagctttcccttaagaactaattgtattaaattattaccatgttgtgttttaatctcattgttcatcctttctaaaaagaaatgctcagataagttgagagtaaggttaaatatatgagcagttaagtactcatacatgattacagcattctaagagttcaaaccttaaaaattatcagtgctagaaatcgacaaatatattcaagtatacaaacattcaacagatatataaacttagtatccctctacatgctgatatattttcaaataatgtgctttcttttcattgaactgtggtatgatgagaataacatgtcctcgggaattagagaacttagtttgagactatggatttctcaatcatgattttgggtaaaaaaattagctgctttatgtctcagttttgctatgtgtgaaaggaatggctgggatgataattgttagtattccttttagtttccaattcatatggtcctattatataaatatttagcttaatattgggaaactagttttataaaactattatatcttttggaatatattctgtttatttttggatatatatatatatatatactgtatctgtggctttacaaagaatataacactatcagtattattttcaacttgttgaattatgtgaaatttatcctttaaatggaactgtgctttagttttacaggataaattttagtattttaatatcagaaggaagctatacttagtaacgtatttgctactttatagtgaatagtaaaagacattaataaaatttctttttcatgatgctcttaattgcatggcattaaattattttgttttgaaataagtatagcagtctattataatatatggagatcattccaagtccattcaaaatacatttaaatcctcgagaaaaaaat

SEQ ID NO: 9409 - DNA, 342 bp, Homo sapiens
gcctcccgggatcaagcaattctctgcctcagcctcctgagtagctgggattacaggcgcccgccaccaggtccggctgattgttttgtatttttagtagagatggggtttcaccatcttggccaggatggtctttaactcctgacctcgtgatccacccacctcagcctcccaaagtgctgggattataggcgtaaactaccacgcccggcctcccagggtagcttttgtagctgacattttttgacagcagagccgctctaacgctgtgtagattattctctggggacatgctgatccgcatcctggatactaatcaacatggtttgggaacgcctaaac

SEQ ID NO: 9410 - DNA, 367 bp, Homo sapiens
gatcacaaggtcccacaataggccatttgcaggctgaggagcaaggacagccagtctgagttctaaaactgaagaacttggagtccaatgtttgagggcaggaagcatccagcatgggagaaagacgtaggctgggaggctagggctgtctctctttttcacatttttctgcttgccaccctggcagctggttagattgtgcccacccagattaaggaccggtctgcctttcccagcccactgactcaatgttaatctcctttggcaacacccttgcagacacacctgggatcagtactttgcatctgtcaatccagtcaagttgacactcagtattaaccatcacacagagggagaccctgtctca

SEQ ID NO: 9411 - DNA, 770 bp, Homo sapiens
attgatggggcaagccatgggactggaaggcagcaggcagatgtcagggttggggattactggctcagaagcaggtatcatagcagaagcccaagtctcttccaagtcacagggctaggaaccaagatatcagcaggggaagcagggggtggagggggtataaaaatgacccaactacaaccaccaatactaccatttactgaggcttcgccatgcagcaggcaccctgaaaagtgttttgtttgcattatcttagtcagtcctcctagcagcctgattagtagaagttgttacagaaacacagatgaaaccatgggttagaaagaggttgagtgctagagaatcttatggctgcaaaatgagtaagcagagacttcaaccactgtcttctgactcacagcccaagggaaagaccaggcaagagtaggagtgaagtttctttttctccccagggtcatgggatacatgaacttcaggcttaatctctgtgtgagaaaaacagcatgaagataatcaactctatgtcagaagaaattggcaacactactaaccacgagtaatgcacaccgaaggaggacccggggaagaaccaagagaagacaagaactgaagttcttccattcccacctctgcatcaccttccctgctttctctttccccagaagagactcagtcaacatcccaaagaccaatgatttcattgttttacaccaaatatccctcctctaaatttttcaagaaattgggaataaacttcttacgcaagaaaa

SEQ ID NO: 9412 - DNA, 476 bp, Homo sapiens
attgatggggcaagccatgggactggaaggcagcaggcagatgtcagggttggggattactggctcagaagcaggaaatctcatgtagaagcccagaactttcaagagataagaagtagagagattctggtttaaagagagatgacagaagccctgaatgtcctctcttctgctcccccagataccttcatggactacagggctgtacatacggttagactccttgacctcaatggtcatgggatacatgaacttcaggcttaatctctgtgtgagaaaaacagcatgaagataatcaactctatgtcagaagaaattggcaacactactaaccacgagtaatgcacaccgaagggttgtgaagaggacgttactatttgtacactgttttgagcagtgcctgctgtacagtaaggaccatatatgtgtttataaaataaatcttagttgctataggcaacaccacgcagctgaga

SEQ ID NO: 9413 - DNA, 891 bp, Homo sapiens
attgatggggcaagccatgggactggaaggcagcaggcagatgtcagggttggggattactggctcagaagcaggtatcatagcagaagcccaagtctcttccaagtcacagggctaggaaccaagatatcagcaggggaagcagggggtggagggggtataaaaatgacccaactacaaccaccaatactaccatttactgaggcttcgccatgcagcaggcaccctgaaaagtgttttgtttgcattatcttagtcagtcctcctagcagcctgattagtagaagttgttacagaaacacagatgaaaccatgggttagaaagaggttgagtgctagagaatcttatggctgcaaaatgagtaagcagagacttcaaccactgtcttctgactcacagcccaagggaaagaccaggcaagagtaggagtgaagaaatctcatgtagaagcccagaactttcaagagataagaagtagagagattctggtttaaagagagatgacagaagccctgaatgtcctctcttctgctcccccagataccttcatggactacagggctgtacatacgggtcatgggatacatgaacttcaggcttaatctctgtgtgagaaaaacagcatgaagataatcaactctatgtcagaagaaattggcaacactactaaccacgagtaatgcacaccgaaggaggacccggggaagaaccaagagaagacaagaactgaagttcttccattcccacctctgcatcaccttccctgctttctctttccccagaagagactcagtcaacatcccaaagaccaatgatttcattgttttacaccaaatatccctcctctaaatttttcaagaaattgggaataaacttcttacgcaagaaaa

SEQ ID NO: 9414 - DNA, 714 bp, Homo sapiens
attgatggggcaagccatgggactggaaggcagcaggcagatgtcagggttggggattactggctcagaagcaggtatcatagcagaagcccaagtctcttccaagtcacagggctaggaaccaagatatcagcaggggaagcagggggtggagggggtataaaaatgacccaactacaaccaccaatactaccatttactgaggcttcgccatgcagcaggcaccctgaaaagtgttttgtttgcattatcttagtcagtcctcctagcagcctgattagtagaagttgttacagaaacacagatgaaaccatgggttagaaagaggttgagtgctagagaatcttatggctgcaaaatgagtaagcagagacttcaaccactgtcttctgactcacagcccaagggaaagaccaggcaagagtaggagtgaagaaatctcatgtagaagcccagaactttcaagagataagaagtagagagattctggtttaaagagagatgacagaagccctgaatgtcctctcttctgctcccccagataccttcatggactacagggctgtacatacggttagactccttgacctcaatgtgaatgtctaaagactccaagcatcctaactccaattagaaatccagcagcaatgtattaccatgcagttgtctaaaaccttaaaaaaaaaagctatttaaattgtccatcttttcaca

SEQ ID NO: 9415 - DNA, 492 bp, Homo sapiens
cttgctgagagatcttttgtctctgtgctgacttttcttcacggcactgattatctttttctaacaattttggtggcaattgtatggggatatactttcctccaggggcgtctctagtcctctctcacgagggggcactctgctgcctcttgcagtggcctcaggggtaagggaccgagacccatccggtgtgaccaataaacccggactctcagcaatgtggaaagaaactggccaacaacctggggtaaaggatcctcacataccgaggtgacgactctgtgcacagaccaacgaaggagaagccacgggagccggtgttatgtcgtaccatacatccaggagttcatcaaaacaactaagccaagacatgctaagaaagtttgaagaggaaaactatacagtaaaagaggagggaattgtaggaagtaaaaagtttctgcttcaaagttccccttcttgttaaagaataaatcataagtcttagaaata

SEQ ID NO: 9416 - DNA, 339 bp, Homo sapiens
caactcatatggtttccctaagagaaggagatggcataaataaatctcagaaaaacaagacaaaagatgtggggacatctttgactattatcttcatcttcaatttagttatagatccccatggtgcctgatgattaacttctactccacatggtgctgtgctgggttggtactaagataactccgtaatggcttcaagtaataattgggaatatgagatttaacagatttgaaataataatgggagatagaagaagaagatatgaaaatttagttagaggaaagtttcgagaagttaaaaataaaagagacatagcattgagaacagggagaatttag

SEQ ID NO: 9417 - DNA, 704 bp, Homo sapiens
tttgcttctcattccccatcatcgtggctccgtggcatacattaaatcaaaccatgacctccatacattaaatcaaaccatgacctccgaatcttcttagttattttcaggtacaaggttttcagcttcagaaaggacagaggtctccatggttccattttgaagatttttgggtggctactgcttgtttaccagcagtttggtatagaagcccaagacagtccatgtgtggttcagtattgacctaatagcagaataaatttggaccaaacagaagtccttttctttgtcactgtgtttgattaactatcctggatatgctttattctctaaaaacttcatttttgaaaataccatggttattaaacaactagtctttgtgcgtgattaggacataaacaggaatctcacccacttttaaacctttccaagaaataacttttccactgattttattttgaattgttaaaaaacttttagcagggagagaaaatttggttgatgattcagagcgcgagggaaaggaagcaagggattctggcacatgcgcacgagttgaatgacaactggtggatatttttatatttattgctattcttagcctaaggctggagctgagtagggagtaactaagcttagccatacttattagacttagagattttactttgtttatgtcaatgtcaaggcctttgggaaaactt

SEQ ID NO: 9418 - DNA, 424 bp, Homo sapiens
aagcaaatcagaccaagaaaaagatgggactgggctctgttttcaccttccctcggggtgccaggcacaaatgagaggcgagttcaatacccatgcattgctctctcctatgaaaaatagatttcccatgaagtcagggcactctccctctgactcctgccctttcagagcatgctctgcctcctctggttgactctttgctgctgtaaaaaggcttcactcatccatagggctgtgagttggcagcagagagaggatgctgaggggtgagggctgggggtgtgcagggagatgacacatttcaggtaaatcgctgtcagagacgtggcattttcattcatagccttgtcagagtaacctttgggtgaaagggggagaattgtcttctcccacctaagaggttgccattcatgttttaatttgc

SEQ ID NO: 9419 - DNA, 407 bp, Homo sapiens
gactctcacaatatgtctaatattatgtgaaacactatgctctttgaagcgatttcacattaataaactaacattttcatcacacagattatttaagtaatgtaaaatattattatgagtatataacagaaaaacagagttagggaagaaatccacctaaaatgatgaggggttaatagattttgactctacactattaccaggtctctaatgaagtgtcccaaaatttgtgtctttttagaatacataacaaattatattatttgtacaagacactgaagtaaaatgaccaaggtgttcctaagccacaagctacaagcactgacctgctactccagccttgccctctcaaagagcaaagatgttaatacctggtctcagtaataaagttgggtaaaatttaaaca

SEQ ID NO: 9420 - DNA, 328 bp, Homo sapiens
tctatatctgtgctacccaatacagtttagtgtcttgctgcatatagctattgagctcttcagatttggctagaggaagtgacttttcacatttaactgatttaaatttcaatagccatgtgtgatctgtgactaccatgttaggcagcacagctttatgagattaatattgtagaatcatgtgacaaaaagcagcattgtgagagaacagttacgtgaaaatataaggaagcatagagctcatggggttgagccagtcagaatcgcatttttaattagtcatggacactactcttattatgtcctttattgtacaaacaaaaaaata

SEQ ID NO: 9421 - DNA, 377 bp, Homo sapiens
agagaagtcatccagggcagtgccagcagtacagacggccggctgccttctcagcagcagagaaagccagaagactgtggtgttcatcttcaatattgagagaaggaacctattgagtatccaacaaaattatcttttaacatcaaaggtgaaatgacattttcagataaaacagagtttactaccaacagaccatcattaaagatgcttctaaaagacaggattcaggaagaaggaaaaatgttttaaaaggaaagaatgagctgggcgtggtgggtcatgcctgttatcgcagcactttgagaggctgaggaaggaggattacttgaggccaggagttcaagaccagcctaagcaacatagcaagacccctctct

SEQ ID NO: 9422 - DNA, 130 bp, Homo sapiens
ttagcaaattagaaattacattgaaatatagagttttctttttgatttataaaactatcagtaactttcatctgaagtggagtatttcttgcttaaggttttctgtttgagatttaaaatagtagactta

SEQ ID NO: 9423 - DNA, 490 bp, Homo sapiens
tcacaatcaccaatttagaaaaacataaaaatatttgcaggccatatttatttatgtttatataactgcatactttaaaaaaaagcagcaagtgcagtcttggtaactaaggtctcactctccagttagaaaaacagaaaaagcactattgtttctagatttaactctgagcctcttaagttttgttgtgggggaaaacactttttaagctagggtcattccccgttccctgactagcttttccacccactcaaattatcaaatgtggttttgtctcagagtgtgcctgttaatattgtatactttaaaacaagagatcccctgctgatttccggtgtgggacatataggggacatgagggacacagagggtggggctcctcttaccacttactgtgaaggcacatggttttcattagccctttttatcttcttgggagggcaactgagttttaggctttcctttagggggaatggtctgcccacgctta

SEQ ID NO: 9424 - DNA, 491 bp, Homo sapiens
ggatttcatactccttaaaaatagctgcttcaggctgggcatggtggctcatgtctgcagtaccagagctttgcaaggcctggggcaggaggatctcttgaggccagaagttcaagagcagcctgggcaacatggtgagaaccccatctctaaaaaatagaagaaataaattagctgggtgtggtggcttgcttctatagtcccagctacttgggaggctgaggagggaggatcgcttgggcttgggaggtcgaggctgcagtgagctaatatcacactgctgtactccagcctgggcaagagagtgagatcctgtctctattttttgtttttaaaaatagctgcttcagtaaggcacaagtgtatatctgtataacaagatttctaagactataaaggcaagccaaactaattgtcttgctgcctcaaaattttatcattgactctccataaataatagtaaagccagaagtagatacacatgtgttaaa

SEQ ID NO: 9425 - DNA, 444 bp, Homo sapiens
tatactctagtaaaaaaggccatctaaagaatgaggcaaattacacgatacaaaatgctatgcaagatgtaatggataaaagagaaaagaagatgctttttaaaaagcaaatatgctgtgaccctgctatgtagaacagtcaaaaaattctgggtattatctgtgtttgcacacagtaaaaatgttaacaatgggtacctactggatggagactcggatcgctgggacagaggaattttacttttttacttaaaaaagccaaaaccaggaaaggtaatatttgcacgttaccgattctaacaataagaatgtacagtagactgggcacggtggctcacagctgtaatcccagcactttgggaggccagggcgggtggaatcacgaggtgaagagttcaagaccagcatggccaacatgatgaaaccctgtctctactaaaaata

SEQ ID NO: 9426 - DNA, 735 bp, Homo sapiens
ttcactacatgaatacacagactacccattttatcttagtctacttctttcttctctctttgggcctgaataaagaccagaactgatagacagctaaaggatattgcaagcatcattattggaattgggagattccacagaacaatctgagaatgatctcatatcaaatccaatcagatgagttattctgagactaattccaatagttctagagacttttttttttatggtggacattgtttttattgtgtaaataagcaatttttaaagtatatttaaagaaatgaaacataaggaagtgtataggctgtcaggtatgtggggaagtgaagttcatgtagttttcatgtggagcccatacagattttattatagtcaattttagtgaaatttatcgttggtcagatgaaggtttttttccttcattcagcaaataactaatgactgcctactatgtgctaggtgccgaagatagagagataaataacacttagtcactctaagctgaaattgctcagcatatgaaagtggaggaatatttgtaggtgattttgatgttaaagtatttttttaacatcacctggtagtagaagattgagttatgaagctgtctacctctcacctgtaatagttttagagttggttgctattttggtgtaagtcttttttgctgttcctcttttaactgcaaatctttttgagaccagcactcacatccaaaagggcaattgtgat

SEQ ID NO: 9427 - DNA, 816 bp, Homo sapiens
tcccaaagtgctgggattacaggcgtgagccaccgcacccggccgaaaatgtacaatttttaagtacacatgtgcatacctgtgaaaccatcacacaatcaacataatgaacatattcatctccctgcaagcatcctgctgccctttataatcattccaactctcccacctcccatcctctagtaaccactgacctgtgtagattagttggcattttatagaattatatgtaagtgcaatcaaacagtatgtactcctttagtttttgattttttcacttgccatgctattcagagattcatccatgtcactgtgtgtatcaatagttctttccttttattgccacatagtgttcctttatatgaatctactacaatttttttatccatttacctgttgatactgggttgtttctcatttttggggctataacaaaagtgccatgaagatttgtgtatgattctttgtgtggagatatgttctcatttctcttgggtaaatacctaggagtgaaagagctaggtcatatgataggtatatatttaactttttaagaaactgctaactgttctccgaagtgcttgtaccattttccatttccacaaacagtgtatgtgagttctttcttccacatgcttgttaacatgtggtatagtcagtccttttattccagtggtatgaaatgattatctcattgtggttcttttttgaacctttgttgtgactgatgatgttgggcatcttatgtctttatctgccatttgtgtatctgtagcttctttcgtgaagtgtgttcaaatattttgtccatttaaa

SEQ ID NO: 9428 - DNA, 437 bp, Homo sapiens
cacacatatgtatttatgtgttgtgtatacatatgtctgtgcatgtatatgcatatacacacatatatacatacattacatacatacacacatatgcatactttttcccactgaagttgttgaaactcttgaaagttggacttgagtaatcaaaagcagtgcttattcttttccattcagtaccaaggaaatcatatttaccacgggtccagaaaagtcttttctctctttctcctccccactacccaccagtccccactccttttgcacatgctatttggtcactggccatcccgagtggctcatctagacaggggtatgtggccaggagaggttaggggtcgagataaggtggatgtttgctgtaaggcagtgccttcctctccttcttaacctggggttgtgcttctgagcatgtgaaatgtattgttccttag

SEQ ID NO: 9429 - DNA, 678 bp, Homo sapiens
acccctgggcagaattgagcagattgaagattgctagtcagctgatgggttggctcccttgagccaagtgctcacctctggtttagtgtgtggccacttccgtggagagaagacggaattttctctttctggggagttgtaggcaggcagttgaagctagaaggagctggccatgtcgggcaaatggactgaccgcagaactggccacagaagtgtcagcttgattggggtcagggattagagggaaggagataatggtggatgtggatatagatgactctgtacgtgccaaggaggaggctgagggacagcaaggggatactgggggagaccccacctcaattcccccatcaccttgatttcctcactgcacaggaggaaggaccctctgctaaatgtggcgagaatggtagtgcagagaggactgaccttgggggaaacaagtacaaccaggagaggatacaaatagagtatgtggaggtgctgtttgcagatttctttagtaagcattcaagtcttcataatcttttataactgagagccaattaaagaaaggtctgtttgttttagtgaaaaatttcctcattttcagcagccatattcccctggaatcagcagaaagagaaagtaacattgcagggggaattggtaaaatgcaggagcacctataagaggcaa

SEQ ID NO: 9430 - DNA, 445 bp, Homo sapiens
ttctggatgaagttacatttgaactgacccttaaaaaaatgaagatgtaaccaaaacctgtgggatacagtaaaaacaatactaaaaaggaagttcatagcaataaatgcctacatagaaaaagaaaaacatcactaggtgcagtggcttacgcctgtaatcccagcactttgggaggccgaggcaggtggatcacctgagggaggtcaggaattcaagacccaagaccagcctggccaacatggtgaaaccccatctctactaaaaatacaaaaattagctgggcgtggtggcacacgcctataatcccagctactcgggaggctgaggcagaaaatcacttgaacccgggaggcagaggttgtagtgagccgagatcgcgtcactgcactccagcctgggtgacaagagcgaaactccatctcaaaaaaaataaaaaaataaa

SEQ ID NO: 9431 - DNA, 706 bp, Homo sapiens
catattaaatcttcagaccctggtaggtatttactcaccgcacacctcaactctggattagccacatatcaagtgctcacagccacacatactcatggctcatggttacagtgctgggcagtgcagctcgaaagcatgacaggcttttgctaaccacaagccttcagccacacagtcctttttcccttcccacctccttttcgttatccccctcttcatccagattcctcaaggtccaactcaagtagaacctcttgagaaaggcctatcccagcaactccagctcttaatgatcctgacgcactacaataaaactgaatgcaaactgtgggcaatgagtatgggaggcctattacagaaaaaagttcaagacagaaacactcaaggaattgaccttttcggattacaaatatgtataaatgtaatgctatcatttgtaataaagagacaaaataactaaatgtcggctgggctcagtggctcatgcctgtaatcccagcactttgggagatgggtggagcccttgagcccaggagttcaagttgcagtgagcagagatgacatcactgcactccagcctgggcaagagagtgagaccctgtctcaaaacaaagagaaagaaaaaaacaactaaatgtccattgatagaaaactagttaaataaatggtagatccacataacggaatattatagagctaaaagaat

SEQ ID NO: 9432 - DNA, 599 bp, Homo sapiens
  misc_feature (567)..(567): n is a, c, g, or t
  misc_feature (579)..(579): n is a, c, g, or t
catattaaatcttcagaccctggtaggtatttactcaccgcacacctcaactctggattagccacatatcaagtgctcacagccacacatactcatggctcatggttacagtgctgggcagtgcagctcgaaagcatgacaggcttttgctaaccacaagccttcagccacacagtcctttttcccttcccacctccttttcgttatccccctcttcatccagattcctcaaggtccaactcaagtagaacctcttgagaaaggcctatcccagcaactccagctcttaatgatcctgacgcactacaataaaactgaatgcaaactgtgggcaatgagtatgggaggcctattacagaaaaaagttcaagacagaaacactcaaggaattgaccttttcggattacaaatatgtataaatgtaatgctatcatttgtaataaagagacaaaataactaaatgtcggctgggctcagtggctcatgcctgtaatcccagcactttgggagatgggtggagcccttgagcccaggagttcaagaccagcctggggtctcattctatanggagaaacaaangtttaataggaaaaggagga

SEQ ID NO: 9433 - DNA, 299 bp, Homo sapiens
aatatggagtcactcatgctaaatgcaattaacttgggagtatactcctaagttgcaaaaagtggtaacaaatagctgagttttggggcagttacagcagctgagcatctgtcaatgtaggtggccaggtgattcaattaaggatgctgtaaccaattaagctgtatctacacctcacttctgttttctatctacaaatactgcgtgatcatgttgctggttggagttctttgaataagctgtggttcggagggatgcccaattctagaatcatgaataaaagcctattaagatcttta

SEQ ID NO: 9434 - DNA, 386 bp, Homo sapiens
gatagtagttttctattgctgcaccaatattaccacaaacttagtagctgaaaacaacacacatctattatttcacagtttctgtggatcagaagtccaggcacaactgagttctcttcaaagctgcaatcaaggtgttagcgagggttggggtctcagtctcataagaatgctcaactggggaaagatctgcttccaaatttatccaggttgttggcaaaattcaggtccttgctttcataggaccgagagcttcattttcctgctggctattggctacaggctgccctcagcttttagagaccaccctgagttccttttgggttgctgtaaaccaaaaataaaattctaagcccctcagccatctgaatggacccctcttcttg

SEQ ID NO: 9435 - DNA, 616 bp, Homo sapiens
acctgccttgggcctgaggggagcctactgcactgaagggtgagtctcaggcctgacagcattcaccacaagctgactgaagagcccttgggtcttaagtgaacagtggcagtagctgtgcagcactccccatgggtctgtggtaggagtaaaatggggtgagtctcctctgtggaaaggggaggaaagagtgggaaggattttgtcttttggttggagtgccaggttagccacagtagtatggagtaccaagtagatttttatgtgttttgactctagtctctggctcccagaccgcacttctggacccagggcctagggaaatgcaccatcctgaagggaagaacacaagcatggctggctttgccaccttctgattgtagagcgctaggaccttgagtgaacataggtggtagccacaaagttattacagtgggccttaagtgagacccagtgctatgtttcatgtctaaggcagtgcagttccagtgctggtggccacaggggtgcttggatcactgcaaagagagaaactccattcattggggaaaagtaagagaactgaaatctctgcctggtaatccaaggacttattctggatcttatctaagaccac

SEQ ID NO: 9436 - DNA, 780 bp, Homo sapiens
actggagaactgccttaaaaaacaaaacaaacaaacaaaaacagtgaaatacttaatggtttaaccagtcttcgtttttcctcatcttaaatattaaattcaacttagccatagttctagaaaaatggctagatatctcattcaccaatgaactctcaaatacagtgatgacacatcccatttctctcatttctagttctctacagtaaagtgaaggggccacttgtagaaagacaagcatgcttgagcactcacaaactgatgttcagaatctctgccaagtgagacactcaacagatgtaacctcagtgaaataactgtggccaacaatctagctaagaggctctaaaaccaggcattaaaagcagatccatggcggggcacggtggctcacatctgtaatcccagtatgttgggaggcttaggcaggaggatctcttgaggccaggagttcaacaccagcctgggcaacatagtgagtctctgtttctgttaaaaaaatgtttaagggctggcacggtggctcacacctgtaatccccagtactttgggagggtgaggcaggaggattacttaagtctaggatttcaagaccagcctgggcaacatggcaagaccctgtctctgtaaaattaaaaaattagccagacatagtggcacatgctggcgtcagctacgtaggaggctgaggtaggaggatttaactcaggaagtcgaggctgtagtgagctgtgtttgtgccactgcactgcagcctgggcaacaaagtgagtctgtttc

SEQ ID NO: 9437 - DNA, 414 bp, Homo sapiens
ccccagcccaccctggcccagccatcctgcacggaagcacaggctgtttgctgaattcaatccttgcctaaacatttgtttatttgagacaagatgcctgcggggcctcatggccaggtcagagctcacagctggggcagaggaggagaggctgcagaagactggacctgtaggtttgtctccaactctgagactccaggcggggagtcctggggtcagagcatggacagggctcatagtgttgggtcacagactcaagactctccaggtttcctcataaaaaggaaggaaacagccgtgcgcagttgtcacgcctgtaatcccagcactttgggaggcagaggcaggcagatcacttgacgtcaggagtttgagaccagtctggccaacaaggcaaaaccccatctctacaaa

SEQ ID NO: 9438 - DNA, 604 bp, Homo sapiens
cattattaactttattttagaagataatcaccccaaatgggttcagaccacaaattccaagttcctgcaagacttgtgtggattgtggttgctgtgagtctgtgagatgtggatctgtctcgcacaagcgccacctagtggccagcctgggactctggtggtaatctatcccacatttcagcactcaaagtctgtgtggtccgtgtagggtcggatccatacatgtagagctcaagggtaagcccaagagttcatgagcaactttcaggggttgctctcccgaagcccttcctcattgtaacctgcccagtagtgtctgggtccctgggctctaccttttcagccctccagccagcttgggtggttgaggcttgatttaccctactctctggtgcacttgactgaaccacgtcagagctaagcagcgagaagccagagagaaaaagcatgaaggtttccccaccctctggggacctcagactctctggttggaaaggaagtttgcctggcctgatgactttaattatctgccatttctcactagggccacaaaatttcttgaggtctggggcacagagaagaaaaaattttagaagaaaaagaa

SEQ ID NO: 9439 - DNA, 562 bp, Homo sapiens
caggaatattattcagccttgaaaggaaattcggacacgtgctacaacatagatgaatcttgaggacggtatgcaaagtgaaataaatcagacacagaaggacaaatactgtatgattccacttatataaagtacctagattagtcagattcatagagacaaagtagaatggtggttgctagacgctggagggaggggagaaaggggagttattaatgggtgtagagtttctgttacacaggatgcaaagtggcctgaagatggatggtcgtgatggttgcacagcaatgtgaatttaatgacactgaagtgtacacttaaaagtcattaaaatgctaaattttgtatgtgttttacaattttaaaaatggaaaaaaagtaagaccaaaagcaacacctctccagaatgtgtgttatataccaaattttgacgtatgtgagattgctgactatattttacttatcaatttgaaattatattgtttttatgttgacactccatataagccattattttgaaaaaaacattttccttattaaaagattggaaaaaaattcacaa

SEQ ID NO: 9440 - DNA, 324 bp, Homo sapiens
taaatccttaattagaactgattgagcatattataatgttcatgtggattttatgctactctctgtcatttttgaatttattaagcaaaccaatccttccttgatgtgatttccttgaaagcatttcttttatatctacttatagtagtgtcaactctttgttatgctatacctctttcagtgtggaagatacgattttaagttactcggcttccaaaatatattgctgtaaacgtacatattttcagactcagcatttttactagagttagtcttacctcaaaacttctattttacttaccattctgtttcagtttttatttt

SEQ ID NO: 9441 - DNA, 519 bp, Homo sapiens
gagcctttcaaggaggtactgttattgacatcatttttctagtgaggagcctgaggcttagattcagaaacctgtgagtcgccatatagctagtagctggccgagccatgatttgaacttagctgtgctcaaaaccaccacaccatgatacctcagagatgaatgtgtgcgtggtggttatgggagaagagaaccacatttacttattttttgtctgggtcttgcatggtgttttagatcatttcatttctgttatttcattttgaaacatttctactataattattatccatattttacatatagggaatctagtctcagaaaaactgaagcttataaccaatattttacagctagtgataatgagggagcagacatttgaacttgacaacctaaattcaggttctggctaggggtttcgttaaggaaaggaaaaattccctccaacaaaggtcatttttatgatgtgtaagtgatttaagctttctgtataccaccccaccccttacaaagatttgt

SEQ ID NO: 9442 - DNA, 1758 bp, Homo sapiens
caagcgctgttctatgaggccacaacctgacccaaaggaccccgcccccatcggccgcctaaactccagagcacgagcaagaaagtggagggccacgggctgcagcgtagccgagtttgaatactggttccatagctggctagctgtacgacctcgggcaagttatcacaaaacagggagaatcccggcacctaactcggaacggtcacaggctgagatgatattactgtgtgaagtgcgcagagcggtgttgggcacatggtcatcggaactatgttcgttatttttataagtatctttaagtggggggaatctgctccactaggcttccaggtacctaccgtccaagaaaggaagccaggaagtgcaaaccaacataattactatgaaaaacgtagtttctaagacctgtgtaactcttctagtgttctattacaagtagcccccagttatctcttgaaggaaactgtaaaacaatcttgccaatgagaaggacggacctggatcattttttagcatagtaaaagagagaaaccagagagaatgaattctaacactcaagttttggggggaaagaaaagactttattctttgcagggggtttagagctttacctgaattatctcatttaaccctcacaattctcaaatcgtttcattatcatattttacagataagaactgaagcgtggcaagattaaggaagttgctcaacttcacatagtcagaacatgactctagggagtagaggctagcgaagtggggtgcaagaggtcatccaaatttcttgaaataccagatctttttacctcatcatatatgttagattgtcagttttatcgttttcttcccagctttattatttgacaaaaaattatatatattcaaggtgtacaatgtgatgactggatataattatacattgtgtaatgattaccaaaatcaaattaagtaaaacatccttcactaatttatgtagtagttcggtgggggggcacttaagcaaatttgtcttagcaaacttcaagtaaacaatacagaattattagctatagtcaacatgttgtacattagattcccagaacttgtcttaaaactgaaaacttgtaccatttgagagagaagttttagtgttactgaaatcacagacttctgacagaatttgcaggatgctatacacaactacacaaaagtgcaaacaatagtttcttggaccaagagtcaaaaaggtcacttttttaatatattagtcaagcagacagggctatactttataaataaatacacattatctggggataagtgtttaaaaaattctttactcatataatacaaaacaggcttggggatcagtcttgaagcatgaatttttacccagtgggccatgttgagggggttgcagcacaggcccagaaaggaaagcaggctggggctctgagggcttgtgagacgaggacgctgggctgagaagatagggcttcactaggcggagggccccagggtaccccatacacaagcctgccttggcttctcgtccaatttggtgcatctcacactacacagccctgccccaccctggtgtcagcaggcattcagaaagcctcacacttctgctccagtgaacactgccaggatagccctctgaacttccacccacccatcttctgcccatttgttttctttgtcttcaattccactgctacccatcctaccccagtcccttagcctgacaaggcccaagtgtctccaccctgtgctg

SEQ ID NO: 9443 - DNA, 1360 bp, Homo sapiens
caagcgctgttctatgaggccacaacctgacccaaaggaccccgcccccatcggccgcctaaactccagagcacgagcaagaaagtggagggccacgggctgcagcgtagccgagtttgaatactggttccatagctggctagctgtacgacctcgggcaagttatcacaaaacagggagaatcccggcacctaactcggaacggtcacaggctgagatgatattactgtgtgaagtgcgcagagcggtgttgggcacatggtcatcggaactatataagaactgaagcgtggcaagattaaggaagttgctcaacttcacatagtcagaacatgactctagggagtagaggctagcgaagtggggtgcaagaggtcatccaaatttcttgaaataccagatctttttacctcatcatatatgttagattgtcagttttatcgttttcttcccagctttattatttgacaaaaaattatatatattcaaggtgtacaatgtgatgactggatataattatacattgtgtaatgattaccaaaatcaaattaagtaaaacatccttcactaatttatgtagtagttcggtgggggggcacttaagcaaatttgtcttagcaaacttcaagtaaacaatacagaattattagctatagtcaacatgttgtacattagattcccagaacttgtcttaaaactgaaaacttgtaccatttgagagagaagttttagtgttactgaaatcacagacttctgacagaatttgcaggatgctatacacaactacacaaaagtgcaaacaatagtttcttggaccaagagtcaaaaaggtcacttttttaatatattagtcaagcagacagggctatactttataaataaatacacattatctggggataagtgtttaaaaaattctttactcatataatacaaaacaggcttggggatcagtcttgaagcatgaatttttacccagtgggccatgttgagggggttgcagcacaggcccagaaaggaaagcaggctggggctctgagggcttgtgagacgaggacgctgggctgagaagatagggcttcactaggcggagggccccagggtaccccatacacaagcctgccttggcttctcgtccaatttggtgcatctcacactacacagccctgccccaccctggtgtcagcaggcattcagaaagcctcacacttctgctccagtgaacactgccaggatagccctctgaacttccacccacccatcttctgcccatttgttttctttgtcttcaattccactgctacccatcctaccccagtcccttagcctgacaaggcccaagtgtctccaccctgtgctg

SEQ ID NO: 9444 - DNA, 576 bp, Homo sapiens
tgtagagacaggagtctccctatgttgcccaggctgttcttgaactcctgggctcaagcaatcctcctgtattgctggtaacaatgtaaaatagtatagctgctttggaaaaccgtctggcagttccagagtcaccatttgacccagcaattcccctcctacaaatataccaagagaaatgcaaacataggtccacacaaaaatgtttacacaaaggctcacaacagcattattcacaatagccaaaaagtagaaacagtccaaatgtccatcaacttttaatttaaataaaacgtggtacatcccacagtggaatattatttagcaataaaaaaggaatgaaatactgatatatgctcaacatgaagacccttaaaaacatgatggacagaaaaatgccgccacaaaagaccaccacttgtgtgataccatttatgtgaaaagtctagaataggcaagtgggtagagataaagtagattactggttgcctgagggcgggggaaacgagaatggggaatgagtgctaggggtacaggatttctctaagaagggacaaaaatgttctaaaattagtt

SEQ ID NO: 9445 - DNA, 465 bp, Homo sapiens
agaatatgcatatacaaactcacacatactttattagtttttcattatgatttctgtatatcatgcaatggatgtatcttgtcagagagactgtctttcttgtaattaagcttacagttattaaatgagaacgtttgggacaataatgcagtctgacagtattgaaagtagggcccaggcacagcggctcacgcctgaaatcccggcactttgagagaccaaggaggacggatcacttgaggcccaggagtttgagatcagcctggctaacatggtgaaaccctgtctctactaaaaaatacaaaaattagctgggcatggtggtgcacacctataatcccagctactcaggaggctgaggcataagaattgcttgaacccaggaggcaggggttgcagtcagccgagatcgcgccactgcactccagcctgggtgacagagtgatgactccatctcaaaaaaaa

SEQ ID NO: 9446 - DNA, 444 bp, Homo sapiens
atgttctcagcaggcatcttcaaggccccaaattctctttttgtcccccactgtgaaaaactgattggcatctggtgatgggcagggcacgggtgcctggcgcttgcaggaagccccacaggaggtgcacagagccatggtggatgaagtgtggccaagccagcacaaggtgggggaccagatgtcgcccgattatgttccattgaaatccaaacaaagccccagattcaggatcatttccttgagactccccagttggaaattggcactgagccagaatctcacaacagctggtctccccatgctaggatttatgtgccttaccaaaaactttacctgcgtgttattgattggtttctgtaaagcaatgaaacaatattttgaagacccaaagcatactgctctctgctgaaaataaaaagaccatatatcactgaacacacc

SEQ ID NO: 9447 - DNA, 1430 bp, Homo sapiens
  misc_feature (1336)..(1336): n is a, c, g, or t
  misc_feature (1397)..(1397): n is a, c, g, or t
gagggaacagtgccctggattccggcgggggtatggaccttaggaacggggaaggatggaagaatgggcagaagcagcagtaaccgtgcccaacgccatctccacggggcgtgcctccattccgctccccgtcagccctacccactcagccctgccgcctgccgcctgccagttggctgaccccactcccaagggaagagcggcctatcgctcccagctccttgccccgaaccacccagtgtacgcgaacctcgcgggccggcgtggccttggccgggcagggggcggggcgagcgccggtgacgcggccgttgccatgggaactcgccgcccgctcgctctctggagctggagccggagctgccgccagccgcccgcctcaggctctctctgccagccgtgcggccaggcccgcggggtggtcggggggagccgggcggcagagaaggagggagcgggtacggcctcctagccgagaccggtaagccgaagcccttgagccgctcgctgccgctgccgccgccgccgccgcgaccgcgagggacaaggacaagcgccgagcagcgcctgcccaacccccggaacgcgcacccgccccaacgcccagacacggaccgtgcgggccgcccccgccccagcgccgccccacttcagcccggcccgcgccctggacgcctccgcacctctggccggctccggctcagtcccggtagctcttctccgcccccgccgcagcctccgccgcagccgcagcctccgccacagccgccgcctccacccccggccccactccgcccgcgacccctgccggggccccgaccccggccctatccccggccccgcccgcggccccaccaacctccgttccggccccgtacccggaggcccagccgtgggcacgatgctgcccagctccatccagatttcgggggagccgctgtccggcgccgaggtgcgggacatctgccgcggccttcgcgacaacgccgtgcgcctgctctcactgcgcggctgccgcctctgcgaccgcgactttggccgcatctgccgggccctggccggggccacgtccctggcgcagctcaaccttaacctgggcgtcgtgtccagccccagccgcatcaagcagctggctgaggctctgcggaccaaccgctccatccagtccctcttcctgcatgggagccccctgacagatgcggggctggccttgctgaacccagccctggccctccaccctgccctcgtggctctggacctgggggactgcatgctgggtgatgaagccatcaacctcatctgtggcctcctgcccccagatggggccaaatctggntgaaggagtaagctgagtgcaacctggcataccctaaggctggagcgcttgcattgcgtgncacagtccaggtcggtctcatttgataaaccct

SEQ ID NO: 9448 - DNA, 2130 bp, Homo sapiens
gagggaacagtgccctggattccggcgggggtatggaccttaggaacggggaaggatggaagaatgggcagaagcagcagtaaccgtgcccaacgccatctccacggggcgtgcctccattccgctccccgtcagccctacccactcagccctgccgcctgccgcctgccagttggctgaccccactcccaagggaagagcggcctatcgctcccagctccttgccccgaaccacccagtgtacgcgaacctcgcgggccggcgtggccttggccgggcagggggcggggcgagcgccggtgacgcggccgttgccatgggaactcgccgcccgctcgctctctggagctggagccggagctgccgccagccgcccgcctcaggctctctctgccagccgtgcggccaggcccgcggggtggtcggggggagccgggcggcagagaaggagggagcgggtacggcctcctagccgagaccggtaagccgaagcccttgagccgctcgctgccgctgccgccgccgccgccgcgaccgcgagggacaaggacaagcgccgagcagcgcctgcccaacccccggaacgcgcacccgccccaacgcccagacacggaccgtgcgggccgcccccgccccagcgccgccccacttcagcccggcccgcgccctggacgcctccgcacctctggccggctccggctcagtcccggtagctcttctccgcccccgccgcagcctccgccgcagccgcagcctccgccacagccgccgcctccacccccggccccactccgcccgcgacccctgccggggccccgaccccggccctatccccggccccgcccgcggccccaccaacctccgttccggccccgtacccggaggcccagccgtgggcacgatgctgcccagctccatccagatttcgggggagccgctgtccggcgccgaggtgcgggacatctgccgcggccttcgcgacaacgccgtgcgcctgctctcactgcgcggctgccgcctctgcgaccgcgactttggccgcatctgccgggccctggccggggccacgtccctggcgcagctcaaccttaacctgggcgtcgtgtccagccccagccgcatcaagcagctggctgaggctctgcggaccaaccgctccatccagtccctcttcctgcatgggagccccctgacagatgcggggctggccttgctgaacccagccctggccctccaccctgccctcgtggctctggacctgggggactgcatgctgggtgatgaagccatcaacctcatctgtggcctcctgcccccagatggggccaaatctggcttgaaggagctaacgctgagtgccaaccctggcatcacccctaagggctggagccgccttgccattgccgtggcccacagctcccaggtccgcgtcctcaatctggattacaaccccctgggtgaccatgtggcaggaatgctggctgtagctgtggcctctagtcgtaccctagaggtcctagacttggagggcacagggctcaccaaccagtcagctcagaccctgctggacatggtagaaaattaccccacagctttgcggagcctggtgttggctgagaacagcattagcccagagctgcagcaacagatctgtgacctcctctctgagggagaggaggaggaggaagtggcaggaggggctggcgacacccaggaatgggagagagggcgggagcctgctgcccaccagagaggcagcagctcctggatgtgccccagcgatcccagctctcagatggtgctaatgacgtcaggactaggggacagtctgttggctgagaccgagatgtgactctccactgggcctctgcacaccatttcacttatctatgtcccgagcaccttgccccagatatcagggtcaggccctgggacttgggagggaactggggtcaggggctgcatgggggctctggcagctcctggcagtgtggtgggaaggaagctctggaagctgtgactgagcaacagccttggggggcacttgaacccacggcaatgcctttgaacttggcagctctggctgcaacccgctggctcggaaaagattttatgaactccaaaaaaaat

SEQ ID NO: 9449 - DNA, 977 bp, Homo sapiens
gagggaacagtgccctggattccggcgggggtatggaccttaggaacggggaaggatggaagaatgggcagaagcagcagtaaccgtgcccaacgccatctccacggggcgtgcctccattccgctccccgtcagccctacccactcagccctgccgcctgccgcctgccagttggctgaccccactcccaagggaagagcggcctatcgctcccagctccttgccccgaaccacccagtgtacgcgaacctcgcgggccggcgtggccttggccgggcagggggcggggcgagcgccggtgacgcggccgttgccatgggaactcgccgcccgctcgctctctggagctggagccggagctgccgccagccgcccgcctcaggctctctctgccagccgtgcggccaggcccgcggggtggtcggggggagccgggcggcagagaaggagggagcgggtacggcctcctagccgagaccggtaagccgaagcccttgagccgctcgctgccgctgccgccgccgccgccgcgaccgcgagggacaaggacaagcgccgagcagcgcctgcccaacccccggaacgcgcacccgccccaacgcccagacacggaccgtgcgggccgcccccgctgtcctgacgcggcgcaggacgcctagtttccttgccctcggggcgcggcgtcgccgtaggacgcctccgtcgtcgtctggtctgtctcctgcatcgagcgtgtgcagctggtgtctcctgtactggtgatggatcgggggccgccgcgacctgctgcaaggcgggcggcgcaacgggcgcatccccggagttcaggcgcgcgacctctttgcgcagatcgccggcgccgtgcgctacctgcacgatcatcacctggtgcaccgcgactcaagtgcgaaaacgtgctgctgagcccggacgagcgccggtcaagctcaccgcttcggttcggccgcaggccatg

SEQ ID NO: 9450 - DNA, 426 bp, Homo sapiens
cgtatgtctcttcctttacaggtttggacaaaacaaaggaacgaatgtggaacagaagtttcaaagacctctacggaaagataaagttctcggagattggttggcctacagtatctaagcggtctgtaacatatttgtaaccctaatgacctgctgctgaaggataatcaaaccacagtgactaggaaatcatttcatcattccataaagatctgctgagcccctctaagtgctgaggactatggaaagaggccacagtcagggcagatagtctttgcccttaattgctcaagaatgaagtggatgcaatcctggaactcacagttgggcaggggcagttttcagatatgacaggcctgctttcctgagatatgactcagcccagaataaatatttgtgcttcatcgaagggttttaccattagaa

SEQ ID NO: 9451 - DNA, 388 bp, Homo sapiens
cgcacttggaagggacgaccaatagttctgtgttcctgacctgtcttacagtctttcgcttctatccgcagtggaccatttggctgatcacgtcactctacagctgttctgccacatttgagcacccacattaaagacaaaagttggggagataatgaagaggcaagacagcaatatgggattggctggaaagatgacagactgcatatgcacatcaaataaattccaaacgcagccatctattcccaaggtttggacaaaacaaaggaacgaatgtggaacagaagtttcaaagacctctacggaaagataaagttctcggaggtatcaacctcatatgaaagggtcttttaaaaggtcattttattaaagctatggagaagaaata

SEQ ID NO: 9452 - DNA, 519 bp, Homo sapiens
tctcccagagctccagagcagcacaaaaaggcatccaaatatttcctgtgcttccctgtcctctcacctcaagagggatgcaaaagacaaggctggagtgacctcaagcagtctagcagtcttgcaagttgtatgaactggaaacacaagtccagaggagaacaaggccatcttgaggataccagcaaggatagatcactatgcccggaagccaataggagccatcataaataaacaagaatttctgaggacaaaggtccccctcttgatagacatcaaagtatgatgacttaaggccccagaacttagaggcaactcagggagaaaatggtgggggaaaaaaaactccggaacagacttaataaataattgaccaaaggtagcctgagttgaatatgattgaaattaagttcagttacagaataatgttatatttgttttttgcacagaggattttgcagcctgagacttttacctgcttggctataaagaaataaaacttgtttacctttgcaaaca

SEQ ID NO: 9453 - DNA, 618 bp, Homo sapiens
tggttttctcttcttgatggagcctgtcctttagtagcctcctgagcttgaatatctaaaatgtctttatttctactgtaatattatcaaatatatatctggtctttgtctctgccttctgatatacaactcctaaaatccttgagatctctaaagtgatgtctttttgtatgctagtaagatgactgatggcggacagctcctatgtagcttcaggatagggactggacatctgaaagaccagggcatgattagaggggttgaaactttcagcccaccccccaaactcccagaggttgggggagagggactgaaagtgacgttgatcgccagtggccaatgatttaatcaatcatgcctatgtaatgagggctcctaaaaacccaaaaggacagggttcagagagcttgtggatagccaaatgtgtgggggcttccaggaaggtggacaagaacacgtccacatgctgagagaatggcacttcgcaactccttgcagacagaagctcctgctcttgggactcttctaggcttcatcctgtgtatcttttcatctggctatttgtagcctttaaaatagccttgtaataaacatgtgtttccctgagttctgtgaact

SEQ ID NO: 9454 - DNA, 337 bp, Homo sapiens
agttcatgttgtccagttttgaggtcttgaaagaagttgcaccagtatgagaatagtggatcagttttctctaggatccagaaagcatatcaggcagccttggggtgaggaaaggagcccggcctctccagcagccacacaggcctgcagtaggatggggttggggctggccatgtggatcacttgggcctcatgaggggaaaggaaataccagggggcagaggaggagcatgggggcagctggttgcctaaggagaaggcacctcagggaaggggactgtattcgtttgttttcacactgctataaagaaatacctgagattgggtaatttataaa

SEQ ID NO: 9455 - DNA, 2205 bp, Homo sapiens
agcggagacatatgacagaagactgaacaaccagaagttatgaagataggtactgtgggtgttagaaagattcacggcaaaacagggaagcatctaggctgcttgtggaagtcagaccaaaatagcaggaaggtattgcagcaagatggatttgggaaaggaccaatctcatttgaagcaccatcagacacctgaccctcatcaagaagagaaccattctccagaagtcattggaacctggagtttgagaaacagagaactacttagaaaaagaaaagctgaagtgcatgaaaaggaaacatcacaatggctatttggagaacagaaaaaacgcaagcagcagagaacaggaaaaggaaatcgaagaggcagaaagagacaacaaaacacagaattgaaggtggagcctcagccacagatagaaaaggaaatagtggagaaagcactggcacctatagagaaaaaaactgagccacctgggagcataaccaaagtatttccttcagtagcctccccgcaaaaagttgtgcctgaggaacacttttctgaaatatgtcaagaaagtaacatatatcaggagaatttttctgagtaccaagaaatagcagtacaaaaccattcttctgaaacatgccaacatgtgtctgaacctgaagacctctctcctaaaatgtaccaagaaatatctgtacttcaagacaattcttccaaaatatgccaagacatgaaggaacctgaagacaactctcctaacacatgccaagtaatatctgtaattcaagaccatcctttcaaaatgtaccaagatatggctaaacgagaagatctggctcctaaaatgtgccaagaagctgctgtacccaaaatccttccttgtccaacatctgaagacacagctgatctggcaggatgctctcttcaagcatatccaaaaccagatgtgcctaaaggctatattcttgacacagaccaaaatccagcagaaccagaggaatacaatgaaacagatcaaggaatagctgagacagaaggcctttttcctaaaatacaagaaatagctgagcctaaagacctttctacaaaaacacaccaagaatcagctgaacctaaataccttcctcataaaacatgtaacgaaattattgtgcctaaagccccctctcataaaacaatccaagaaacacctcattctgaagactattcaattgaaataaaccaagaaactcctgggtctgaaaaatattcacctgaaacgtatcaagaaatacctgggcttgaagaatattcacctgaaatataccaagaaacatcccagcttgaagaatattcacctgaaatataccaagaaacaccggggcctgaagacctctctactgagacatataaaaataaggatgtgcctaaagaatgctttccagaaccacaccaagaaacaggtgggccccaaggccaggatcctaaagcacaccaggaagatgctaaagatgcttatacttttcctcaagaaatgaaagaaaaacccaaagaagagccaggaataccagcaattctgaatgagagtcatccagaaaatgatgtctatagttatgttttgttttaacaatgctcaaccataaagttgtggtccaatggaacatacagcttaatagtttatgcgtgattttctcaaaatattgtaaaacttttgacaatgctcattaatattattttttctatttgtagaccatatctgaaagaaataacattttttaaggctctaccacatagacaatatcatgctagaatgtgtgtgtgtgtgtgtgtgtgtgtgtgtatgtatgtataggtcggggagaggatagtggtgggaacagacaaataaggaagcggggaggactggataattggttttcccccctaagaacatttatttacgtcttaagagcagataagtgactaagactgaacacatacattttgtggagtatatagttttcttgtaaatgctgttcaattattaatgtaacagtagcatcaaaattttattcaggctttagttgactcttttggtcagttttaacaattctccttaaaagatattttggagtgatgaatgtagtttacttttgtatttgaattttgattttctatttttattttttaaatattgtatttgtgcacaatgtacattaaatcattattacatgctgaactgtgtggatacca

SEQ ID NO: 9456 - DNA, 1632 bp, Homo sapiens
agcggagacatatgacagaagactgaacaaccagaagttatgaagataggtactgtgggtgttagaaagattcacggcaaaacagggaagcatctaggctgcttgtggaagtcagaccaaaatagcaggaaggtattgcagcaagatggatttgggaaaggaccaatctcatttgaagcaccatcagacacctgaccctcatcaagaagagaaccattctccagaagtcattggaacctggagtttgagaaacagagaactacttagaaaaagaaaagctgaagtgcatgaaaaggaaacatcacaatggctatttggagaacagaaaaaacgcaagcagcagagaacaggaaaaggaaatcgaagaggcagaaagagacaacaaaacacagaattgaaggtggagcctcagccacagatagaaaaggaaatagtggagaaagcactggcacctatagagaaaaaaactgagccacctgggagcataaccaaagtatttccttcagtagcctccccgcaaaaagttgtgcctgaggaacacttttctgaaatatgtcaagaaagtaacatatatcaggagaatttttctgagtaccaagaaatagcagtacaaaaccattcttctgaaacatgccaacatgtgtctgaacctgaagacctctctcctaaaatgtaccaagaaatatctgtacttcaagacaattcttccaaaatatgccaagacatgaaggaacctgaagacaactctcctaacacatgccaagtaatatctgtaattcaagaccatcctttcaaaatgtaccaagatatggctaaacgagaagatctggctcctaaaatgtgccaagaagctgctgtacccaaaatccttccttgtccaacatctgaagacacagctgatctggcaggatgctctcttcaagcatatccaaaaccagatgtgcctaaaggctatattcttgacacagaccaaaatccagcagaaccagaggaatacaatgaaacagatcaaggaatagctgagacagaaggcctttttcctaaaatacaagaaatagctgagcctaaagacctttctacaaaaacacaccaagaatcagctgaacctaaataccttcctcataaaacatgtaacgaaattattgtgcctaaagccccctctcataaaacaatccaagaaacacctcattctgaagactattcaattgaaataaaccaagaaactcctgggtctgaaaaatattcacctgaaacgtatcaagaaatacctgggcttgaagaatattcacctgaaatataccaagaaacatcccagcttgaagaatattcacctgaaatataccaagaaacaccggggcctgaagacctctctactgagacatataaaaataaggatgtgcctaaagaatgctttccagaaccacaccaagaaacaggtgggccccaaggccaggatcctaaagcacaccaggaagatgctaaagatgcttatacttttcctcaagaaatgaaagaaaaacccaaagaagagccaggaataccagcaattctgaatgagagtcatccagaaaatgatgtctatagttatgttttgttttaacaatgctcaaccataaagttgtggtccaatgg

SEQ ID NO: 9457 - DNA, 2141 bp, Homo sapiens
tagatgtttttgatattttaaaaaagcatctaggctgcttgtggaagtcagaccaaaatagcaggaaggtattgcagcaagatggatttgggaaaggaccaatctcatttgaagcaccatcagacacctgaccctcatcaagaagagaaccattctccagaagtcattggaacctggagtttgagaaacagagaactacttagaaaaagaaaagctgaagtgcatgaaaaggaaacatcacaatggctatttggagaacagaaaaaacgcaagcagcagagaacaggaaaaggaaatcgaagaggcagaaagagacaacaaaacacagaattgaaggtggagcctcagccacagatagaaaaggaaatagtggagaaagcactggcacctatagagaaaaaaactgagccacctgggagcataaccaaagtatttccttcagtagcctccccgcaaaaagttgtgcctgaggaacacttttctgaaatatgtcaagaaagtaacatatatcaggagaatttttctgagtaccaagaaatagcagtacaaaaccattcttctgaaacatgccaacatgtgtctgaacctgaagacctctctcctaaaatgtaccaagaaatatctgtacttcaagacaattcttccaaaatatgccaagacatgaaggaacctgaagacaactctcctaacacatgccaagtaatatctgtaattcaagaccatcctttcaaaatgtaccaagatatggctaaacgagaagatctggctcctaaaatgtgccaagaagctgctgtacccaaaatccttccttgtccaacatctgaagacacagctgatctggcaggatgctctcttcaagcatatccaaaaccagatgtgcctaaaggctatattcttgacacagaccaaaatccagcagaaccagaggaatacaatgaaacagatcaaggaatagctgagacagaaggcctttttcctaaaatacaagaaatagctgagcctaaagacctttctacaaaaacacaccaagaatcagctgaacctaaataccttcctcataaaacatgtaacgaaattattgtgcctaaagccccctctcataaaacaatccaagaaacacctcattctgaagactattcaattgaaataaaccaagaaactcctgggtctgaaaaatattcacctgaaacgtatcaagaaatacctgggcttgaagaatattcacctgaaatataccaagaaacatcccagcttgaagaatattcacctgaaatataccaagaaacaccggggcctgaagacctctctactgagacatataaaaataaggatgtgcctaaagaatgctttccagaaccacaccaagaaacaggtgggccccaaggccaggatcctaaagcacaccaggaagatgctaaagatgcttatacttttcctcaagaaatgaaagaaaaacccaaagaagagccaggaataccagcaattctgaatgagagtcatccagaaaatgatgtctatagttatgttttgttttaacaatgctcaaccataaagttgtggtccaatggaacatacagcttaatagtttatgcgtgattttctcaaaatattgtaaaacttttgacaatgctcattaatattattttttctatttgtagaccatatctgaaagaaataacattttttaaggctctaccacatagacaatatcatgctagaatgtgtgtgtgtgtgtgtgtgtgtgtgtgtatgtatgtataggtcggggagaggatagtggtgggaacagacaaataaggaagcggggaggactggataattggttttcccccctaagaacatttatttacgtcttaagagcagataagtgactaagactgaacacatacattttgtggagtatatagttttcttgtaaatgctgttcaattattaatgtaacagtagcatcaaaattttattcaggctttagttgactcttttggtcagttttaacaattctccttaaaagatattttggagtgatgaatgtagtttacttttgtatttgaattttgattttctatttttattttttaaatattgtatttgtgcacaatgtacattaaatcattattacatgctgaactgtgtggatacca

SEQ ID NO: 9458 - DNA, 2209 bp, Homo sapiens
gggcgattatggggactacagtgagccaagcctcccaccggatcatactgtggagacagaaaagtgaatcaggagctgtatctgctctctaaggcatctaggctgcttgtggaagtcagaccaaaatagcaggaaggtattgcagcaagatggatttgggaaaggaccaatctcatttgaagcaccatcagacacctgaccctcatcaagaagagaaccattctccagaagtcattggaacctggagtttgagaaacagagaactacttagaaaaagaaaagctgaagtgcatgaaaaggaaacatcacaatggctatttggagaacagaaaaaacgcaagcagcagagaacaggaaaaggaaatcgaagaggcagaaagagacaacaaaacacagaattgaaggtggagcctcagccacagatagaaaaggaaatagtggagaaagcactggcacctatagagaaaaaaactgagccacctgggagcataaccaaagtatttccttcagtagcctccccgcaaaaagttgtgcctgaggaacacttttctgaaatatgtcaagaaagtaacatatatcaggagaatttttctgagtaccaagaaatagcagtacaaaaccattcttctgaaacatgccaacatgtgtctgaacctgaagacctctctcctaaaatgtaccaagaaatatctgtacttcaagacaattcttccaaaatatgccaagacatgaaggaacctgaagacaactctcctaacacatgccaagtaatatctgtaattcaagaccatcctttcaaaatgtaccaagatatggctaaacgagaagatctggctcctaaaatgtgccaagaagctgctgtacccaaaatccttccttgtccaacatctgaagacacagctgatctggcaggatgctctcttcaagcatatccaaaaccagatgtgcctaaaggctatattcttgacacagaccaaaatccagcagaaccagaggaatacaatgaaacagatcaaggaatagctgagacagaaggcctttttcctaaaatacaagaaatagctgagcctaaagacctttctacaaaaacacaccaagaatcagctgaacctaaataccttcctcataaaacatgtaacgaaattattgtgcctaaagccccctctcataaaacaatccaagaaacacctcattctgaagactattcaattgaaataaaccaagaaactcctgggtctgaaaaatattcacctgaaacgtatcaagaaatacctgggcttgaagaatattcacctgaaatataccaagaaacatcccagcttgaagaatattcacctgaaatataccaagaaacaccggggcctgaagacctctctactgagacatataaaaataaggatgtgcctaaagaatgctttccagaaccacaccaagaaacaggtgggccccaaggccaggatcctaaagcacaccaggaagatgctaaagatgcttatacttttcctcaagaaatgaaagaaaaacccaaagaagagccaggaataccagcaattctgaatgagagtcatccagaaaatgatgtctatagttatgttttgttttaacaatgctcaaccataaagttgtggtccaatggaacatacagcttaatagtttatgcgtgattttctcaaaatattgtaaaacttttgacaatgctcattaatattattttttctatttgtagaccatatctgaaagaaataacattttttaaggctctaccacatagacaatatcatgctagaatgtgtgtgtgtgtgtgtgtgtgtgtgtgtatgtatgtataggtcggggagaggatagtggtgggaacagacaaataaggaagcggggaggactggataattggttttcccccctaagaacatttatttacgtcttaagagcagataagtgactaagactgaacacatacattttgtggagtatatagttttcttgtaaatgctgttcaattattaatgtaacagtagcatcaaaattttattcaggctttagttgactcttttggtcagttttaacaattctccttaaaagatattttggagtgatgaatgtagtttacttttgtatttgaattttgattttctatttttattttttaaatattgtatttgtgcacaatgtacattaaatcattattacatgctgaactgtgtggatacca

SEQ ID NO: 9459 - DNA, 2538 bp, Homo sapiens
aggaataggtataatatggccactcatgcctatctacctgacttcttaacttcaagaagtgcttttgcagcttttgaccccttacagtatacctcatttgatatatactgtagcaacttagaattctttacacaaaataatgtatttgataatcaagccatatacagcatccacctgcaggctgcacagacgaggagctgtgccaggtctagaaactcgatttgtatgagtttactcaggggtagggaagtaacacacaaagactaaatgcaaagagactagtgtataaaccagaatgccactctattaatttgtaatgagaattatttattttccataacaaaactttaagaatatgctataacacacgcacgcacgcatacgcgcatgcactaccctcaccaagaaggctcctggtaagcatggtatcaatgccacgaagtcctggagaaacattccctctcctaagaattgagaacatctagagctgctccttcattttacaaacaaggagattgaggcccagagagattaagtgactagttcatgatacttgtgcaatgaggcagtgggggacctggcactgttattacaagcatttatttgaattctgtagtaccactgctgacactaattctgttctttctgcagagaacagaaaaaacgcaagcagcagagaacaggaaaaggaaatcgaagaggcagaaagagacaacaaaacacagaattgaaggtggagcctcagccacagatagaaaaggaaatagtggagaaagcactggcacctatagagaaaaaaactgagccacctgggagcataaccaaagtatttccttcagtagcctccccgcaaaaagttgtgcctgaggaacacttttctgaaatatgtcaagaaagtaacatatatcaggagaatttttctgagtaccaagaaatagcagtacaaaaccattcttctgaaacatgccaacatgtgtctgaacctgaagacctctctcctaaaatgtaccaagaaatatctgtacttcaagacaattcttccaaaatatgccaagacatgaaggaacctgaagacaactctcctaacacatgccaagtaatatctgtaattcaagaccatcctttcaaaatgtaccaagatatggctaaacgagaagatctggctcctaaaatgtgccaagaagctgctgtacccaaaatccttccttgtccaacatctgaagacacagctgatctggcaggatgctctcttcaagcatatccaaaaccagatgtgcctaaaggctatattcttgacacagaccaaaatccagcagaaccagaggaatacaatgaaacagatcaaggaatagctgagacagaaggcctttttcctaaaatacaagaaatagctgagcctaaagacctttctacaaaaacacaccaagaatcagctgaacctaaataccttcctcataaaacatgtaacgaaattattgtgcctaaagccccctctcataaaacaatccaagaaacacctcattctgaagactattcaattgaaataaaccaagaaactcctgggtctgaaaaatattcacctgaaacgtatcaagaaatacctgggcttgaagaatattcacctgaaatataccaagaaacatcccagcttgaagaatattcacctgaaatataccaagaaacaccggggcctgaagacctctctactgagacatataaaaataaggatgtgcctaaagaatgctttccagaaccacaccaagaaacaggtgggccccaaggccaggatcctaaagcacaccaggaagatgctaaagatgcttatacttttcctcaagaaatgaaagaaaaacccaaagaagagccaggaataccagcaattctgaatgagagtcatccagaaaatgatgtctatagttatgttttgttttaacaatgctcaaccataaagttgtggtccaatggaacatacagcttaatagtttatgcgtgattttctcaaaatattgtaaaacttttgacaatgctcattaatattattttttctatttgtagaccatatctgaaagaaataacattttttaaggctctaccacatagacaatatcatgctagaatgtgtgtgtgtgtgtgtgtgtgtgtgtgtatgtatgtataggtcggggagaggatagtggtgggaacagacaaataaggaagcggggaggactggataattggttttcccccctaagaacatttatttacgtcttaagagcagataagtgactaagactgaacacatacattttgtggagtatatagttttcttgtaaatgctgttcaattattaatgtaacagtagcatcaaaattttattcaggctttagttgactcttttggtcagttttaacaattctccttaaaagatattttggagtgatgaatgtagtttacttttgtatttgaattttgattttctatttttattttttaaatattgtatttgtgcacaatgtacattaaatcattattacatgctgaactgtgtggatacca

SEQ ID NO: 9460 - DNA, 1827 bp, Homo sapiens
agcggagacatatgacagaagactgaacaaccagaagttatgaagataggtactgtgggtgttagaaagattcacggcaaaacagggaagcatctaggctgcttgtggaagtcagaccaaaatagcaggaaggtattgcagcaagatggatttgggaaaggaccaatctcatttgaagcaccatcagacacctgaccctcatcaagaagagaaccattctccagaagtcattggaacctggagtttgagaaacagagaactacttagaaaaagaaaagctgaagtgcatgaaaaggaaacatcacaatggctatttggagaacagaaaaaacgcaagcagcagagaacaggaaaaggaaatcgaagaggcagaaagagacaacaaaacacagaattgaaggtggagcctcagccacagatagaaaaggaaatagtggagaaagcactggcacctatagagaaaaaaactgagccacctgggagcataaccaaagtatttccttcagtagcctccccgcaaaaagttgtgcctgaggaacacttttctgaaatatgtcaagaaagtaacatatatcaggagaatttttctgagtaccaagaaatagcagtacaaaaccattcttctgaaacatgccaacatgtgtctgaacctgaagacctctctcctaaaatgtaccaagaaatatctgtacttcaagacaattcttccaaaatatgccaagacatgaaggaacctgaagacaactctcctaacacatgccaagtaatatctgtaattcaagaccatcctttcaaaatgtaccaagatatggctaaacgagaagatctggctcctaaaatgtgccaagaagctgctgtacccaaaatccttccttgtccaacatctgaagacacagctgatctggcaggatgctctcttcaagcatatccaaaaccagatgtgcctaaaggctatattcttgacacagaccaaaatccagcagaaccagaggaatacaatgaaacagatcaaggaatagctgagacagaaggcctttttcctaaaatacaagaaatagctgagcctaaagacctttctacaaaaacacaccaggaagatgctaaagatgcttatacttttcctcaagaaatgaaagaaaaacccaaagaagagccaggaataccagcaattctgaatgagagtcatccagaaaatgatgtctatagttatgttttgttttaacaatgctcaaccataaagttgtggtccaatggaacatacagcttaatagtttatgcgtgattttctcaaaatattgtaaaacttttgacaatgctcattaatattattttttctatttgtagaccatatctgaaagaaataacattttttaaggctctaccacatagacaatatcatgctagaatgtgtgtgtgtgtgtgtgtgtgtgtgtgtatgtatgtataggtcggggagaggatagtggtgggaacagacaaataaggaagcggggaggactggataattggttttcccccctaagaacatttatttacgtcttaagagcagataagtgactaagactgaacacatacattttgtggagtatatagttttcttgtaaatgctgttcaattattaatgtaacagtagcatcaaaattttattcaggctttagttgactcttttggtcagttttaacaattctccttaaaagatattttggagtgatgaatgtagtttacttttgtatttgaattttgattttctatttttattttttaaatattgtatttgtgcacaatgtacattaaatcattattacatgctgaactgtgtggatacca

SEQ ID NO: 9461 - DNA, 483 bp, Homo sapiens
aaatattcacctgaaacgtatcaagaaatacctgggcttgaagaatattcacctgaaatataccaagaaacatcccagcttgaagaatattcacctgaaatataccaagaaacaccggggcctgaagacctctctactgagacatataaaaataaggatgtgcctaaagaatgctttccagaaccacaccaagaaacaggtgggccccaaggccaggatcctaaagcacaccaggaagatgctaaagatgcttatacttttcctcaaggtaagggctgtttatagcaccaaggtaggtacatctcccccagagtagtgatttacaactttctctgacaatcctgggtattccctgttatttcaatggatactgtgaatttcattgactagttttaagtgaacaatattttcatgcaaccaacgtctgtcttggcatatttcaaagagttaaaaaaattgaaaatgcaagcatgtacattaagt

SEQ ID NO: 9462 - DNA, 1929 bp, Homo sapiens
tattgttggtaggcacatcgtgtcaagtgaagtagttttataggtatgggttttttctcccccttcaccagggtgggtggaataagttgatttggccaatgtgtaatatttaaactgttctgtaaaataagtgtctggccattggtatgatttctgtgtgtgaaaggtcccaaaatcaaaatggtacatccataatcagccaccatttaacccttccttgttctaaaacaaaaaccaaagggcgctggttggtagggtgaggtgggggagtattttaatttttggaatttgggaagcagacagctttactttgtaaggttggaacagcagcactatacatgaaatataaaccaaaaacctttactgtttctaaatttcctagattgctattatttggttgtaagttgagtattccacagaaagtggtaattatctcttctctcttcctccattagaaaattaggtaaataatggattcctataatgggagcatcaccacttattaaaacacacatagaatgatgaattaaaaaagttttctaggattgtcttttattctgccacatttattgataaacagtgaaggaatttttaaaaaatttttaagaattgtttgtcacgtcatttttagaaatgttctacctgtatatggtaatgtccagttttaaaaatatggacatcttcaatcttaaacatttctatttagctgattggttctcacatatacttctaaaagaacttttatgttataagagttacttttggataagatttattaatctcagttacctactattctgacattttaggaaggaggtaattgtttttaatgatggataaacttgtgctggtgttttggatcttatgatgctgagcatgttctgcactggtgctaatgtctaatataattttatatttacacacatacgtgctacccagagattaatttagtccatatgaactattgacccattgttcattgagacagcaacatacgcactcctaaatcagtgtgtttagacttttcaagtatctaactcatttccaaacatgtaccatgttttataaacctcttgatttccagcaacatactatagaaaacacctgctactcaaaacacaacttctcagtgtcatccattgctgtcgtgagagacaacatagcaatatctggtatgttgcaagctttcaagatagcctgaacttaaaaagttggtgcattagttgtatctgatggatataaatttgcctcctagttcactttgtgtcaagagctaaaactgtgaacctaactttctcttattggtgggtaataactgaaaataaagatttattttcatgctcacttcttaaaagtcataaaaacaatcaaataggatcatgtttattgtcatgtgtttcctggtttctgacctgtgtgcacacccctgtgtgtttataatttttaaattgaattttatatggggtttttatttgctaaaaaccaggctgttgaatcacatttgggaagggtacttatcttaatgactaatgacttaattgggaaagttgaattcttgtaaaatacaaaatccaaggacttcttggatttaatctaattgtcacttcttagcagatcacttttttgataatgaaagttaagcatactgaatgctacttttgattgacaaactggctataatagtctaggggaaaaatccctaaacagataaagattcctaaagtaatggtggcagctgatgtttcagtgaacttttatcttgatgcgtttaaatggaagtaatgccagacctgagatttttaaggcatttttacagcttgtattgaaatgattggagacatggtttctttattagctattttgagacctgtggagttaagcaaagaccccaaaagagcaaagaccccaaaagagcaaagaccccaaaag

SEQ ID NO: 9463 - DNA, 4596 bp, Homo sapiens
tattgttggtaggcacatcgtgtcaagtgaagtagttttataggtatgggttttttctcccccttcaccagggtgggtggaataagttgatttggccaatgtgtaatatttaaactgttctgtaaaataagtgtctggccattggtatgatttctgtgtgtgaaaggtcccaaaatcaaaatggtacatccataatcagccaccatttaacccttccttgttctaaaacaaaaaccaaagggcgctggttggtagggtgaggtgggggagtattttaatttttggaatttgggaagcagacagctttactttgtaaggttggaacagcagcactatacatgaaatataaaccaaaaacctttactgtttctaaatttcctagattgctattatttggttgtaagttgagtattccacagaaagtggtaattatctcttctctcttcctccattagaaaattaggtaaataatggattcctataatgggagcatcaccacttattaaaacacacatagaatgatgaattaaaaaagttttctaggattgtcttttattctgccacatttattgataaacagtgaaggaatttttaaaaaatttttaagaattgtttgtcacgtcatttttagaaatgttctacctgtatatggtaatgtccagttttaaaaatatggacatcttcaatcttaaacatttctatttagctgattggttctcacatatacttctaaaagaacttttatgttataagagttacttttggataagatttattaatctcagttacctactattctgacattttaggaaggaggtaattgtttttaatgatggataaacttgtgctggtgttttggatcttatgatgctgagcatgttctgcactggtgctaatgtctaatataattttatatttacacacatacgtgctacccagagattaatttagtccatatgaactattgacccattgttcattgagacagcaacatacgcactcctaaatcagtgtgtttagacttttcaagtatctaactcatttccaaacatgtaccatgttttataaacctcttgatttccagcaacatactatagaaaacacctgctactcaaaacacaacttctcagtgtcatccattgctgtcgtgagagacaacatagcaatatctggtatgttgcaagctttcaagatagcctgaacttaaaaagttggtgcattagttgtatctgatggatataaatttgcctcctagttcactttgtgtcaagagctaaaactgtgaacctaactttctcttattggtgggtaataactgaaaataaagatttattttcatgctcacttcttaaaagtcataaaaacaatcaaataggatcatgtttattgtcatgtgtttcctggtttctgacctgtgtgcacacccctgtgtgtttataatttttaaattgaattttatatggggtttttatttgctaaaaaccaggctgttgaatcacatttgggaagggtacttatcttaatgactaatgacttaattgggaaagttgaattcttgtaaaatacaaaatccaaggacttcttggatttaatctaattgtcacttcttagcagatcacttttttgataatgaaagttaagcatactgaatgctacttttgattgacaaactggctataatagtctaggggaaaaatccctaaacagataaagattcctaaagtaatggtggcagctgatgtttcagtgaacttttatcttgatgcgtttaaatggaagtaatgccagacctgagatttttaaggcatttttacagcttgtattgaaatgattggagacatggtttctttattagctattttgagacctgtggagttaagcaagacttttaaaaattggcaccatatacatctagttagttcctttactcttatttttttaaataaaagtagtacacatcatttccagggttgtaaatatatttggggcttgtttttggtatggatttaaaaggaggatattaagtattcattctaattttgttatttttctagttgccagagatggttgcactgaaatagaacagggagttgcatacaaagcctaaatgtgtattggatttcgaaaatactaggttggtgcaattggttttgtaccaacctaacatgtctttaggaaagtaccatcatgtggaaggaaacaacaggtgttaaaaggttcaaaggaatgagaaataggaagttactagaacctaactgatgttgaccttagaggtaagattattcaggtatattagtggacctccagtccaatggtatagcaaattccagggatctcaggtgcatgcaattttactttctaaagtaaacacttagaaaatagattataacccagacgttttggattatactgagacaaatatgtaaataagttttagcaagtctgaacatgtaccagcgagatcttcaggttaactaagaaaagcccagaaacttcattatttactgtgctttgtatggcataactggtaacaaggcagtaaaatgttacatatttgaactggaccatagtaattaaatgatttatcaatatcatttgcaagataattgtcaggttgagttaatagtaagtggcagcttcccagaaatttgggttatttggcctaggctgtgccctgggattacctcttcatcttccttgacttttaagttcaaatttggaggttatgtgaagtgattgaaataaatctttcaggctgaggaagtcggtaatttcaagaatatagtgaaaacaaggttgtaatctaaacatgagaagcttaagtttaggaaatggttagaatataaattgctaaagccatcatgattttggccacagatgaaaatatgaacactggaaatgagcgccatttaaatgagatgctgtatgtaagccaggggtcagcaaagttcagcctgtgacctggtgtgtgtgtgtgtgtgtgtgtgtgtgtgtgtgtgtgtgtgtgtgtccgtgtccctgagttaagaatggtttttaggcttgtataggattaaaaaaaaaaaaaaacccacagaaaaatgtaggcagcccagcataagataccgcctttcacagaaatgtttgctgaccccggaactgtcactctcgggttacaagagtttgtttctttgaaacagtctggctctgtcacccaggctggagtgcagtggcatgatctcaggtcactgcagcctccacctcccgggttcaagcaattctgcctcagcctcctgagtagctgggattacaggtgtgcaccaccacagacagctaattttacaggtgtacaccaccacacccaagaatcacttgaacccgggaggtgggggttgcagtgagccaagatcatggcactgtactccagtctgggtgacacactgtctgaaaaataaaagtttagttctaggtacaaattaagtggtctacccaacaggaagctgtgaaattagaagtaattttaaagcatactttacacctctatataatcaaagtaagggcaagataaaacttgttagtaaaacatgttttattattttttagataggtagcctgcaacataaaatatattttgaaagctgttaaggggtgtataatctgttaaaaaataccatgattagtatttcacatttagtgactcagatccctttgtgtaagtcctttgcgttgtgcaaagaggtttttctatgagatgagaattatgaacacttcatataggtaaattccataggttgagctggggcagaaattaatggctcctggagattgcatcttttttttttttttttgagcttagaattcccatttggacagaatttagcttttgtgctgttgattacttctgtactaaactggtagccaattgttcacttctaaatggaagggaaaaagttacccacacaagttagaaaatgatttaccgaattatttttttgagttagtatgtatatactgttttaaatcagtaatgtttgttccttttgctgcccatttgggagtatgtggcaattcctagtgctcttgtatgacattactcttcttgagacttgtatatgcaagaaagtatatataaaagatgcctggtggtaactttgtatctgagttctgattcattatggacttttagaaatctatttagataattggttcatactaggtgctcaattactctgaccttgtgtggcttaatccttaaatagttgctttaggtgttactgggtggaagcatggaaagtgaagggctaatattaaggatttttatgtattactgagtagggaaagtgggaagtagcttatctttggacagttgtattactttgcactaatcaccttgtttgcagttgtagctgattcagttctagattttaggaccaaaaagatctctaatttaaagaaacagtttttatatacctagaatgaagattctgtttaaagcggttttggttaacttggttcttgacatttgcctaaaattttgttggattgggactaaaatgttctattagccaatgaataacgtccaagtaaatttttgttttattttgggaactttgtata

SEQ ID NO: 9464 - DNA, 4127 bp, Homo sapiens
tattgttggtaggcacatcgtgtcaagtgaagtagttttataggtatgggttttttctcccccttcaccagggtgggtggaataagttgatttggccaatgtgtaatatttaaactgttctgtaaaataagtgtctggccattggtatgatttctgtgtgtgaaaggtcccaaaatcaaaatggtacatccataatcagccaccatttaacccttccttgttctaaaacaaaaaccaaagggcgctggttggtagggtgaggtgggggagtattttaatttttggaatttgggaagcagacagctttactttgtaaggttggaacagcagcactatacatgaaatataaaccaaaaacctttactgtttctaaatttcctagattgctattatttggttgtaagttgagtattccacagaaagtggtaattatctcttctctcttcctccattagaaaattaggtaaataatggattcctataatgggagcatcaccacttattaaaacacacatagaatgatgaattaaaaaagttttctaggattgtcttttattctgccacatttattgataaacagtgaaggaatttttaaaaaatttttaagaattgtttgtcacgtcatttttagaaatgttctacctgtatatggtaatgtccagttttaaaaatatggacatcttcaatcttaaacatttctatttagctgattggttctcacatatacttctaaaagaacttttatgttataagagttacttttggataagatttattaatctcagttacctactattctgacattttaggaaggaggtaattgtttttaatgatggataaacttgtgctggtgttttggatcttatgatgctgagcatgttctgcactggtgctaatgtctaatataattttatatttacacacatacgtgctacccagagattaatttagtccatatgaactattgacccattgttcattgagacagcaacatacgcactcctaaatcagtgtgtttagacttttcaagtatctaactcatttccaaacatgtaccatgttttataaacctcttgatttccagcaacatactatagaaaacacctgctactcaaaacacaacttctcagtgtcatccattgctgtcgtgagagacaacatagcaatatctggtatgttgcaagctttcaagatagcctgaacttaaaaagttggtgcattagttgtatctgatggatataaatttgcctcctagttcactttgtgtcaagagctaaaactgtgaacctaactttctcttattggtgggtaataactgaaaataaagatttattttcatgctcacttcttaaaagtcataaaaacaatcaaataggatcatgtttattgtcatgtgtttcctggtttctgacctgtgtgcacacccctgtgtgtttataatttttaaattgaattttatatggggtttttatttgctaaaaaccaggctgttgaatcacatttgggaagggtacttatcttaatgactaatgacttaattgggaaagttgaattcttgtaaaatacaaaatccaaggacttcttggatttaatctaattgtcacttcttagcagatcacttttttgataatgaaagttaagcatactgaatgctacttttgattgacaaactggctataatagtctaggggaaaaatccctaaacagataaagattcctaaagtaatggtggcagctgatgtttcagtgaacttttatcttgatgcgtttaaatggaagtaatgccagacctgagatttttaaggcatttttacagcttgtattgaaatgattggagacatggtttctttattagctattttgagacctgtggagttaagcaagacttttaaaaattggcaccatatacatctagttagttcctttactcttatttttttaaataaaagtagtacacatcatttccagggttgtaaatatatttggggcttgtttttggtatggatttaaaaggaggatattaagtattcattctaattttgttatttttctagttgccagagatggttgcactgaaatagaacagggagttgcatacaaagcctaaatgtgtattggatttcgaaaatactaggttggtgcaattggttttgtaccaacctaacatgtctttaggaaagtaccatcatgtggaaggaaacaacaggtgttaaaaggttcaaaggaatgagaaataggaagttactagaacctaactgatgttgaccttagaggtaagattattcaggtatattagtggacctccagtccaatggtatagcaaattccagggatctcaggtgcatgcaattttactttctaaagtaaacacttagaaaatagattataacccagacgttttggattatactgagacaaatatgtaaataagttttagcaagtctgaacatgtaccagcgagatcttcaggttaactaagaaaagcccagaaacttcattatttactgtgctttgtatggcataactggtaacaaggcagtaaaatgttacatatttgaactggaccatagtaattaaatgatttatcaatatcatttgcaagataattgtcaggttgagttaatagtaagtggcagcttcccagaaatttgggttatttggcctaggctgtgccctgggattacctcttcatcttccttgacttttaagttcaaatttggaggttatgtgaagtgattgaaataaatctttcaggctgaggaagtcggtaatttcaagaatatagtgaaaacaaggttgtaatctaaacatgagaagcttaagtttaggaaatggttagaatataaattgctaaagccatcatgattttggccacagatgaaaatatgaacactggaaatgagcgccatttaaatgagatgctgtatgtaagccaggggtcagcaaagttcagcctgtgacctggtgtgtgtgtgtgtgtgtgtgtgtgtgtgtgtgtgtgtgtgtgtgtccgtgtccctgagttaagaatggtttttaggcttgtataggattaaaaaaaaaaaaaaacccacagaaaaatgtaggcagcccagcataagataccgcctttcacagaaatgtttgctgaccccggaactgtcactctcgggttacaagagtttgtttctttgaaacagtctggctctgtcacccaggctggagtgcagtggcatgatctcaggtcactgcagcctccacctcccgggttcaagcaattctgcctcagcctcctgagtagctgggattacaggtgtgcaccaccacagacagctaattttacaggtgtacaccaccacacccaagaatcacttgaacccgggaggtgggggttgcagtgagccaagatcatggcactgtactccagtctgggtgacacactgtctgaaaaataaaagtttagttctaggtacaaattaagtggtctacccaacaggaagctgtgaaattagaagtaattttaaagcatactttacacctctatataatcaaagtaagggcaagataaaacttgttagtaaaacatgttttattattttttagataggtagcctgcaacataaaatatattttgaaagctgttaaggggtgtataatctgttaaaaaataccatgattagtatttcacatttagtgactcagatccctttgtgtaagtcctttgcgttgtgcaaagaggtttttctatgagatgagaattatgaacacttcatataggtaaattccataggttgagctggggcagaaattaatggctcctggagattgcatcttttttttttttttttgagcttagaattcccatttggacagaatttagcttttgtgctgttgattacttctgtactaaactggtagccaattgttcacttctaaatggaagggaaaaagttacccacacaagttagaaaatgatttaccgaattatttttttgagttagtatgtatatactgttttaaatcagtaatgtttgttccttttgctgcccatttgggagtatgtggcaattcctagtgctcttgtatgacattactcttcttgagacttgtatatgcaagaaagtatatataaaagatgcctggtggta

SEQ ID NO: 9465 - DNA, 4002 bp, Homo sapiens
  misc_feature (3871)..(3872): n is a, c, g, or t
  misc_feature (3874)..(3874): n is a, c, g, or t
  misc_feature (3881)..(3881): n is a, c, g, or t
  misc_feature (3888)..(3889): n is a, c, g, or t
  misc_feature (3898)..(3898): n is a, c, g, or t
  misc_feature (3914)..(3914): n is a, c, g, or t
  misc_feature (3919)..(3919): n is a, c, g, or t
tattgttggtaggcacatcgtgtcaagtgaagtagttttataggtatgggttttttctcccccttcaccagggtgggtggaataagttgatttggccaatgtgtaatatttaaactgttctgtaaaataagtgtctggccattggtatgatttctgtgtgtgaaaggtcccaaaatcaaaatggtacatccataatcagccaccatttaacccttccttgttctaaaacaaaaaccaaagggcgctggttggtagggtgaggtgggggagtattttaatttttggaatttgggaagcagacagctttactttgtaaggttggaacagcagcactatacatgaaatataaaccaaaaacctttactgtttctaaatttcctagattgctattatttggttgtaagttgagtattccacagaaagtggtaattatctcttctctcttcctccattagaaaattaggtaaataatggattcctataatgggagcatcaccacttattaaaacacacatagaatgatgaattaaaaaagttttctaggattgtcttttattctgccacatttattgataaacagtgaaggaatttttaaaaaatttttaagaattgtttgtcacgtcatttttagaaatgttctacctgtatatggtaatgtccagttttaaaaatatggacatcttcaatcttaaacatttctatttagctgattggttctcacatatacttctaaaagaacttttatgttataagagttacttttggataagatttattaatctcagttacctactattctgacattttaggaaggaggtaattgtttttaatgatggataaacttgtgctggtgttttggatcttatgatgctgagcatgttctgcactggtgctaatgtctaatataattttatatttacacacatacgtgctacccagagattaatttagtccatatgaactattgacccattgttcattgagacagcaacatacgcactcctaaatcagtgtgtttagacttttcaagtatctaactcatttccaaacatgtaccatgttttataaacctcttgatttccagcaacatactatagaaaacacctgctactcaaaacacaacttctcagtgtcatccattgctgtcgtgagagacaacatagcaatatctggtatgttgcaagctttcaagatagcctgaacttaaaaagttggtgcattagttgtatctgatggatataaatttgcctcctagttcactttgtgtcaagagctaaaactgtgaacctaactttctcttattggtgggtaataactgaaaataaagatttattttcatgctcacttcttaaaagtcataaaaacaatcaaataggatcatgtttattgtcatgtgtttcctggtttctgacctgtgtgcacacccctgtgtgtttataatttttaaattgaattttatatggggtttttatttgctaaaaaccaggctgttgaatcacatttgggaagggtacttatcttaatgactaatgacttaattgggaaagttgaattcttgtaaaatacaaaatccaaggacttcttggatttaatctaattgtcacttcttagcagatcacttttttgataatgaaagttaagcatactgaatgctacttttgattgacaaactggctataatagtctaggggaaaaatccctaaacagataaagattcctaaagtaatggtggcagctgatgtttcagtgaacttttatcttgatgcgtttaaatggaagtaatgccagacctgagatttttaaggcatttttacagcttgtattgaaatgattggagacatggtttctttattagctattttgagacctgtggagttaagcaagacttttaaaaattggcaccatatacatctagttagttcctttactcttatttttttaaataaaagtagtacacatcatttccagggttgtaaatatatttggggcttgtttttggtatggatttaaaaggaggatattaagtattcattctaattttgttatttttctagttgccagagatggttgcactgaaatagaacagggagttgcatacaaagcctaaatgtgtattggatttcgaaaatactaggttggtgcaattggttttgtaccaacctaacatgtctttaggaaagtaccatcatgtggaaggaaacaacaggtgttaaaaggttcaaaggaatgagaaataggaagttactagaacctaactgatgttgaccttagaggtaagattattcaggtatattagtggacctccagtccaatggtatagcaaattccagggatctcaggtgcatgcaattttactttctaaagtaaacacttagaaaatagattataacccagacgttttggattatactgagacaaatatgtaaataagttttagcaagtctgaacatgtaccagcgagatcttcaggttaactaagaaaagcccagaaacttcattatttactgtgctttgtatggcataactggtaacaaggcagtaaaatgttacatatttgaactggaccatagtaattaaatgatttatcaatatcatttgcaagataattgtcaggttgagttaatagtaagtggcagcttcccagaaatttgggttatttggcctaggctgtgccctgggattacctcttcatcttccttgacttttaagttcaaatttggaggttatgtgaagtgattgaaataaatctttcaggctgaggaagtcggtaatttcaagaatatagtgaaaacaaggttgtaatctaaacatgagaagcttaagtttaggaaatggttagaatataaattgctaaagccatcatgattttggccacagatgaaaatatgaacactggaaatgagcgccatttaaatgagatgctgtatgtaagccaggggtcagcaaagttcagcctgtgacctggtgtgtgtgtgtgtgtgtgtgtgtgtgtgtgtgtgtgtgtgtgtgtccgtgtccctgagttaagaatggtttttaggcttgtataggattaaaaaaaaaaaaaaacccacagaaaaatgtaggcagcccagcataagataccgcctttcacagaaatgtttgctgaccccggaactgtcactctcgggttacaagagtttgtttctttgaaacagtctggctctgtcacccaggctggagtgcagtggcatgatctcaggtcactgcagcctccacctcccgggttcaagcaattctgcctcagcctcctgagtagctgggattacaggtgtgcaccaccacagacagctaattttacaggtgtacaccaccacacccaagaatcacttgaacccgggaggtgggggttgcagtgagccaagatcatggcactgtactccagtctgggtgacacactgtctgaaaaataaaagtttagttctaggtacaaattaagtggtctacccaacaggaagctgtgaaattagaagtaattttaaagcatactttacacctctatataatcaaagtaagggcaagataaaacttgttagtaaaacatgttttattattttttagataggtagcctgcaacataaaatatattttgaaagctgttaaggggtgtataatctgttaaaaaataccatgattagtatttcacatttagtgactcagatccctttgtgtaagtcctttgcgttgtgcaaagaggtttttctatgagatgagaattatgaacacttcatataggtaaattccataggttgagctggggcagaaattaatggctcctggagattgcatcttttttttttttttttgagcttagaattcccatttggacagaatttagccttgggggcgnngnataactncgtgacnnaacggggtncccatgtggtccactnctaanggggaggggacaaacgttacccgaccaacgttcgaaacacggaatacacagaactaatttctccggacctaagaatggtataa

SEQ ID NO: 9466 - DNA, 1829 bp, Homo sapiens
gctgccgcctactactactaaattcgcggccgctcgacaaacatgagaagcttaagtttaggaaatggttagaatataaattgctaaagccatcatgattttggccacagatgaaaatatgaacactggaaatgagcgccatttaaatgagatgctgtatgtaagccaggggtcagcaaagttcagcctgtgacctggtgtgtgtgtgtgtgtgtgtgtgtgtgtgtgtgtgtgtgtgtgtgtccgtgtccctgagttaagaatggtttttaggcttgtataggattaaaaaaaaaaaaaaacccacagaaaaatgtaggcagcccagcataagataccgcctttcacagaaatgtttgctgaccccggaactgtcactctcgggttacaagagtttgtttctttgaaacagtctggctctgtcacccaggctggagtgcagtggcatgatctcaggtcactgcagcctccacctcccgggttcaagcaattctgcctcagcctcctgagtagctgggattacaggtgtgcaccaccacagacagctaattttacaggtgtacaccaccacacccaagaatcacttgaacccgggaggtgggggttgcagtgagccaagatcatggcactgtactccagtctgggtgacacactgtctgaaaaataaaagtttagttctaggtacaaattaagtggtctacccaacaggaagctgtgaaattagaagtaattttaaagcatactttacacctctatataatcaaagtaagggcaagataaaacttgttagtaaaacatgttttattattttttagataggtagcctgcaacataaaatatattttgaaagctgttaaggggtgtataatctgttaaaaaataccatgattagtatttcacatttagtgactcagatccctttgtgtaagtcctttgcgttgtgcaaagaggtttttctatgagatgagaattatgaacacttcatataggtaaattccataggttgagctggggcagaaattaatggctcctggagattgcatcttttttttttttttttgagcttagaattcccatttggacagaatttagcttttgtgctgttgattacttctgtactaaactggtagccaattgttcacttctaaatggaagggaaaaagttacccacacaagttagaaaatgatttaccgaattatttttttgagttagtatgtatatactgttttaaatcagtaatgtttgttccttttgctgcccatttgggagtatgtggcaattcctagtgctcttgtatgacattactcttcttgagacttgtatatgcaagaaagtatatataaaagatgcctggtggtaactttgtatctgagttctgattcattatggacttttagaaatctatttagataattggttcatactaggtgctcaattactctgaccttgtgtggcttaatccttaaatagttgctttaggtgttactgggtggaagcatggaaagtgaagggctaatattaaggatttttatgtattactgagtagggaaagtgggaagtagcttatctttggacagttgtattactttgcactaatcaccttgtttgcagttgtagctgattcagttctagattttaggaccaaaaagatctctaatttaaagaaacagtttttatatacctagaatgaagattctgtttaaagcggttttggttaacttggttcttgacatttgcctaaaattttgttggattgggactaaaatgttctattagccaatgaataacgtccaagtaaatttttgttttattttgggaactttgtata

SEQ ID NO: 9467 - DNA, 1351 bp, Homo sapiens
gcttgctaaaccattctgctgcgacgcgcggacaccatattatggtaacgatggatgtatgagtcatcagcatgcctataccatatcgaatatcctggcctcatagattagtgttgggatgctccccaatcatggaacgtgcggtccagaccgaggtgttctgctgtctggccagatggagttctagattgctcattgtctcggatctatcgagtctgagacgctccaagcaagctctggatatctagtagtactcctgacttactttacacctctatataatcaaagtaagggcaagataaaacttgttagtaaaacatgttttattattttttagataggtagcctgcaacataaaatatattttgaaagctgttaaggggtgtataatctgttaaaaaataccatgattagtatttcacatttagtgactcagatccctttgtgtaagtcctttgcgttgtgcaaagaggtttttctatgagatgagaattatgaacacttcatataggtaaattccataggttgagctggggcagaaattaatggctcctggagattgcatcttttttttttttttttgagcttagaattcccatttggacagaatttagcttttgtgctgttgattacttctgtactaaactggtagccaattgttcacttctaaatggaagggaaaaagttacccacacaagttagaaaatgatttaccgaattatttttttgagttagtatgtatatactgttttaaatcagtaatgtttgttccttttgctgcccatttgggagtatgtggcaattcctagtgctcttgtatgacattactcttcttgagacttgtatatgcaagaaagtatatataaaagatgcctggtggtaactttgtatctgagttctgattcattatggacttttagaaatctatttagataattggttcatactaggtgctcaattactctgaccttgtgtggcttaatccttaaatagttgctttaggtgttactgggtggaagcatggaaagtgaagggctaatattaaggatttttatgtattactgagtagggaaagtgggaagtagcttatctttggacagttgtattactttgcactaatcaccttgtttgcagttgtagctgattcagttctagattttaggaccaaaaagatctctaatttaaagaaacagtttttatatacctagaatgaagattctgtttaaagcggttttggttaacttggttcttgacatttgcctaaaattttgttggattgggactaaaatgttctattagccaatgaataacgtccaagtaaatttttgttttattttgggaactttgtata

SEQ ID NO: 9468 - DNA, 1372 bp, Homo sapiens
gcttgctaataccattgttctgcgcgcgcggaacacagtaatgtaacgatggatgtattggtcatcaacatgctaacgcaatcgaagtattactggctaagtagagttatgtgtttgggagtgactgcacccagataatggaacgtcgtggtggaagatctgaggtgttactagatgtacttgacagatggaagttctagatgttatgatactgagatatattagagtatagactacaaggagagctgctaatattaagatatatagacttctctgcatgatatactttacacctctatataatcaaagtaagggcaagataaaacttgttagtaaaacatgttttattattttttagataggtagcctgcaacataaaatatattttgaaagctgttaaggggtgtataatctgttaaaaaataccatgattagtatttcacatttagtgactcagatccctttgtgtaagtcctttgcgttgtgcaaagaggtttttctatgagatgagaattatgaacacttcatataggtaaattccataggttgagctggggcagaaattaatggctcctggagattgcatcttttttttttttttttgagcttagaattcccatttggacagaatttagcttttgtgctgttgattacttctgtactaaactggtagccaattgttcacttctaaatggaagggaaaaagttacccacacaagttagaaaatgatttaccgaattatttttttgagttagtatgtatatactgttttaaatcagtaatgtttgttccttttgctgcccatttgggagtatgtggcaattcctagtgctcttgtatgacattactcttcttgagacttgtatatgcaagaaagtatatataaaagatgcctggtggtaactttgtatctgagttctgattcattatggacttttagaaatctatttagataattggttcatactaggtgctcaattactctgaccttgtgtggcttaatccttaaatagttgctttaggtgttactgggtggaagcatggaaagtgaagggctaatattaaggatttttatgtattactgagtagggaaagtgggaagtagcttatctttggacagttgtattactttgcactaatcaccttgtttgcagttgtagctgattcagttctagattttaggaccaaaaagatctctaatttaaagaaacagtttttatatacctagaatgaagattctgtttaaagcggttttggttaacttggttcttgacatttgcctaaaattttgttggattgggactaaaatgttctattagccaatgaataacgtccaagtaaatttttgttttattttgggaactttgtata

SEQ ID NO: 9469 - DNA, 929 bp, Homo sapiens
gtttgtcgtctgtaatgtgggaacaaaaatcttgaactaggcctgctgagagattaagcacccagtagacaataggtgcgaagtaattattaattcccttctctctccctgtcaatttgctggctccagattggatacaatcttcctgctttgaccttgagtctccctccttacaaaatgcaattccatttactgagcatctgaacataattggcacctaaggaatacatgttgagtgactgaaagacctcttcaaggctcaaatgtcctcaagaatctgaagcccagcctgagccttgtgaagatctttgtaactgccttatatccccacactggtttatgcacattcattatcgtttaccatattggcttctagtttttcttaatacatcataagtttctcaagagcaaggactatgtcttacttttctttgtaaacttagctattacaagatatcctgaatatttatttgacaaattactatttgaaagatttaaattgaatcattattctaatatcagtagttaacactgattaatcttgcctgtaatactaattcctagaagtatttgaaaatataatgaaggcattaaaaaggttagtgctcacttcagcagcacatatactgaaaataatacagaaggctgggcacagtggctcaggcctgtaatcccagcactttgggaggctgaggcgggtggatcacgaggtcaggagttcaagaccgacctggccagcatcgtgaaaccccatctctactaaaaatacaaaaattagccggtgtggtggtgggtacctgtaatcccagctactcaggaggctgaggcaggagaatcgcttgtacccgggaggcggaggttgtagtgagccgagactgcgccactgcactccagcctgggcaacagtgtaagacaccatctcaaaaaaa

SEQ ID NO: 9470 - DNA, 2914 bp, Homo sapiens
agtgggctctgcggataactcagacgccattaagctggggaatccaaactctaaaagaaggacgcattttaggtaagatctagtggctagatcttcagggtgggcttcgttcttgtggaaatcagtcaagaaagatcggattcgcggttatttatgcaaatcatctgggtggattgtgtacggagttaaactgcgccttctggaccgggtctgaacaatggagactgcgctagcaaaaacgccacagaaaaggcaagttatgtttcttgctatattgttgcttttgtgggaggctggctctgaggcagttaggtattccataccagaagaaacagaaagtggctattctgtggccaacctggcaaaagacctgggtcttggggtgggggaactggccactcggggcgcgcgaatgcattacaaaggaaacaaagagctcttgcagcttgatataaagaccggcaatttgcttctatatgaaaaactagaccgggaggtgatgtgcggggcgacagaaccctgtatattgcatttccagctcttactagaaaatccagtgcagttttttcaaactgatctgcagctcacagatataaatgaccatgccccagagttcccagagaaggaaatgctcctaaaaatcccagagagcacccagccagggactgtgtttcccttaaaaatagcccaggactttgacataggtagcaacactgttcagaactacacaatcagcccaaattcacactttcatgttgctacgcataatcgcggagatggcagaaaatacccagagctggtgctggacaaagcgctggaccgggaggagcggcctgagctcagcttaacactcactgcactggacggtggggctccgcccaggtccgggaccaccacaattcgcattgtcgtcttggataataatgacaacgcccccgaatttttacaatcattctatgaggtacaggtgcccgagaacagcccccttaactccttagttgtcgttgtctccgctcgagatttagatgcaggagcatatgggagtgtagcctatgctctattccaaggcgatgaagttactcaaccatttgtaatagacgagaaaacagcagaaattcgcctgaaaagggcattggatttcgaggcaactccatattataacgtggaaattgtagccacagatggtgggggcctttcaggaaaatgcactgtggctatagaagtggtggatgtgaatgacaacgcccctgaactcaccatgtctacgctctccagccctaccccagaaaatgccccggaaactgtagttgccgttttcagtgtttctgatccagactccggggacaacggtaggatgatttgctccatccagaatgatctcccctttcttttgaagcccacattaaaaaacttttacaccctagtgacacagagaacactggacagagagagccaagccgagtacaacatcaccatcactgtcaccgacatggggacacccaggctgaaaaccgagcacaacataacggtcctggtctccgacgtcaatgacaacgcccccgccttcacccaaacctcctacaccctgttcgtccgagagaacaacagccccgccctgcacatcggcagtgtcagcgccacagacagagactcaggcaccaacgcccaggtcacctactcgctgctgccgccccagaacccacacctgcgcctcgcctccctggtctccatcaacgcggacaacggccacctgtttgccctcaggtcgctggactacgaggccctgcaggcgttcgagttccgcgtgggagccacagaccgcggctccccggcgctgagcagcgaggcgctggtgcgcgtgctggtgctggacgccaacgacaactcgcccttcgtgctgtatccgctgcagaacggctcggcgccttgcaccgagctggtgccccgggcggccgagccgggctacctggtgaccaaggtggtggcggtggacggcgactcgggccagaacgcctggctgtcgtaccagctgctcaaggccacggagcccgggctgttcagcatgtgggcgcacaatggcgaggtgcgcaccgccaggctgctgagcgagcgcgacgcggccaagcacaggctggtggtgctggtcaaggacaatggcgagcctccgcgctcggccaccgccacgctgcacgtgctcctggtggacggcttctcccagccctacctgccgctgccggaggcggccccggcccaggcccaggccgactcgctcactgtctacctggtggtggcattggcctcggtgtcgtcgctcttcctcttttcggtgctcctgttcgtggcagtgcggctgtgcaggaggagcagggcggcctcggtcggtcgctgctcggtgcccgagggcccctttccagggcatctggtggacgtgagcggcaccgggaccctatcccagagctaccactacgaggtgtgtttgaccggagactcaggggccggcgagttcaagttcctgaagccgattattcctaaccttttgccccagggcgctggtgaagaaatagggaaaactgctgccttccggaatagctttggattaaattagagatctcgtgatgacgcgttgttttctgccatttatcccaaactttttcagatctagaattcgagagtgtcatggacaaaaatttcaccttgagattgagcttttatttccctttttaatggatttgtctgttgaacttcatgctgtccaagtgttgaaaagtcaattttatttcattgcatttatttacatagtgtcattccaaatccatgcatgctgttgattttcctgagatttttttctcttcttgttggtatttgttgtgataaaccaccttaataaaatcaagtattaattttattttctata

SEQ ID NO: 9471 - DNA, 1148 bp, Homo sapiens
agtgggctctgcggataactcagacgccattaagctggggaatccaaactctaaaagaaggacgcattttaggtaagatctagtggctagatcttcagggtgggcttcgttcttgtggaaatcagtcaagaaagatcggattcgcggttatttatgcaaatcatctgggtggattgtgtacggagttaaactgcgccttctggaccgggtctgaacaatggagactgcgctagcaaaaacgccacagaaaaggcaagttatgtttcttgctatattgttgcttttgtgggaggctggctctgaggcagttaggtattccataccagaagaaacagaaagtggctattctgtggccaacctggcaaaagacctgggtcttggggtgggggaactggccactcggggcgcgcgaatgcattacaaaggaaacaaagagctcttgcagcttgatataaagaccggcaatttgcttctatatgaaaaactagaccgggaggtgatgtgcggggcgacagaaccctgtatattgcatttccagctcttactagaaaatccagtgcagttttttcaaactgatctgcagctcacagatataaatgaccatgccccagagttcccagagaaggaaatgctcctaaaaatcccagagagcacccagccagggactgtgtttcccttaaaaatagcccaggactttgacataggtagcaacactgttcagaactacacaatcagcccaaattcacactttcatgttgctacgcataatcgcggagatggcagaaaatacccagagctggtgctggacaaagcgccggaatagctttggattaaattagagatctcgtgatgacgcgttgttttctgccatttatcccaaactttttcagatctagaattcgagagtgtcatggacaaaaatttcaccttgagattgagcttttatttccctttttaatggatttgtctgttgaacttcatgctgtccaagtgttgaaaagtcaattttatttcattgcatttatttacatagtgtcattccaaatccatgcatgctgttgattttcctgagatttttttctcttcttgttggtatttgttgtgataaaccaccttaataaaatcaagtattaattttattttctata

SEQ ID NO: 9472 - DNA, 318 bp, Homo sapiens
gcagccgcctactactactaaatttcccgccggtcgaccattctcatctgctttcattgtgccttgggggaaatattttttcagaggaaaataattcttctcagcattaaaattctggttctgagagatatatacacacatatgtatatatgcacatatatgtatatttaatcacatgtgatttgagatttgatatagaagtttaaatttataggaaacctcttgtcgactagatatatttgatccaggcaggcacagatctacagtattagtcttttcctttcagcacagctttccttgagactcctccaccccatc

SEQ ID NO: 9473 - DNA, 589 bp, Homo sapiens
gtacatccatcagattttctacatagacagtcatattacctgtgaataatgatagttttacttttcctttccaccaccctggataccttttatttcttttccttttcttttcttcttcttcttatttatttattttttttctgtattacactggcttgaacctctagtacgaagtcaaatagaagtggtgagagtgggcatcttattcctttgtttttcatagataacctttagcagttaaggatcttactagtttgttcagcgtttttatctgaggtggatgttgaattttgtcaaatgctttttctgtatctatcaaggtaattatatggtttttagctttagtttgttaatatggtgaattatattgatttttttttgttgttgttttaatgttgatggggtctcgctctgttgctcaggctagagtgcagtggtgtggccgtggttttctgtaactttgaactagtgggctgaagggatcctctcgtcttagcttctcaagtagctaggacagtagatgtgtgccgccatgcctggctaatttttaatttttttttctaaaaaaaaaaaaaaaagaaataccctt

SEQ ID NO: 9474 - DNA, 255 bp, Homo sapiens
tgggtgttagaggatccttggatgaggaacgtcacatgatttttttgttgttgttttaatgttgatggggtctcgctctgttgctcaggctagagtgcagtggtgtggccgtggttttctgtaactttgaactagtgggctgaagggatcctctcgtcttagcttctcaagtagctaggacagtagatgtgtgccgccatgcctggctaatttttaatttttttttctaaaaaaaaaaaaaaaagaaataccctt

SEQ ID NO: 9475 - DNA, 451 bp, Homo sapiens
gcatgacaaaggctgaggacaaagctgcccagggaggagcccagtgtgggcacctgggacgaaaggttgaggcctcacagcagggacatggctctgccagggaggactgtcactgctgaccaccttggtgatgactccaggcacaagggcagacacagtctgacctgagaggggagcaggcacttcgaagacctcagagcaggagggccacaagtcagaccctatacgcatatcacagccctgttctctggagccactggtggcaggagcctgcacccacctcccccaggaggcccactgggatttccttagcatctccacagctcctggccaccaggaggcacagggttctgctttggatctcaggagactcccttccccgcaacctccctgtgtctcgattcctgtctctacggagcaggcactgctgtcctatgctttgcctttcctt

SEQ ID NO: 9476 - DNA, 634 bp, Homo sapiens
  misc_feature (573)..(573): n is a, c, g, or t
ccccatctctaccaaaaaaaaaaaaataagcccggtgtggtggcacacacctctggtcccagctccttgggagactgaggtgggaggatcacttgagcccaggagtttgaggctacagtgggttgtattcatgccactgcactccagcctgagtgacagagtgagaccctgttacaaaacaaagaatccctaaatggagccctctactgccctccccctgctcctggaagcctggggctccctctgatccccaattgcagctaccagcccctctacatggcattcaagaacctgcgcacccatttgatcttcattgtacatctctgtgtgcctgctctaagtccagccctatcctgggtaatgttgggaacatggtggtaacagatggacctcataggtgggaattgaacaatgagaacacatggacacaggaaggggaacatcacacttgggactgttgtggggtagggggaggggggagggatagcattaggagatatacctaagctaaatgatgagttaatgggtgcagcacaccagcatggcacatgtatacatatgtaactaacgctnacattgtgcacatgtaccctagaacttaaagtataataacaataaaataaaaataagaata

SEQ ID NO: 9477 - DNA, 501 bp, Homo sapiens
  misc_feature (295)..(295): n is a, c, g, or t
gtgcatctgatagttactctctgcccctaggaggaaagacagattcgcccttccttcccaagtcccaggctgtgtggttcccagccccaagggtagcaagtcagaacctccggagaggcttttaagcatgcacatgtccagggtcctcatcaagagactgaatcagggggtctagggctcagcacaggcaccctttttgtttttgcagtttcacaggaattctgatgtgccagtgattgtcaggtttgtccctgggcaggacccacctgcctgaccttctgtccccctgggacancagtatttccagagaggtgcttcagttgccccaccacgacttccagcgccccccatctctgtatgcagctgagctcatgatgggagcccactgtgtgctttttgttgttgttacattcctataaaaaatgttccacgcatatttgaacatctgtgttcatagtggcattattcacaatggctacaacacgaagaaagcattccaag

SEQ ID NO: 9478 - DNA, 456 bp, Homo sapiens
cctgtggttttttgcagcctacatgtttttaatggaatggaaggagcacagatgtcggggttgcatagatgtaggttagaattctgatttcctaccatgtgcccttacttaacccttaacctctgtaagccctagtttcttcatttgtaagttattgagagagttgaaagagatagtataggccaggcaccgtggctcacacctgtaatcccagcactttgggagtgtgaggcaggaggatctcttaagcacaagagttcgagaccagcctggggcaacatggtaaaaccccgtttctatggaaaaattagccaggcgtggtggcgcacgcctgtagtcgtagctactcgggaggctgaggtgggagaatcacctgagtctgggaggtcaagtctgtggtgagccatgatcatgccactgcactctagcctgagtgactgagtgagatcctggtca

SEQ ID NO: 9479 - DNA, 947 bp, Homo sapiens
ggcctgttgggggctgaggagctcgagggtcagggcgcccagtgctggaccgcgcaccctcggcctgggctccttgccggtgcttgcgcgtgcaaggctagctctttccccgccgcaaggcgaggaccacccgcccccgccgcggtcccaggtccgctggcagcctcccagcgccgggccgagagggcgctcaggctcctcaagaggtttggaaaagccggcgggtccgagggtggcgccggaacgtctgcgctctcctccggtctcccacctggagatccacggcccgggcgccccaggatggatccaagcgcagagtgcgcctcctgtgacagaggtcgacccctaagcccgggccgagggcaaagggcgcggattaaagtcctggaaactcagcaatctgcagcttccaaatggatatgagaagtgagagggaaggggatggcggggcgggttagaccaccactaagagatggggaatgggaggggtgtgtggaagagagaccaagtcttcaaagaatgccttagagtgaggacccacgggactgtctgctgaaaagggctggagaggcctttgggatcagcttcgtcgtattcccgataaggaacagcgcctaaagtgaagggacgcgtccagtcttttagctagttaatattaaaaaacatcgtctcatttattgaccgtcatcctatgagtattacctcaacatcagtgcttgcaacagtcccattttaccaaaaaggaaactgagtcacagatgttctgtgatctgcacacagcaagtggcagagctgtttgggggcccaggtctgtcggctccaccaccccagggttgacccaaaatgacgcatgaaaggctggcattataagatgctgtttcttgtttagacgaagtgatactgttacactggaagcactaataaaacccaggtataaataaaagggt

SEQ ID NO: 9480 - DNA, 303 bp, Homo sapiens
tttttttttttgggtaggaatcccttgcccaggctcctcaatgcacaagcacaggaagggctgacgtctaactcataaaaactcctactgaggggcaaattcctccatctgtgcaaaaaggagaaaggaatcatctaaactgctaggaaaggcactggtctgggaacccatcatgttggttctctcggtgactttgacattgactcttttgtgctacaactttgcagagagccaacatctccttatctacagaatatgggtgccggccttgatgaatactaggctttggaactggatcctgtg

SEQ ID NO: 9481 - DNA, 311 bp, Homo sapiens
cgaaaagtcctcaagaagtagtgttaatgtaatacaaagaactatctaatgcttaccagtaataagaaaaaaaaatacagaggtataaaaaatatataaattgtgtgctcccaccataagaaggcaaacggcatccctaagagctgtgcaaataaagccttcctggaatttgaatagagaaaaaaaacggtgtgaggatcgagtcacctgtggcacattgtaataaatttgttgaactgcattggaacagagcatacagtatgcacattgtgagcaatgatataattccaacaaaatgatatcacattaaa

SEQ ID NO: 9482 - DNA, 461 bp, Homo sapiens
atttaagtatactcagtgtttcaaagattgttgctgggaggcctaaatctgggagctagagtaacctggcacaaaatcagaattcactgtcctacatactaagctcagcagattcaactactttctcatcttccttctttgtatctacagacttaaaagctgtctggattttagttacttgattgaatttttgaagtatataaagtattcgtgttttatctcccaatttaatcccccattaggttatctgtcccgttttccttttgctcagttatatcctatgggactcacagataaacagaagtattttaccccttcttttacttttcaagaggggaaaattgtcagaaggatagtcaagtactagaaatactcattttgtcttttgtttgttcacgttgcacttcacaccatatatactttttttggtgctccttcccatggacagacttaactgaccc

SEQ ID NO: 9483 - DNA, 468 bp, Homo sapiens
tgttacatgtaatcattgcccttttttatgtgataaaataaggaaaaggtaaatcacttacttcaatcagttatttatgtggtaaatgcaatgcctctgattcattcctcagagaagtgggcttgatcttataaaaggaatgaaaaaaaaaactgcttatttggtaaatgagacaggtggcctttttgactaaagcaccaaataaggcatttttgggactcatttcctttgcagatgcattgaatattattctccatcttcctgccttacacaatacttggaacaatagaaaaatgcacctctttttcaatgaagcgtacttgtcgtctaatgattttgtctttacaagccccttttatgacatgctgtcttgtagaaatgttactttcatcctactgggcttcgtctagaaggtcaatatggttatggtttctacattctgtttcttttactgtgaaaactggcaaa

SEQ ID NO: 9484 - DNA, 582 bp, Homo sapiens
ggaagttgcagtgagccgagattgtgccactacactccagcctgggtgacagagtgagactccttctcaaaaaaaagttactgtctgcattttttattatttttaaaatttctatcttctgtccaacaattattcaatgcatggacttctataatttacttcttcattgcaattacaccatttacttatgtaaaaatatgttctttgttccattacaatttttttttttttgagacggagtctcgctctgtcacccaggctggaatgcagtggcgcaatctaggctcactgcaacctccacctcctgggttcatgccattctcctgcctcagcctcccgagtagctgggactacaggcgtgtgccaccacacccagctaattttttgtatttttagtagagacgaggtttcgctgtgttagccaggatggtctcaatctcctgacctcatgatttgcccacctcagcctcccaaagtgctgggattacaggcgtcagccaccgtgcccagactaattttatcatcttgttctctgctttttacctgctaagcttctttattgcttcttgaaatgctcatttc

SEQ ID NO: 9485 - DNA, 470 bp, Homo sapiens
gctcccctcctctcctgccatgtctcacaatggacactgcttctgaaggaagcaggcaaccctctgcctaacaaattcaggtcaatcttctacatgacaggagctcctttgttagctctcttctcccagagtcaaatctgtttttaaaattttattcagtaagtaaaagagcactgacggaggccctcatttttggaacctccttcttccttgaggactttcaccagccacattggtcttaaaattgttgagtttatctgattccagactatcctccttctaaagcagtctttttacaaagacaaaacccatcagatctgtccactgcttgaaacccttctttgatttcaggaaaagagttaaactccatggtccagcatgtaaatttcttacaagctgggctctttggactgctctagtttcatctctactattgccaaagatcctctctccacccatccccaccctcc

SEQ ID NO: 9486 - DNA, 422 bp, Homo sapiens
tggggtgtttgaatctgtgcatgttagcagttctgaattgcaggcttctcctgcattctattgggatagatgggaagtaaagagaaaacccagggaactcactgccacaccattcctcaagtcccaaggtccctagctagccagtcctcatctttccaccattcaatgtctctccatgtttatttcttgtattatatccagggatttttagttgtaagagggtgaactagagaagaatgggctactccatcttggccaaaggaaaagtcttgttcatatttttgttcataaacataatttattttacactctctatcaggggagtctatttctgttgttagtttttttctgccaggtctcatttataatggtttattatgtgttttgtaattttatattaattaataaatttattcattcat

SEQ ID NO: 9487 - DNA, 353 bp, Homo sapiens
cttctgcgagaaaaacaagggtgatccacatcccccatccctcatcttaaagtcaggttcataacggataaggcctctgatcagccaaataacaagctggaggactcaggaggcccttgctttggttcctattggaacaatacaacatagaacagggccaagaaaagggcaaaggaaatacaaaaggacgcctggaagatttgcacagggcaaaggatgacttgctgagttaatttaaagtgatgtaaattgctaagacaacactgcaaagcattcatatcattttttttttcaaggaagaaaatctaaacattttcctcaggatcttcaataataaaaatctatttatcaaa

SEQ ID NO: 9488 - DNA, 655 bp, Homo sapiens
aactacaatgccaatgaaggaatgacaaccatcattgttgtcaacaacatgtcaacaacatcaacaaatagaaagcattcctccattcatcactccttctgggaagaagtagactaagaggtaagaagcaactaatttttcatgggatttgaaactaagtaggtgaatctgaagtctgcgctgcttccattccatcccattgtctcttctgagggagaaagcttctaagggagaaagcctttggggcttggaacaaaagaagccagagtctttagagtacacactccgtacttccattaaataaatttcaacaacaggtcaaagcatgtatcttgcaaccttctttgaataaggctcagtgcaaagctggggccagtgaccttgaccttccttcatccctatctatcaaggattttttgtgagcataagaggcagcaactttacttgtatttcatttcatagcttaattatatctacatgcaattagaaaacatatggtaaggcatatttgtgaaggtcacaaaatctagtagagctggaatgccaggatttgattccaacttctgccacttactaactgcggaaccttaggcaagtcactgaacccctaagtttcctcagctgtaaaacaataataaacagagtctacaggtca

SEQ ID NO: 9489 - DNA, 695 bp, Homo sapiens
aactacaatgccaatgaaggaatgacaaccatcattgttgtcaacaacatgtcaacaacatcaacaaatagaaagcattcctccattcatcactccttctgggaagaagtagactaagaggtaagaagcaactaatttttcatgggatttgaaactaagtaggtgaatctgaagtctgcgctgcttccattccatcccattgtctcttctgagggagaaagcttctaagggagaaagcctttggggcttgctggtgatctttttctacacaaaaagttttcaaacaaaaggaacaaaagaagccagagtctttagagtacacactccgtacttccattaaataaatttcaacaacaggtcaaagcatgtatcttgcaaccttctttgaataaggctcagtgcaaagctggggccagtgaccttgaccttccttcatccctatctatcaaggattttttgtgagcataagaggcagcaactttacttgtatttcatttcatagcttaattatatctacatgcaattagaaaacatatggtaaggcatatttgtgaaggtcacaaaatctagtagagctggaatgccaggatttgattccaacttctgccacttactaactgcggaaccttaggcaagtcactgaacccctaagtttcctcagctgtaaaacaataataaacagagtctacaggtca

SEQ ID NO: 9490 - DNA, 909 bp, Homo sapiens
gaaaaataactcataggtactaagtttaatatctgggtgatgaaataatctatacaacaaaccccagtgacacgtttacctatatatcctgcacatatacccctgaacttaaataaaatgtggggaaaaaagatgtgtcttataatcaaagagatataaatgtgaattgaagaaattttgtccttttcctccagaactttatcataaagctgctcaaaatttcagaaaatctatctcagaagagcattgctgcttatgtctctagtaccatacacctatatcgagttgcatcagtagtttcatacactggtaagtctacaggtataaccatttaactaatttatcatgctgtaaagtgctggcatgtcaaagcatttatattttaaaatagatattttaaaaattactttccttttatttttcctttaaattacaagtaagtttgctcttcctgtctgtgccagggtggcgcatggtctacgtcgagcaacagagacactcaggctgtgttctcacgatgactgagtgggagacagcagcaccagcagtggcagagaccccagacatcaagctctttgggaagtggagcactgatgatgtgcacatcagtgacatttccctgcaggattacattgcagtgaaggagaaatatgccaagtacctacctcacagtgcagggtggtatgccgccaaatgcttccacaaagctcagtgtccctgtggaaggcgtataagcccagagatacggcgggacaacgggcaaacccagagggtgatttcagagattcgggggtaaacccaagcaaacacccaggcggcaaaacacaaaggccggagaaacccagggggcccgtgaaaacgggggcacaccaccgacaaacggtggagcaccgcgcggagacacacgcc

SEQ ID NO: 9491 - DNA, 754 bp, Homo sapiens
gaaaaataactcataggtactaagtttaatatctgggtgatgaaataatctatacaacaaaccccagtgacacgtttacctatatatcctgcacatatacccctgaacttaaataaaatgtggggaaaaaagatgtgtcttataatcaaagagatataaatgtgaattgaagaaattttgtccttttcctccagaactttatcataaagctgctcaaaatttcagaaaatctatctcagaagagcattgctgcttatgtctctagtaccatacacctatatcgagttgcatcagtagtttcatacactggtaagtctacaggtataaccatttaactaatttatcatgctgtaaagtgctggcatgtcaaagcatttatattttaaaatagatattttaaaaattactttccttttatttttcctttaaattacaagtaagtttgctcttcctgtctgtgccagggtggcgcatggtctacgtcgagcaacagagacactcaggctgtgttctcacgatgactgagtgggagacagcagcaccagcagtggcagagaccccagacatcaagctctttgggaagtggagcactgatgatgtgcacatcagtgacatttccctgcaggattacattgcagtgaaggagaaatatgccaagtacctacctcacagtgcagggtggtatgccgccaaatgcttccacaaagctcagtgtcccattgtggagcgccttactaactccatgatgatgcac

SEQ ID NO: 9492 - DNA, 371 bp, Homo sapiens
ccctgggctctgtctctactcccagggacctgctggaaggctggagtgcccagggagaggtatagaggtgtcataggcattagtgtagtaattggagcactaactctcgagccaactgcctgggttcgaatcctggctctagctgtatgacttttgtcaagtaacttagcctctctgtgtctcagttgcctcttctataacatggatgctaatagtacctacctcatagaattgttttggaagtaaatgaaaaatatgtaaaatgctgaagtgcctggtctacagtaagtgctcaataaatgttaactattgtgattgctgctgaatcagctacatgctgaggaaacggccaaacaagtgttaaagagaga

SEQ ID NO: 9493 - DNA, 413 bp, Homo sapiens
ttcctaagttaccattccttcccaatgctaaagaccagattctctgctctttccaataaattaatcatatcagtgagctcatctgttcatacatggtatcacttcctacctgtatatagataattcacaatctacatctctagccccatctgccactctcttctggcccacctgccagaagtcatcacccaaggttgtgtttgttgatctcacttctaccaacctgcagttggccccgctaatgactaccaccagcaccagaggtctacttctacatctcctgattggtccttcagatccctccttcttcttccagttctttctcctctcttgcatagtacttggaattacaatctatgtggtggcaggctaacttggttggaactcattatctatgaggaattctggaaaga

SEQ ID NO: 9494 - DNA, 449 bp, Homo sapiens
cttttttctccttttatgttctatctcggcctgtagcccaggtagattggttggtacctgcttacattgagactggatcttccccactcagtccaccaactcacatgccaatcttctctggaaacagcctcagagacaaacccagaagtaatactttaccagttctgtaggtattttgtaatccagttacattgatacctaaaattaactaccacagagagaaagcaattaagtaagagtaagaagacctgatttttggctaacacggtgaaaccccgtctctactaaaaatacaaaaaattattcgggcatggtggtgggcgcctgtagtcccagctacttgggaagctgaggcagaagaatggcgtgaactcgggaggtggagcttgcagtgagccgagatcacgccactgcactccagcctgggcaacagagcgagactccgtctc

SEQ ID NO: 9495 - DNA, 168 bp, Homo sapiens
ctaggattgtcgcatagtgcacttaggcaggggtatgcggcagaagagttagtggtgtttgtacagttccaggccttttttgacaagacacaattgaggtagctgaagttagagggagaccaggctccagggggtaaccttggccaccactcggctgtggaggcgttg

SEQ ID NO: 9496 - DNA, 456 bp, Homo sapiens
atgaggccaagcatggtggttcacgcctataatcgcagcactttgggaagctgtggtgggaggattgctagagcccgggaatttgagaccagcctgggcaacatggcaagaccctgtctctattttttaatagtcaaaaaaaagaagaagaagaaaacattcaaatgcttgaacatgacaaaggggttagatggcttattaagttgaattcgccatgtagcatcatgtgtgacgtaatggaaatgaatggcaaaccttgtttaacagaattaaatgaagatgattaaaagtatttctaaaacatctttatttcaaatatttatgaaaataactctgtacatttaccatacccaaggcccctaaatcttaattttgatcttaatcttgaaaatgtattgttgttagcatactttgtatagtgggttttttttgtttgtttgtttttgagacagggtc

SEQ ID NO: 9497 - DNA, 3767 bp, Homo sapiens
  misc_feature (3607)..(3607): n is a, c, g, or t
  misc_feature (3609)..(3609): n is a, c, g, or t
  misc_feature (3613)..(3613): n is a, c, g, or t
  misc_feature (3617)..(3618): n is a, c, g, or t
gaattcgtgtctcggcactcactcccggccgcccggacagggagctttcgctggcgcgcttggccggcgacaggacaggttcgggacgtccatctgtccatccgtccggagagaaattacagatccgcagccccgggatggggccggccccgctgccgctgctgctgggcctcttcctccccgcgctctggcgtagagctatcactgaggcaagggaagaagccaagccttacccgctattcccgggaccttttccagggagcctgcaaactgaccacacaccgctgttatcccttcctcacgccagtgggtaccagcctgccttgatgttttcaccaacccagcctggaagaccacatacaggaaacgtagccattccccaggtgacctctgtcgaatcaaagcccctaccgcctcttgccttcaaacacacagttggacacataatactttctgaacataaaggtgtcaaatttaattgctcaatcaatgtacctaatatataccaggacaccacaatttcttggtggaaagatgggaaggaattgcttgggggacatcatcgaattacacagttttatccagatgatgaagttacagcaataatcgcttccttcagcataaccagtgtgcagcgttcagacaatgggtcgtatatctgtaagatgaaaataaacaatgaagagatcgtgtctgatcccatctacatcgaagtacaaggacttcctcactttactaagcagcctgagagcatgaatgtcaccagaaacacagccttcaacctcacctgtcaggctgtgggcccgcctgagcccgtcaacattttctgggttcaaaacagtagccgtgttaacgaacagcctgaaaaatcccccggcgtgctaactgttccaggcctgacggagatggcggtcttcagttgtgaggcccacaatgacaaagggctgaccgtgtcccagggagtgcagatcaacatcaaagcaattccctccccaccaactgaagtcagcatccgtaacagcactgcacacagcattctgatctcctgggttcctggttttgatggatactccccgttcaggaattgcagcattcaggtcaaggaagctgatccgctgggtaatggctcagtcatgatttttaacacctctgccttaccacatctgtaccaaatcaagcagctgcaagccctggctaattacagcattggtgtttcctgcatgaatgaaataggctggtctgcagtgagcccttggattctagccagcacgactgaaggagccccatcagtagcacctttaaatgtcactgtgtttctgaatgaatctagtgataatgtggacatcagatggatgaagcctccgactaagcagcaggatggagaactggtgggctaccggatatcccacgtgtggcagagtgcagggatttccaaagagctcttggaggaagttggccagaatggcagccgagctcggatctctgttcaagtccacaatgctacgtgcacagtgaggattgcagccgtcaccaaagggggagttgggcccttcagtgatccagtgaaaatatttatccctgcacacggttgggtagattatgccccctcttcaactccggcgcctggcaacgcagatcctgtgctcatcatctttggctgcttttgtggatttattttgattgggttggttttatacatctccttggccatcagaaaaagagtccaggagacaaagtttgggaatgcattcacagaggaggattctgaattagtggtgaattatatagcaaagaaatccttctgtcggcgagccattgaacttaccttacatagcttgggagtcagtgaggaactacaaaataaactagaagatgttgtgattgacaggaatcttctaattcttggaaaaattctgggtgaaggagagtttgggtctgtaatggaaggaaatcttaagcaggaagatgggacctctctgaaagtggcagtgaagaccatgaagttggacaactcttcacagcgggagatcgaggagtttctcagtgaggcagcgtgcatgaaagacttcagccacccaaatgtcattcgacttctaggtgtgtgtatagaaatgagctctcaaggcatcccaaagcccatggtaattttacccttcatgaaatacggggacctgcatacttacttactttattcccgattggagacaggaccaaagcatattcctctgcagacactattgaagttcatggtggatattgccctgggaatggagtatctgagcaacaggaattttcttcatcgagatttagctgctcgaaactgcatgttgcgagatgacatgactgtctgtgttgcggacttcggcctctctaagaagatttacagtggcgattattaccgccaaggccgcattgctaagatgcctgttaaatggatcgccatagaaagtcttgcagaccgagtctacacaagtaaaagtgatgtgtgggcatttggcgtgaccatgtgggaaatagctacgcggggaatgactccctatcctggggtccagaaccatgagatgtatgactatcttctccatggccacaggttgaagcagcccgaagactgcctggatgaactgtatgaaataatgtactcttgctggagaaccgatcccttagaccgccccaccttttcagtattgaggctgcagctagaaaaactcttagaaagtttgcctgacgttcggaaccaagcagacgttatttacgtcaatacacagttgctggagagctctgagggcctggcccagggctccacccttgctccactggacttgaacatcgaccctgactctataattgcctcctgcactccccgcgctgccatcagtgtggtcacagcagaagttcatgacagcaaacctcatgaaggacggtacatcctgaatgggggcagtgaggaatgggaagatctgacttctgccccctctgctgcagtcacagctgaaaagaacagtgttttaccgggggagagacttgttaggaatggggtctcctggtcccattcgagcatgctgcccttgggaagctcattgcccgatgaacttttgtttgctgacgactcctcagaaggctcagaagtcctgatgtgaggagaggtgcggggagacattccaaaaatcaagccaattcttctgctgtaggagaatccaattgtacctgatgtttttggtatttgtcttccttaccaagtgaactccatggccccaaagcaccagatgaatgttgttaagtaagctgtcattaaaaatacataatatatatttatttaaagagaaaaaatatgtgtatatcatggaaaaagacaaggatattttaataaaacattacttatttcatttcacttatcttgcatatcttaaaattaagcttcagctgctccttgatattaacatttgtacagagttgaagttgttttttcaagttcttttctttttcatgactattaaatgtaaaaatatttgtaaaatgaaatgccatatttgacttggcttctggtcttgatgtatttgataagaatgattaattttctgatatggcttcctaataaaatatgaactanangganaaannaaaccaatcacccacaaaacacacaaaaacgcaccaacagacaacgcaaaaacgacccacagcacgccaccgaccgtcagacacccacagccccacgccgcccggacacaccacaaggaacacggagacaccggcgacgccaacacacg

SEQ ID NO: 9498 - DNA, 2956 bp, Homo sapiens
  misc_feature (2796)..(2796): n is a, c, g, or t
  misc_feature (2798)..(2798): n is a, c, g, or t
  misc_feature (2802)..(2802): n is a, c, g, or t
  misc_feature (2806)..(2807): n is a, c, g, or t
ggtaagacagggaaacaaaacagaacccctaagcctgagatgagaacaaggattgtgagacagggaaatgcgccgtgccgttgtctaggcctacattcaggatcaagctctttacatgcatggcactttgccagcctccagcttccggatgcgtgtgcaagtgttgataaaggctggaaagtggacagatgaaaagatattattatacatctacgtgaatgagatctgcatgttgtgtgtgaagtaacatgttagtagaattagccaaaagttctataggctgtaactaaatgtcaatatggaaattgcatatttctgttcgtaagatgctagtaatttattgcatgggtcagatgatttaaatttgggtcatttttttgtccaatgacgtatgaattatcagtttctcaaaacagaaaagcatcaaaatgaaatgatgcctaggcatgctggtgtgtacctgtaattccagctactctggaggctgaggcagaagatcacttgagcccaggagttcaggggttctccaccagcctgggcaaaatagcaagagttcgtcttattaaaaaaataaatacatctatttttaaaatgttatatatatatacacacacacacacacacacatttttatatatatacacattttcaggccaggcatattaattggcatgcatatatatatatgccatatatgtgtatatatatgccatatatgtgtgtgtatatgtgtgtgtgtgtgtatatatatacacacacatatggcatatatatacacacatgccaattaatatgcctggccctgaaatgtcaggtctatcaattataagaaaaaaaacatttttaatgaaatgatggtataactcactcttcatctcagcctattgattcctaattgtcatctgtcttactgtgctccattaaatgtccctccattggaattcttaactatattagacactgggatgaaaaaaccacccagaagagagttgccctctataaaacaaagtggaaggagttgtgaggagcacttggacgcaggagttgtccaatctgaatctgaatccctggctacccacatggccatggcatgttctgtaatgtccctgagcccactgtcatcttcattacaaagtgacaatgacagggctgttgagaagactagatggagtgatacgcagcacacaactaccccctgccctcacccctgctcctgatcttcttagccctagccccagggccccaactaactcagctgtcctggtaacaactcagtttgatggcataggacagaggtcagcaaacttttcctataaagtgccaaatagcaaatatttttggctttgcaggccttttagcacctgctcaactctgccattgtgacataagaagtcatagataacgtgtaaacaaataaggatagctgtgttccaataaaactttatttacaaagtagacagtgggctggatttggctcatgggccatagtttgcccgccgccatataaagaaagagacctaaatactccttatctgcaaagttagatataactgccacatatgtgctcttcctagaaacagaatcacttttttgtcaaataccatggaacatttacaaaagttgtataaatattaggccaccaaaaaagtctcaataatttttataaaaagtagaatgaatgctgattaaaatgtgataaagattctgtaaaaacaaaggcatggattgcacaaagagatgggtgccatgctgggagacaatccacttctttttaactttcaggtatgaaataatgtactcttgctggagaaccgatcccttagaccgccccaccttttcagtattgaggctgcagctagaaaaactcttagaaagtttgcctgacgttcggaaccaagcagacgttatttacgtcaatacacagttgctggagagctctgagggcctggcccagggctccacccttgctccactggacttgaacatcgaccctgactctataattgcctcctgcactccccgcgctgccatcagtgtggtcacagcagaagttcatgacagcaaacctcatgaaggacggtacatcctgaatgggggcagtgaggaatgggaagatctgacttctgccccctctgctgcagtcacagctgaaaagaacagtgttttaccgggggagagacttgttaggaatggggtctcctggtcccattcgagcatgctgcccttgggaagctcattgcccgatgaacttttgtttgctgacgactcctcagaaggctcagaagtcctgatgtgaggagaggtgcggggagacattccaaaaatcaagccaattcttctgctgtaggagaatccaattgtacctgatgtttttggtatttgtcttccttaccaagtgaactccatggccccaaagcaccagatgaatgttgttaagtaagctgtcattaaaaatacataatatatatttatttaaagagaaaaaatatgtgtatatcatggaaaaagacaaggatattttaataaaacattacttatttcatttcacttatcttgcatatcttaaaattaagcttcagctgctccttgatattaacatttgtacagagttgaagttgttttttcaagttcttttctttttcatgactattaaatgtaaaaatatttgtaaaatgaaatgccatatttgacttggcttctggtcttgatgtatttgataagaatgattcattcaatgtttaaagttgtataactgattaattttctgatatggcttcctaataaaatatgaactanangganaaannaaaccaatcacccacaaaacacacaaaaacgcaccaacagacaacgcaaaaacgacccacagcacgccaccgaccgtcagacacccacagccccacgccgcccggacacaccacaaggaacacggagacaccggcgacgccaacacacg

SEQ ID NO: 9499 - DNA, 1931 bp, Homo sapiens
  misc_feature (1771)..(1771): n is a, c, g, or t
  misc_feature (1773)..(1773): n is a, c, g, or t
  misc_feature (1777)..(1777): n is a, c, g, or t
  misc_feature (1781)..(1782): n is a, c, g, or t
ggccattactgcaggaaaaggtcccggagagctgagcagtcaagattctgggtgaaggagagtttgggtctgtaatggaaggaaatcttaagcaggaagatgggacctctctgaaagtggcagtgaagaccatgaagttggacaactcttcacagcgggagatcgaggagtttctcagtgaggcagcgtgcatgaaagacttcagccacccaaatgtcattcgacttctaggtgtgtgtatagaaatgagctctcaaggcatcccaaagcccatggtaattttacccttcatgaaatacggggacctgcatacttacttactttattcccgattggagacaggaccaaagcatattcctctgcagacactattgaagttcatggtggatattgccctgggaatggagtatctgagcaacaggaattttcttcatcgagatttagctgctcgaaactgcatgttgcgagatgacatgactgtctgtgttgcggacttcggcctctctaagaagatttacagtggcgattattaccgccaaggccgcattgctaagatgcctgttaaatggatcgccatagaaagtcttgcagaccgagtctacacaagtaaaagtgatgtgtgggcatttggcgtgaccatgtgggaaatagctacgcggggaatgactccctatcctggggtccagaaccatgagatgtatgactatcttctccatggccacaggttgaagcagcccgaagactgcctggatgaactgtatgaaataatgtactcttgctggagaaccgatcccttagaccgccccaccttttcagtattgaggctgcagctagaaaaactcttagaaagtttgcctgacgttcggaaccaagcagacgttatttacgtcaatacacagttgctggagagctctgagggcctggcccagggctccacccttgctccactggacttgaacatcgaccctgactctataattgcctcctgcactccccgcgctgccatcagtgtggtcacagcagaagttcatgacagcaaacctcatgaaggacggtacatcctgaatgggggcagtgaggaatgggaagatctgacttctgccccctctgctgcagtcacagctgaaaagaacagtgttttaccgggggagagacttgttaggaatggggtctcctggtcccattcgagcatgctgcccttgggaagctcattgcccgatgaacttttgtttgctgacgactcctcagaaggctcagaagtcctgatgtgaggagaggtgcggggagacattccaaaaatcaagccaattcttctgctgtaggagaatccaattgtacctgatgtttttggtatttgtcttccttaccaagtgaactccatggccccaaagcaccagatgaatgttgttaagtaagctgtcattaaaaatacataatatatatttatttaaagagaaaaaatatgtgtatatcatggaaaaagacaaggatattttaataaaacattacttatttcatttcacttatcttgcatatcttaaaattaagcttcagctgctccttgatattaacatttgtacagagttgaagttgttttttcaagttcttttctttttcatgactattaaatgtaaaaatatttgtaaaatgaaatgccatatttgacttggcttctggtcttgatgtatttgataagaatgattcattcaatgtttaaagttgtataactgattaattttctgatatggcttcctaataaaatatgaactanangganaaannaaaccaatcacccacaaaacacacaaaaacgcaccaacagacaacgcaaaaacgacccacagcacgccaccgaccgtcagacacccacagccccacgccgcccggacacaccacaaggaacacggagacaccggcgacgccaacacacg

SEQ ID NO: 9500 - DNA, 3848 bp, Homo sapiens
  misc_feature (3688)..(3688): n is a, c, g, or t
  misc_feature (3690)..(3690): n is a, c, g, or t
  misc_feature (3694)..(3694): n is a, c, g, or t
  misc_feature (3698)..(3699): n is a, c, g, or t
gaattcgtgtctcggcactcactcccggccgcccggacagggagctttcgctggcgcgcttggccggcgacaggacaggttcgggacgtccatctgtccatccgtccggagagaaattacagatccgcagccccgggatggggccggccccgctgccgctgctgctgggcctcttcctccccgcgctctggcgtagagctatcactgaggcaagggaagaagccaagccttacccgctattcccgggaccttttccagggagcctgcaaactgaccacacaccgctgttatcccttcctcacgccagtgggtaccagcctgccttgatgttttcaccaacccagcctggaagaccacatacaggaaacgtagccattccccaggtgacctctgtcgaatcaaagcccctaccgcctcttgccttcaaacacacagttggacacataatactttctgaacataaaggtgtcaaatttaattgctcaatcaatgtacctaatatataccaggacaccacaatttcttggtggaaagatgggaaggaattgcttgggggacatcatcgaattacacagttttatccagatgatgaagttacagcaataatcgcttccttcagcataaccagtgtgcagcgttcagacaatgggtcgtatatctgtaagatgaaaataaacaatgaagagatcgtgtctgatcccatctacatcgaagtacaaggacttcctcactttactaagcagcctgagagcatgaatgtcaccagaaacacagccttcaacctcacctgtcaggctgtgggcccgcctgagcccgtcaacattttctgggttcaaaacagtagccgtgttaacgaacagcctgaaaaatcccccggcgtgctaactgttccaggcctgacggagatggcggtcttcagttgtgaggcccacaatgacaaagggctgaccgtgtcccagggagtgcagatcaacatcaaagcaattccctccccaccaactgaagtcagcatccgtaacagcactgcacacagcattctgatctcctgggttcctggttttgatggatactccccgttcaggaattgcagcattcaggtcaaggaagctgatccgctgggtaatggctcagtcatgatttttaacacctctgccttaccacatctgtaccaaatcaagcagctgcaagccctggctaattacagcattggtgtttcctgcatgaatgaaataggctggtctgcagtgagcccttggattctagccagcacgactgaaggagccccatcagtagcacctttaaatgtcactgtgtttctgaatgaatctagtgataatgtggacatcagatggatgaagcctccgactaagcagcaggatggagaactggtgggctaccggatatcccacgtgtggcagagtgcagggatttccaaagagctcttggaggaagttggccagaatggcagccgagctcggatctctgttcaagtccacaatgctacgtgcacagtgaggattgcagccgtcaccaaagggggagttgggcccttcagtgatccagtgaaaatatttatccctgcacacggttgggtagattatgccccctcttcaactccggcgcctggcaacgcagatcctgtgctcatcatctttggctgcttttgtggatttattttgattgggttggttttatacatctccttggccatcagaaaaagagtccaggagacaaagtttgggaatgcattcacagaggaggattctgaattagtggtgaattatatagcaaagaaatccttctgtcggcgagccattgaacttaccttacatagcttgggagtcagtgaggaactacaaaataaactagaagatgttgtgattgacaggaatcttctaattcttggaaaaattctgggtgaaggagagtttgggtctgtaatggaaggaaatcttaagcaggaagatgggacctctctgaaagtggcagtgaagaccatgaagttggacaactcttcacagcgggagatcgaggagtttctcagtgaggcagcgtgcatgaaagacttcagccacccaaatgtcattcgacttctaggtgtgtgtatagaaatgagctctcaaggcatcccaaagcccatggtaattttacccttcatgaaatacggggacctgcatacttacttactttattcccgattggagacaggaccaaagcatattcctctgcagacactattgaagttcatggtggatattgccctgggaatggagtatctgagcaacaggaattttcttcatcgagatttagctgctcgaaactgcatcacccacctggccatcttagcaagaagcccagcatcttgctcttactgcaggttgcgagatgacatgactgtctgtgttgcggacttcggcctctctaagaagatttacagtggcgattattaccgccaaggccgcattgctaagatgcctgttaaatggatcgccatagaaagtcttgcagaccgagtctacacaagtaaaagtgatgtgtgggcatttggcgtgaccatgtgggaaatagctacgcggggaatgactccctatcctggggtccagaaccatgagatgtatgactatcttctccatggccacaggttgaagcagcccgaagactgcctggatgaactgtatgaaataatgtactcttgctggagaaccgatcccttagaccgccccaccttttcagtattgaggctgcagctagaaaaactcttagaaagtttgcctgacgttcggaaccaagcagacgttatttacgtcaatacacagttgctggagagctctgagggcctggcccagggctccacccttgctccactggacttgaacatcgaccctgactctataattgcctcctgcactccccgcgctgccatcagtgtggtcacagcagaagttcatgacagcaaacctcatgaaggacggtacatcctgaatgggggcagtgaggaatgggaagatctgacttctgccccctctgctgcagtcacagctgaaaagaacagtgttttaccgggggagagacttgttaggaatggggtctcctggtcccattcgagcatgctgcccttgggaagctcattgcccgatgaacttttgtttgctgacgactcctcagaaggctcagaagtcctgatgtgaggagaggtgcggggagacattccaaaaatcaagccaattcttctgctgtaggagaatccaattgtacctgatgtttttggtatttgtcttccttaccaagtgaactccatggccccaaagcaccagatgaatgttgttaagtaagctgtcattaaaaatacataatatatatttatttaaagagaaaaaatatgtgtatatcatggaaaaagacaaggatattttaataaaacattacttatttcatttcacttatcttgcatatcttaaaattaagcttcagctgctccttgatattaacatttgtacagagttgaagttgttttttcaagttcttttctttttcatgactattaaatgtaaaaatatttgtaaaatgaaatgccatatttgacttggcttctggtcttgatgtatttgataagaatgattcattcaatgtttaaagttgtataactgattaattttctgatatggcttcctaataaaatatgaactanangganaaannaaaccaatcacccacaaaacacacaaaaacgcaccaacagacaacgcaaaaacgacccacagcacgccaccgaccgtcagacacccacagccccacgccgcccggacacaccacaaggaacacggagacaccggcgacgccaacacacg

SEQ ID NO: 9501 - DNA, 3585 bp, Homo sapiens
gaattcgtgtctcggcactcactcccggccgcccggacagggagctttcgctggcgcgcttggccggcgacaggacaggttcgggacgtccatctgtccatccgtccggagagaaattacagatccgcagccccgggatggggccggccccgctgccgctgctgctgggcctcttcctccccgcgctctggcgtagagctatcactgaggcaagggaagaagccaagccttacccgctattcccgggaccttttccagggagcctgcaaactgaccacacaccgctgttatcccttcctcacgccagtgggtaccagcctgccttgatgttttcaccaacccagcctggaagaccacatacaggaaacgtagccattccccaggtgacctctgtcgaatcaaagcccctaccgcctcttgccttcaaacacacagttggacacataatactttctgaacataaaggtgtcaaatttaattgctcaatcaatgtacctaatatataccaggacaccacaatttcttggtggaaagatgggaaggaattgcttgggggacatcatcgaattacacagttttatccagatgatgaagttacagcaataatcgcttccttcagcataaccagtgtgcagcgttcagacaatgggtcgtatatctgtaagatgaaaataaacaatgaagagatcgtgtctgatcccatctacatcgaagtacaaggacttcctcactttactaagcagcctgagagcatgaatgtcaccagaaacacagccttcaacctcacctgtcaggctgtgggcccgcctgagcccgtcaacattttctgggttcaaaacagtagccgtgttaacgaacagcctgaaaaatcccccggcgtgctaactgttccaggcctgacggagatggcggtcttcagttgtgaggcccacaatgacaaagggctgaccgtgtcccagggagtgcagatcaacatcaaagcaattccctccccaccaactgaagtcagcatccgtaacagcactgcacacagcattctgatctcctgggttcctggttttgatggatactccccgttcaggaattgcagcattcaggtcaaggaagctgatccgctgggtaatggctcagtcatgatttttaacacctctgccttaccacatctgtaccaaatcaagcagctgcaagccctggctaattacagcattggtgtttcctgcatgaatgaaataggctggtctgcagtgagcccttggattctagccagcacgactgaaggagccccatcagtagcacctttaaatgtcactgtgtttctgaatgaatctagtgataatgtggacatcagatggatgaagcctccgactaagcagcaggatggagaactggtgggctaccggatatcccacgtgtggcagagtgcagggatttccaaagagctcttggaggaagttggccagaatggcagccgagctcggatctctgttcaagtccacaatgctacgtgcacagtgaggattgcagccgtcaccaaagggggagttgggcccttcagtgatccagtgaaaatatttatccctgcacacggttgggtagattatgccccctcttcaactccggcgcctggcaacgcagatcctgtgctcatcatctttggctgcttttgtggatttattttgattgggttggttttatacatctccttggccatcagaaaaagagtccaggagacaaagtttgggaatgcattcacagaggaggattctgaattagtggtgaattatatagcaaagaaatccttctgtcggcgagccattgaacttaccttacatagcttgggagtcagtgaggaactacaaaataaactagaagatgttgtgattgacaggaatcttctaattcttggaaaaattctgggtgaaggagagtttgggtctgtaatggaaggaaatcttaagcaggaagatgggacctctctgaaagtggcagtgaagaccatgaagttggacaactcttcacagcgggagatcgaggagtttctcagtgaggcagcgtgcatgaaagacttcagccacccaaatgtcattcgacttctaggtgtgtgtatagaaatgagctctcaaggcatcccaaagcccatggtaattttacccttcatgaaatacggggacctgcatacttacttactttattcccgattggagacaggaccaaagcatattcctctgcagacactattgaagttcatggtggatattgccctgggaatggagtatctgagcaacaggaattttcttcatcgagatttagctgctcgaaactgcatgttgcgagatgacatgactgtctgtgttgcggacttcggcctctctaagaagatttacagtggcgattattaccgccaaggccgcattgctaagatgcctgttaaatggatcgccatagaaagtcttgcagaccgagtctacacaagtaaaagtgatgtgtgggcatttggcgtgaccatgtgggaaatagctacgcggggaatgactccctatcctggggtccagaaccatgagatgtatgactatcttctccatggccacaggttgaagcagcccgaagactgcctggatgaactgtatgaaataatgtactcttgctggagaaccgatcccttagaccgccccaccttttcagtattgaggctgcagctagaaaaactcttagaaagtttgcctgacgttcggaaccaagcagacgttatttacgtcaatacacagttgctggagagctctgagggcctggcccagggctccacccttgctccactggacttgaacatcgaccctgactctataattgcctcctgcactccccgcgctgccatcagtgtggtcacagcagaagttcatgacagcaaacctcatgaaggacggtacatcctgaatgggggcagtgaggaatgggaagatctgacttctgccccctctgctgcagtcacagctgaaaagaacagtgttttaccgggggagagacttgttaggaatggggtctcctggtcccattcgagcatgctgcccttgggaagctcattgcccgatgaacttttgtttgctgacgactcctcagaaggctcagaagtcctgatgtgaggagaggtgcggggagacattccaaaaatcaagccaattcttctgctgtaggagaatccaattgtacctgatgtttttggtatttgtcttccttaccaagtgaactccatggccccaaagcaccagatgaatgttgttaagtaagctgtcattaaaaatacataatatatatttatttaaagagaaaaaatatgtgtatatcatggaaaaagacaaggatattttaataaaacattacttatttcatttcacttatcttgcatatcttaaaattaagcttcagctgctccttgatattaacatttgtacagagttgaagttgttttttcaagttcttttctttttcatgactattaaatgtaaaaatatttgtaaaatgaaatgccatatttgacttggttgtcttctgatgtagagagtgtccttttctaacttgtgtaaactgatt

SEQ ID NO: 9502 - DNA, 2733 bp, Homo sapiens
gaattcgtgtctcggcactcactcccggccgcccggacagggagctttcgctggcgcgcttggccggcgacaggacaggttcgggacgtccatctgtccatccgtccggagagaaattacagatccgcagccccgggatggggccggccccgctgccgctgctgctgggcctcttcctccccgcgctctggcgtagagctatcactgaggcaagggaagaagccaagccttacccgctattcccgggaccttttccagggagcctgcaaactgaccacacaccgctgttatcccttcctcacgccagtgggtaccagcctgccttgatgttttcaccaacccagcctggaagaccacatacaggaaacgtagccattccccaggtgacctctgtcgaatcaaagcccctaccgcctcttgccttcaaacacacagttggacacataatactttctgaacataaaggtgtcaaatttaattgctcaatcaatgtacctaatatataccaggacaccacaatttcttggtggaaagatgggaaggaattgcttgggggacatcatcgaattacacagttttatccagatgatgaagttacagcaataatcgcttccttcagcataaccagtgtgcagcgttcagacaatgggtcgtatatctgtaagatgaaaataaacaatgaagagatcgtgtctgatcccatctacatcgaagtacaaggacttcctcactttactaagcagcctgagagcatgaatgtcaccagaaacacagccttcaacctcacctgtcaggctgtgggcccgcctgagcccgtcaacattttctgggttcaaaacagtagccgtgttaacgaacagcctgaaaaatcccccggcgtgctaactgttccaggcctgacggagatggcggtcttcagttgtgaggcccacaatgacaaagggctgaccgtgtcccagggagtgcagatcaacatcaaagcaattccctccccaccaactgaagtcagcatccgtaacagcactgcacacagcattctgatctcctgggttcctggttttgatggatactccccgttcaggaattgcagcattcaggtcaaggaagctgatccgctgggtaatggctcagtcatgatttttaacacctctgccttaccacatctgtaccaaatcaagcagctgcaagccctggctaattacagcattggtgtttcctgcatgaatgaaataggctggtctgcagtgagcccttggattctagccagcacgactgaaggagccccatcagtagcacctttaaatgtcactgtgtttctgaatgaatctagtgataatgtggacatcagatggatgaagcctccgactaagcagcaggatggagaactggtgggctaccggatatcccacgtgtggcagagtgcagggatttccaaagagctcttggaggaagttggccagaatggcagccgagctcggatctctgttcaagtccacaatgctacgtgcacagtgaggattgcagccgtcaccaaagggggagttgggcccttcagtgatccagtgaaaatatttatccctgcacacggttgggtagattatgccccctcttcaactccggcgcctggcaacgcagatcctgtgctcatcatctttggctgcttttgtggatttattttgattgggttggttttatacatctccttggccatcagaaaaagagtccaggagacaaagtttgggaatgcattcacagaggaggattctgaattagtggtgaattatatagcaaagaaatccttctgtcggcgagccattgaacttaccttacatagcttgggagtcagtgaggaactacaaaataaactagaagatgttgtgattgacaggaatcttctaattcttggaaaaattctgggtgaaggagagtttgggtctgtaatggaaggaaatcttaagcaggaagatgggacctctctgaaagtggcagtgaagaccatgaagttggacaactcttcacagcgggagatcgaggagtttctcagtgaggcagcgtgcatgaaagacttcagccacccaaatgtcattcgacttctaggtgtgtgtatagaaatgagctctcaaggcatcccaaagcccatggtaattttacccttcatgaaatacggggacctgcatacttacttactttattcccgattggagacaggaccaaagcatattcctctgcagacactattgaagttcatggtggatattgccctgggaatggagtatctgagcaacaggaattttcttcatcgagatttagctgctcgaaactgcatcacccacctggccatcttagcaagaagcccagcatcttgctcttactgcaggtaattccccatcttccccaaactctcagggggcttacttagtcctcagggccagtgctgcttccagacctctgggaggaaggctgctggggtcctggatcagtccaccagagggctctggttttgagctgctgctctttctgctcctgctatgctgcgtctccatgttctccagctgtttctatccactgtgcacaggtgcccttgctggtccacatcccacacagatcagagcgatgcaagactgcatcacttgaggctaggcgtggtagctcatacctgtaatcccagcactttggaatgccaaggcgggcagatcacttgagatcaggagtccgagaccagcctggccaaca

SEQ ID NO: 9503 - DNA, 314 bp, Homo sapiens
  misc_feature (154)..(154): n is a, c, g, or t
  misc_feature (156)..(156): n is a, c, g, or t
  misc_feature (160)..(160): n is a, c, g, or t
  misc_feature (164)..(165): n is a, c, g, or t
atgtatttgtcttggcttcttatcaaatacatcaagaccagaagccaagcaaacttctggtcttgatgtatttgataagaatgattcattcaatgtttaaagttgtataactgattaattttctgatatggcttcctaataaaatatgaactanangganaaannaaaccaatcacccacaaaacacacaaaaacgcaccaacagacaacgcaaaaacgacccacagcacgccaccgaccgtcagacacccacagccccacgccgcccggacacaccacaaggaacacggagacaccggcgacgccaacacacg

SEQ ID NO: 9504 - DNA, 437 bp, Homo sapiens
cagctttggccactgggagcttatctgttattctctgttcttggcggtacctggctagagtagtttcaatattgccaagtaagtctaaaataaatcaaaggaaagaaacacgtttcttctagggggaaagcttttgttgtagaagagcccattgaaaagcggaagctctgtagcatccttgtggaatcagtgcctgccccagtagccctgtttttatagtgaagtatctttgttttcattcacccaggaatgcattcacagaggaggattctgaattagtggtgaattatatagcaaagaaatccttctgtcggcgagccattgaacttacctgtaagttgactttcatttccctttttggcaaaagttaaaatagttgagaacaaagaaggatcaatagacagatttctaacaaaagccaaagatgtcgaagaaga

SEQ ID NO: 9505 - DNA, 366 bp, Homo sapiens
tcttttctttttcatgactattaaatgtaaaaatatttgtaaaatgaaatgccatatttgacttggcttctggtcttgatgtatttgataagaatgattcattcaatgtttaaagttgtataactgattaattttctgatatggcttcctaataaaatatgaataaggaaggatatgttgaacttacttgagacttgaaagacagtggtcggcagcggccttgtggcctttgcaaaggaattcccttaatgcctggtccttggggcaattgctctgaccattcttggcattgctttatagagatatggaaaaaccacaccagggtctgtagataaggaataaagaatattgaaggattgaaaaata

SEQ ID NO: 9506 - DNA, 329 bp, Homo sapiens
tagtggagacggggtttcaccgtgttagccaggatggtctcaatctcctgacctcatgatccgcccgcctcggcctcccaaagtgctgggatgacaggcgtgagccaccgcgcccgtcctgtttgttttgagacacggtcttgctcttgttgtccaggctggagcgcgcggtattgcagtcacagctcaccgcagcctcaaactccccaggctcaagggatccacccaccttgggctcccaaagtgctgggattacatgagctcccacgcccagtttgtgtggtttttccttgccagaaaagtccccatccatgaggccccccctcacc

SEQ ID NO: 9507 - DNA, 296 bp, Homo sapiens
aaaagttatactagaaataggatatagagatgattatatatggatattatcaatcattagttttagtattaatctgtgctttactattataaccgaggaataaccagccagtacagtcaggagctgaaggaacattgtgagaagtgaccagaagataagagtgtgagccctctgtcaggccggacatggtggctcacgcctgtaatcccagcactttgggaggccaaggcaggcggatcacgaggttaggagatcgagaccatcctggctaacacggggaaaccccatctctacta

SEQ ID NO: 9508 - DNA, 476 bp, Homo sapiens
cagcccccctgcacgcagcccgactagcagtctagaggcctgaggcttctgggtcctggtgacggggctggcatgaccccgggggtcgtccatgccagtccgcctcagtcgcagagggtccctcggcaagcgccctgtgagtgggccattcggaacattggacagaagcccaaagagccaaattgtcacaattgtggaacccacattggcctgagatccaaaacgcttcgaggcaccccaaattacctgcccattcgtcaggacacccacccacccagtgttatattctgcctcgccggagtgggtgttcccgggggcaggtaatttggtatgccttaaacatttcctgaaggcatttggtgatgaaatataaatatatctaatgtataaagtaagagagttttgtcaaaggtaatatgcagcaaagctgactagtttgaagaggtttgggttactgaatagacgtcacacaggaa

SEQ ID NO: 9509 - DNA, 408 bp, Homo sapiens
aaaactggagttagttctcattacccttaaaaaatactttcttttgtatacacttattaaatatcccactgacattataagttctgaatataagcggttttgaatttaaatacctgtttgtgatcaagacttcatctggataatagtttatagtatttcagactggaaacgtttccaagtttggtaggaggagtagcctctactgtttagagtagttggggcagggcatgccttatacagcttttgcggtttgtgcggtatacaacagcataacatgttgggggtgatgttcattcacatcatagatttgtatattatcacagttttttttagcaggtgttggtaaagtttcttgttctaacaaaatcaatatattatgtcacatttctgacagttaagaaccttaag

SEQ ID NO: 9510 - DNA, 487 bp, Homo sapiens
gggtataatatgtgaggaatgatcagcagtaataatagttctgatagtttcgggtacctatatttttacattgttgtgctttttcattattgtgtatatttgaacatttctgtgaaacttagtttcttttcataattattttgtttattttctttagagacaggatctcgctctgttgcccaggccaatgtgtggtggtgtgatcatagctcactgcagccttgaactcctgggctcaggtgattcacctgtcttagcctctcaaatggttgggattacaggtatacaccaccatacccagctaaattttttttttttaatttttttgtagagacaagatctcgtcatgttgaccaggcttgtcttgaactcctggccccaagtgatcctcccacctcagtctcccaaagtgttgggattatatgcacgagtcactgtgcataatgattttaaaatttcagagatctcaaaagatgttactgtaccc

SEQ ID NO: 9511 - DNA, 431 bp, Homo sapiens
atcactccatccccctgggtcgtcttcatcactcttactactatctgaaatcaaatctgtttgttttttcctatagaaggtttgtaaaggccttatacagactcaccactgtgcctcacctgggcattaacacccaagaccctagccctgaaagcccagtgccaggccccagacatgctcccatcccctgccactcagcttacagtcctctttctgtttcctcttctttgtggattcacctttttttgggtgtgagcccagccatggtttaacctttttttggttcttggttatatttaatccagtatttcagatattcagaattgacaacttcagtgttcactcagtctatcacgttactagaaccagaagtgtctccaaccctgtatactatttcttacacacattgacatttgagaccactgagttca

SEQ ID NO: 9512 - DNA, 230 bp, Homo sapiens
tgtgcaatacaaaaggaacaggaagatttgaaagcggtcagacaatacttagaaatgaaagcatacaataattgatattaaaatgtcatcggttttcattcagcaaacttttgagttctatgtgccactgtgtagttcttactatagtattttataatcatgcaaaggcagacttacataatatgaaggaagatttgaggatgtcacctagaaaacagcatgtagatata

SEQ ID NO: 9513 - DNA, 348 bp, Homo sapiens
agacaacttgactccgttgggcattaaacgttggccaaagtatttctggggctgtgagtttccttgtatatccttatttagtctctccttccagctctaaaagccttctgaaaagacttaacccgtattctatctgcttttgttcctcacattttcagacaactgattaaaatcacaacttagaagagtatttcttggctcttacccttttgagtagttggagaataattgctacctttcccttcagtattctcattaatatttgagaacttcaaacggcagaaaaacacaaaaaacaaattgagaactgtgtattgcaatcttggttcatctctaacacgctggaaa

SEQ ID NO: 9514 - DNA, 290 bp, Homo sapiens
cccagccctcatcctgagccctgctgtgtgcactgtgtctgatggagaggcagcctctctggatggcagctctctccatattccaaaggcattcttctcctgttctccttccctctttttaaattaaatgggaatgccactgacgtgatgtcgtttgcactgcaggatgacagaactgttgtgtgaataccattgtatttgccaaatggtccactcgtcatttcagaacaaacaaatggatggtgtctgtaagtcggcaaacactggtgacatttagccttgtttatgtt

SEQ ID NO: 9515 - DNA, 325 bp, Homo sapiens
gaccaatagaatgtgaattgggaaagtgaaggaacaaaaaaaatcacccaataacaataattgcaatagccatttactgtactccaggtattctctcatttcgagcatccttttctttaaaccttgtaaccaccttatgatcctcattttacagatgagaaaatgggagattagagcgctttaaaaaattgccgtggtggctcgtgcctgtattcccagctacttgggaggctgaggcaggagaatcgcttgaaccagggagtcagaggttgcagtgagccaagatcgtgccactgcactctagcctgggtgacagagtgagaca

SEQ ID NO: 9516 - DNA, 703 bp, Homo sapiens
gcatgctccgggtgtcccgagagttgtcctgcgccggtgttcccacgtgcggcctgaacctgagcgcataatgttatgaggagatgggagcactagtgattcgcggtatcaggaatttcaacctagagaaccgagcggaacgggaaatcagcaagatgaagccctctgtcgctcccagacacccctctaccaacagcctcctgcgagagcagattagtctctatccagaagttaaaggagagattgctcgtaaagatgaaaagctgctgtcgtttctaaaagatgtgtatgttgattccaaagatcctgtgtcttccttgcaggtaaaagctgctgaaacatgtcaagagccgaaggaattcagattgccgaaagaccatcattttgatatgataaatattaagagcattcccaaaggcaaaatttccattgtagaagcattgacacttctcaataatcataagcttttcccagaaacctggactgctgagaaaataatgcaagaataccagttagaacagaaagatgtgaattctcttcttaaatattttgttacttttgaagtcgaaatcttccctcctgaagacaagaaagcaatacgatcaaaatgaagaaaatcacagaaatttcctatgtgtactcctcatccctcctgctgtatattttctcattttttgcgtaataaattatgttaattaccaaa

SEQ ID NO: 9517 - DNA, 733 bp, Homo sapiens
gccaaaaccaaccacacacagacagccaaaaacagaaggaacttacggctaggaagcgaggctggggtgggtgcacgtgcggcctgaacctgagcgcataatgttatgaggagatgggagcactagtgattcgcggtatcaggaatttcaacctagagaaccgagcggaacgggaaatcagcaagatgaagccctctgtcgctcccagacacccctctaccaacagcctcctgcgagagcagattagtctctatccagaagttaaaggagagattgctcgtaaagatgaaaagctgctgtcgtttctaaaagatgtgtatgttgattccaaagatcctgtgtcttccttgcaggtaaaagctgctgaaacatgtcaagagccgaaggaattcagattgccgaaagaccatcattttgatatgataaatattaagagcattcccaaaggcaaaatttccattgtagaagcattgacacttctcaataatcataagcttttcccagaaacctggactgctgagaaaataatgcaagaataccagttagaacagaaagatgtgaattctcttcttaaatattttgttacttttgaagtcgaaatcttccctcctgaagacaagaaagcaatacgatcaaaatgaagaaaatcacagaaatttcctatgtgtactcctcatccctcctgctgtatattttctcattttttgcgtaataaattatgttaattaccaaa

SEQ ID NO: 9518 - DNA, 555 bp, Homo sapiens
gtgttaagcgtttaggatattacaggaaattttccttgattttaatattgtgacttttttcctttccttagtctatccagaagttaaaggagagattgctcgtaaagatgaaaagctgctgtcgtttctaaaagatgtgtatgttgattccaaagatcctgtgtcttccttgcaggtaaaagctgctgaaacatgtcaagagccgaaggaattcagattgccgaaagaccatcattttgatatgataaatattaagagcattcccaaaggcaaaatttccattgtagaagcattgacacttctcaataatcataagcttttcccagaaacctggactgctgagaaaataatgcaagaataccagttagaacagaaagatgtgaattctcttcttaaatattttgttacttttgaagtcgaaatcttccctcctgaagacaagaaagcaatacgatcaaaatgaagaaaatcacagaaatttcctatgtgtactcctcatccctcctgctgtatattttctcattttttgcgtaataaattatgttaattaccaaa

SEQ ID NO: 9519 - DNA, 533 bp, Homo sapiens
ggactacaatttggtgacatgagatttgggtggggacacagatccaaaccatattagttgttatttgaagaggaatagtgtagatttgagaagtatgaaagtagatgtcaaatcttttctctcatcctaaaacctttttttttttgatactaggtaaaagctgctgaaacatgtcaagagccgaaggaattcagattgccgaaagaccatcattttgatatgataaatattaagagcattcccaaaggcaaaatttccattgtagaagcattgacacttctcaataatcataagcttttcccagaaacctggactgctgagaaaataatgcaagaataccagttagaacagaaagatgtgaattctcttcttaaatattttgttacttttgaagtcgaaatcttccctcctgaagacaagaaagcaatacgatcaaaatgaagaaaatcacagaaatttcctatgtgtactcctcatccctcctgctgtatattttctcattttttgcgtaataaattatgttaattaccaaa

SEQ ID NO: 9520 - DNA, 2411 bp, Homo sapiens
gcatgctccgggtgtcccgagagttgtcctgcgccggtgttcccacgtgcggcctgaacctgagcgcataatgttatgaggagatgggagcactagtgattcgcggtatcaggaatttcaacctagagaaccgagcggaacgggaaatcagcaagatgaagccctctgtcgctcccagacacccctctaccaacagcctcctgcgagagcagattagtctctatccagaagttaaaggagagattgctcgtaaagatgaaaagctgctgtcgtttctaaaagatgtgtatgttgattccaaagatcctgtgtcttccttgcaggtaaaagctgctgaaacatgtcaagagccgaaggaattcagattgccgaaagaccatcattttgatatgataaatattaagagcattcccaaaggcaaaatttccattgtagaagcattgacacttctcaataatcataagcttttcccagaaacctggactgctgagaaaataatgcaagaataccagttagaacagaaagatgtgaattctcttcttaaatattttgttacttttgaagtcgaaatcttccctcctgaagacaagaaagcaatacgatcaaaatgaagaaaatcacagaaatttcctatgtgtactcctcatccctcctgctgtatattttctcattttttgcgtaataaattatgttaattaccaaatatttaatgctctcattgtgagggcatactcttaatatttattgagctccctgacttttcaagattgccatagaatatcttttgttttattttaatttggtttaggcatatttcataagtgcatgtcagcatgactgagcacatctgtacctttattatggtgaaagagttaattcgttattttaggcacatataccaacttttaaattggtcatattaccccttgggaaatgtcctgaatccctcaactgagttttactttccaagttaggtgtttagttcattcttctcatgcgatagtgaaagtaaaagctttcctgacccttaagactgacattttctcgttagggaaagagactcgatagcagggtagactaacagtagttcccaaataaaggcacacaggagaaaatgaatcaatagaatctaattaaaattactactccagggaataagaagtattgaggatttattttattttgaattggttttaagtatggaataattgtctttacagttataaaaagtaattagtggtgtttacaaaatgttgggaatttctgctttgacagataggtaagtcccatgggaatttctgctttgacaaatagttaagtcccatggccttcagagaggcaggaagcagaaactttcaaaaaagtaacatttctctggatttaatgtggaaatagagaaaaatttaaagaataattaaaaaaccatggtagatgaaatttggtgattacatatagtttcggatgttaatgctagttgagagaagagaaaaagatagcaagtagaagcagagaacaggatcattggaagggacctgagaaattgccatttcatccattttagcaaatttaattagcatagcatgtaccagtactaggatcttgagtgagtgtgtgagtttagctctgcctaatatattactacttgggggatctttgggagactatatcttcttggagattgagtttcttctataaaataagcataatgctaccctaaatgtaagggttatcatgaagataaataataaaggactacaaaggaccaagcaaataggaattattttttgcggtggagaaacaagtgcctggggagaatatatgaccgaagattctgtagtttatgacttaaacaggcccagaatttagtttttcaaatcctagtagtgtgttttttctgtcttgccaaaaagcagcacacctcaaagaagggaaaaggtgtgaattgtgggtatattagggttattagtgcttccgagggaagataggcatcactacttcccagagatgcccctggaaatgatatagaggatgttgaagaattcaatgtgatgacggaatgaggcatttgtagtaatgctgagaacagaaaaatggactaagtggaaaatttgtaagcatgactttgaatgtagatttgttatgtgaacaaactacctagtttatttttagttcaatacaataattgttttaagaaaacatgaaataactactcaatataaaatgcattttaaaactgtaaataagtcaaaactttattctttttatcataatggtcactagctgagtcacaaatactagtacactcttctgagccatcttctttattcatatctacattgtgtggttaggcatctgttatgtggtgtcacatgataaaataaagaacttcttcccataccaaaaaaaaatcc

SEQ ID NO: 9521 - DNA, 1828 bp, Homo sapiens
gcatgctccgggtgtcccgagagttgtcctgcgccggtgttcccacgtgcggcctgaacctgagcgcataatgttatgaggagatgggagcactagtgattcgcggtatcaggaatttcaacctagagaaccgagcggaacgggaaatcagcaagatgaagccctctgtcgctcccagacacccctctaccaacagcctcctgcgagagcagattagtctctatccagaagttaaaggagagattgctcgtaaagatgaaaagctgctgtcgtttctaaaagatgtgtatgttgattccaaagatcctgtgtcttccttgcaggtaaaagctgctgaaacatgtcaagagccgaaggaattcagattgccgaaagaccatcattttgatatgataaatattaagagcattcccaaaggcaaaatttccattgtagaagcattgacacttctcaataatcataagcttttcccagaaacctggactgctgagaaaataatgcaagaataccagttagaacagaaagatgtgaattctcttcttaaatattttgttacttttgaagtcgaaatcttccctcctgaagacaagaaagcaatacgatcaaaatgaagaaaatcacagaaatttcctatgtgtactcctcatccctcctgctgtatattttctcattttttgcgtaataaattatgttaattaccaaatatttaatgctctcattgtgagggcatactcttaatatttattgagctccctgacttttcaagattgccatagaatatcttttgttttattttaatttggtttaggcatatttcataagtgcatgtcagcatgactgagcacatctgtacctttattatggtgaaagagttaattcgttattttaggcacatataccaacttttaaattggtcatattaccccttgggaaatgtcctgaatccctcaactgagttttactttccaagttaggtgtttagttcattcttctcatgcgatagtgaaagtaaaagctttcctgacccttaagactgacattttctcgttagggaaagagactcgatagcagggtagaactatatcttcttggagattgagtttcttctataaaataagcataatgctaccctaaatgtaagggttatcatgaagataaataataaaggactacaaaggaccaagcaaataggaattattttttgcggtggagaaacaagtgcctggggagaatatatgaccgaagattctgtagtttatgacttaaacaggcccagaatttagtttttcaaatcctagtagtgtgttttttctgtcttgccaaaaagcagcacacctcaaagaagggaaaaggtgtgaattgtgggtatattagggttattagtgcttccgagggaagataggcatcactacttcccagagatgcccctggaaatgatatagaggatgttgaagaattcaatgtgatgacggaatgaggcatttgtagtaatgctgagaacagaaaaatggactaagtggaaaatttgtaagcatgactttgaatgtagatttgttatgtgaacaaactacctagtttatttttagttcaatacaataattgttttaagaaaacatgaaataactactcaatataaaatgcattttaaaactgtaaataagtcaaaactttattctttttatcataatggtcactagctgagtcacaaatactagtacactcttctgagccatcttctttattcatatctacattgtgtggttaggcatctgttatgtggtgtcacatgataaaataaagaacttcttcccataccaaaaaaaaatcc

SEQ ID NO: 9522 - DNA, 2481 bp, Homo sapiens
gcatgctccgggtgtcccgagagttgtcctgcgccggtgttcccacgtgcggcctgaacctgagcgcataatgttatgaggagatgggagcactagtgattcgcggtatcaggaatttcaacctagagaaccgagcggaacgggaaatcagcaagatgaagccctctgtcgctcccagacacccctctaccaacagcctcctgcgagagcagattagtctctatccagaagttaaaggagagattgctcgtaaagatgaaaagctgctgtcgtttctaaaagatgtgtatgttgattccaaagatcctgtgtcttccttgcagggcctatgatgttgtgaaggacacagccattaaacaaatgagcaacaatgtgaccataattatgggaaaagtaaaagctgctgaaacatgtcaagagccgaaggaattcagattgccgaaagaccatcattttgatatgataaatattaagagcattcccaaaggcaaaatttccattgtagaagcattgacacttctcaataatcataagcttttcccagaaacctggactgctgagaaaataatgcaagaataccagttagaacagaaagatgtgaattctcttcttaaatattttgttacttttgaagtcgaaatcttccctcctgaagacaagaaagcaatacgatcaaaatgaagaaaatcacagaaatttcctatgtgtactcctcatccctcctgctgtatattttctcattttttgcgtaataaattatgttaattaccaaatatttaatgctctcattgtgagggcatactcttaatatttattgagctccctgacttttcaagattgccatagaatatcttttgttttattttaatttggtttaggcatatttcataagtgcatgtcagcatgactgagcacatctgtacctttattatggtgaaagagttaattcgttattttaggcacatataccaacttttaaattggtcatattaccccttgggaaatgtcctgaatccctcaactgagttttactttccaagttaggtgtttagttcattcttctcatgcgatagtgaaagtaaaagctttcctgacccttaagactgacattttctcgttagggaaagagactcgatagcagggtagactaacagtagttcccaaataaaggcacacaggagaaaatgaatcaatagaatctaattaaaattactactccagggaataagaagtattgaggatttattttattttgaattggttttaagtatggaataattgtctttacagttataaaaagtaattagtggtgtttacaaaatgttgggaatttctgctttgacagataggtaagtcccatgggaatttctgctttgacaaatagttaagtcccatggccttcagagaggcaggaagcagaaactttcaaaaaagtaacatttctctggatttaatgtggaaatagagaaaaatttaaagaataattaaaaaaccatggtagatgaaatttggtgattacatatagtttcggatgttaatgctagttgagagaagagaaaaagatagcaagtagaagcagagaacaggatcattggaagggacctgagaaattgccatttcatccattttagcaaatttaattagcatagcatgtaccagtactaggatcttgagtgagtgtgtgagtttagctctgcctaatatattactacttgggggatctttgggagactatatcttcttggagattgagtttcttctataaaataagcataatgctaccctaaatgtaagggttatcatgaagataaataataaaggactacaaaggaccaagcaaataggaattattttttgcggtggagaaacaagtgcctggggagaatatatgaccgaagattctgtagtttatgacttaaacaggcccagaatttagtttttcaaatcctagtagtgtgttttttctgtcttgccaaaaagcagcacacctcaaagaagggaaaaggtgtgaattgtgggtatattagggttattagtgcttccgagggaagataggcatcactacttcccagagatgcccctggaaatgatatagaggatgttgaagaattcaatgtgatgacggaatgaggcatttgtagtaatgctgagaacagaaaaatggactaagtggaaaatttgtaagcatgactttgaatgtagatttgttatgtgaacaaactacctagtttatttttagttcaatacaataattgttttaagaaaacatgaaataactactcaatataaaatgcattttaaaactgtaaataagtcaaaactttattctttttatcataatggtcactagctgagtcacaaatactagtacactcttctgagccatcttctttattcatatctacattgtgtggttaggcatctgttatgtggtgtcacatgataaaataaagaacttcttcccataccaaaaaaaaatcc

SEQ ID NO: 9523 - DNA, 716 bp, Homo sapiens
gcatgctccgggtgtcccgagagttgtcctgcgccggtgttcccacgtgcggcctgaacctgagcgcataatgttatgaggagatgggagcactagtgattcgcggtatcaggaatttcaacctagagaaccgagcggaacgggaaatcagcaagatgaagccctctgtcgctcccagacacccctctaccaacagcctcctgcgagagcagattagtcgtgagtggtgcgagggcgtttcggggcccgggggcgcggagtccctgtgctgcccggctgtccctagcgtgggtccggaggccgagggatcggcgtcagcctgctcggccgcagccgctcgggttggcggagcgttggaagggggagccgccaggccggtgacattgagactgtcctccgcgcccgcggtgaggtcggcggccccgcctacttccgagacccagaggcagcagccagtgctcccgctaaccaggccctcgccggctgctgtcacggacttgatacagggaatcaaaatccgagagggtcacagagctttctctaggggtcttcactggacgatggacgcagagcctgacctggaattttgatttccatctaaagtattttcctaacagtccaaatgattatgtttattttttaaaaaaattaaagtggttaggccagccaaaatgatatcttttctaactgtgcttttaagttctctccttgggacc

SEQ ID NO: 9524 - DNA, 2441 bp, Homo sapiens
gccaaaaccaaccacacacagacagccaaaaacagaaggaacttacggctaggaagcgaggctggggtgggtgcacgtgcggcctgaacctgagcgcataatgttatgaggagatgggagcactagtgattcgcggtatcaggaatttcaacctagagaaccgagcggaacgggaaatcagcaagatgaagccctctgtcgctcccagacacccctctaccaacagcctcctgcgagagcagattagtctctatccagaagttaaaggagagattgctcgtaaagatgaaaagctgctgtcgtttctaaaagatgtgtatgttgattccaaagatcctgtgtcttccttgcaggtaaaagctgctgaaacatgtcaagagccgaaggaattcagattgccgaaagaccatcattttgatatgataaatattaagagcattcccaaaggcaaaatttccattgtagaagcattgacacttctcaataatcataagcttttcccagaaacctggactgctgagaaaataatgcaagaataccagttagaacagaaagatgtgaattctcttcttaaatattttgttacttttgaagtcgaaatcttccctcctgaagacaagaaagcaatacgatcaaaatgaagaaaatcacagaaatttcctatgtgtactcctcatccctcctgctgtatattttctcattttttgcgtaataaattatgttaattaccaaatatttaatgctctcattgtgagggcatactcttaatatttattgagctccctgacttttcaagattgccatagaatatcttttgttttattttaatttggtttaggcatatttcataagtgcatgtcagcatgactgagcacatctgtacctttattatggtgaaagagttaattcgttattttaggcacatataccaacttttaaattggtcatattaccccttgggaaatgtcctgaatccctcaactgagttttactttccaagttaggtgtttagttcattcttctcatgcgatagtgaaagtaaaagctttcctgacccttaagactgacattttctcgttagggaaagagactcgatagcagggtagactaacagtagttcccaaataaaggcacacaggagaaaatgaatcaatagaatctaattaaaattactactccagggaataagaagtattgaggatttattttattttgaattggttttaagtatggaataattgtctttacagttataaaaagtaattagtggtgtttacaaaatgttgggaatttctgctttgacagataggtaagtcccatgggaatttctgctttgacaaatagttaagtcccatggccttcagagaggcaggaagcagaaactttcaaaaaagtaacatttctctggatttaatgtggaaatagagaaaaatttaaagaataattaaaaaaccatggtagatgaaatttggtgattacatatagtttcggatgttaatgctagttgagagaagagaaaaagatagcaagtagaagcagagaacaggatcattggaagggacctgagaaattgccatttcatccattttagcaaatttaattagcatagcatgtaccagtactaggatcttgagtgagtgtgtgagtttagctctgcctaatatattactacttgggggatctttgggagactatatcttcttggagattgagtttcttctataaaataagcataatgctaccctaaatgtaagggttatcatgaagataaataataaaggactacaaaggaccaagcaaataggaattattttttgcggtggagaaacaagtgcctggggagaatatatgaccgaagattctgtagtttatgacttaaacaggcccagaatttagtttttcaaatcctagtagtgtgttttttctgtcttgccaaaaagcagcacacctcaaagaagggaaaaggtgtgaattgtgggtatattagggttattagtgcttccgagggaagataggcatcactacttcccagagatgcccctggaaatgatatagaggatgttgaagaattcaatgtgatgacggaatgaggcatttgtagtaatgctgagaacagaaaaatggactaagtggaaaatttgtaagcatgactttgaatgtagatttgttatgtgaacaaactacctagtttatttttagttcaatacaataattgttttaagaaaacatgaaataactactcaatataaaatgcattttaaaactgtaaataagtcaaaactttattctttttatcataatggtcactagctgagtcacaaatactagtacactcttctgagccatcttctttattcatatctacattgtgtggttaggcatctgttatgtggtgtcacatgataaaataaagaacttcttcccataccaaaaaaaaatcc

SEQ ID NO: 9525 - DNA, 1099 bp, Homo sapiens
  misc_feature (709)..(709): n is a, c, g, or t
  misc_feature (735)..(736): n is a, c, g, or t
  misc_feature (752)..(752): n is a, c, g, or t
  misc_feature (769)..(770): n is a, c, g, or t
  misc_feature (783)..(783): n is a, c, g, or t
gcatgctccgggtgtcccgagagttgtcctgcgccggtgttcccacgtgcggcctgaacctgagcgcataatgttatgaggagatgggagcactagtgattcgcggtatcaggaatttcaacctagagaaccgagcggaacgggaaatcagcaagatgaagccctctgtcgctcccagacacccctctaccaacagcctcctgcgagagcagattagtctctatccagaagttaaaggagagattgctcgtaaagatgaaaagctgctgtcgtttctaaaagatgtgtatgttgattccaaagatcctgtgtcttccttgcaggtaaaagctgctgaaacatgtcaagagccgaaggaattcagattgccgaaagaccatcattttgatatgataaatattaagagcattcccaaaggcaaaatttccattgtagaagcattgacacttctcaataatcataagcttttcccagaaacctggactgctgagaaaataatgcaagaataccagttagaacagaaagatgtgaattctcttcttaaatattttgttacttttgaagtcgaaatcttccctcctgaagacaagaaagcaatacgatcaaaatgaagaaaatcacagaaatttcctatgtgtactcctcatccctcctgctgtatattttctcattttttgcgtaataaattatgttaattaccaaaaaaaanaaaaaaaaaaaaaaaaaaacaagagnncaatataaaaaaacgnggactctaacaaaaagnncataaaaaatgtntatgaggaaggtgccccccttctggaagccgcctcctattcaaggcttttgggggtcttgttctacacaagactaatttgggtacccttgggggggcccccccatggaaaactttcatttttatacccgagaacgttttttggtaggcaccgtataaaatctattgggcgggaaccaaaatttttgggagggattatcagcacccggcgcgtggttgaaaaaccagggagggggaaacaccccttcctggccccataataaccgggtatttctatcttcccttttggcccgtggtttaaaccaatctcccggttta

SEQ ID NO: 9526 - DNA, 4573 bp, Homo sapiens
  misc_feature (2842)..(2842): n is a, c, g, or t
cccattccttgcccagttacacagcactactggacctcagtcacaacaacctgagccgcctgcgggccgagtggacccccacgcgcctgacccaactgcactccctgctgctgagccacaaccacctgaacttcatctcctctgaggccttttccccggtacccaacctgcgctacctggacctctcctccaaccagctgcgtacactggatgagttcctgttcagtgacctgcaagtactggaggtgctgctgctctacaataaccacatcatggcggtggaccggtgcgccttcgatgacatggcccagctgcagaaactctacttgagccagaaccagatctctcgcttccctctggaactggtcaaggaaggagccaagctacccaaactaacgctcctggatctctcttctaacaagctgaagaacttgccattgcctgacctgcagaagctgccggcctggatcaagaatgggctgtacctacataacaaccccctgaactgcgactgtgagctctaccagctgttttcacactggcagtatcggcagctgagctccgtgatggactttcaagaggatctgtactgcatgaactccaagaagctgcacaatgtcttcaacctgagtttcctcaactgtggcgagtacaaggagcgtgcctgggaggcccacctgggtgacaccttgatcatcaagtgtgacaccaagcagcaagggatgaccaaggtgtgggtgacaccaagtaatgaacgggtgctagatgaggtgaccaatggcacagtgagtgtgtctaaggatggcagtcttcttttccagcaggtgcaggtcgaggacggtggtgtgtatacctgctatgccatgggagagactttcaatgagacactgtctgtggaattgaaagtgcacaatttcaccttgcacggacaccatgacaccctcaacacagcctataccaccctagtgggctgtatccttagtgtggtcctggtcctcatatacctatacctcaccccttgccgctgctggtgccggggtgtagagaagccttccagccatcaaggagacagcctcagctcttccatgcttagtaccacacccaaccatgatcctatggctggtggggacaaagatgatggttttgaccggcgggtggctttcctggaacctgctggacctgggcagggtcaaaacggcaagctcaagccaggcaacaccctgccagtgcctgaggccacaggcaagggccaacggaggatgtcggatccagaatcagtcagctcggtcttctctgatacgcccattgtggtgtgagcaggatgggttggtggggagattctgccccaggagaggtaatgcacccctgaaggatatgaggggatggaagagagggctggctgcccaagggaatggattcctcctgacctcaagggaattggtcccaggtacaacagagagcaagaccccaaacagggcgtggctgccacgattttcaaatgggggtatattaatcctcaggcaaatgctacacccgtacccaaagccctgccaattctcagtgtggtagaggaagagaagcatgtctgagttggatgggaatgaggaaggagtgaggggaagaacagattccctaaactttcatgaggtcatccctagctccttaagagaaaaacatttagaaaaaaaaattttttctatctctgcccacccacacctgtgatgttgtgtgtgttgggggagcttccacaggagccacactggggaaaagctgtagtatcttctttgtttagcaagtcaaacttcacagctggggaagttgaaaacctttggaaaatgagtcaggaaaaggctgagacctcaatcggtaacaattccccaaagctgttgtaagactttgcattaaagccttcctttttcctgatgtgccctgggtggatggatctttgcaggagcctggcctgctgccttttagttacaacagcaatgtgggatgtggtatctgtgccttgtcctgggaccaatggcacagagggttatagcatgaactgaagggtccatgtcacagcataggtgccagcacgaaacttgtagatggggggtgaattccagataggctaattccctggttggtgaaacccttggttagtatttgattcccagcatctgtgtgtcaggccagagtgggggctgctgaaggcagagcttttatggatgcctgccacagacgtggtacatgggcccacttcacgatagaaggatgaaggtaaatcagcctctattatgtagcatccagctggacctagctgattctcaatgtatgccatctcttcatccagtctccttatcaagctcaggtgggattctgaattttccctaatatgctgctctgtaaagggaggagtccaagaaagcctggccccagctggcttagagtaggcttggcgatagtgaaaatccagtatatatctcctctgtgtggacaaggttgccttgctcctctcagagataccacctctgctgcaaagtcaaagcatggggttttgacatcagaagggttggaattgggtggtctctaccccagaatggcaatttggagtgcagcttcaagttctgccctctccacagattccaggcaatcctgaagcagagataatcagtagtactaaactttcagaaggggagttctgccaccccattcctccatcgagaggtctttgcagttgtggttgtgaggccagaggaacttaagaagaatgagctcaacattccattccatccaaggttgcagaatactttgagtatggagatgaccgatccctttaacctttccctttgactanactgcatgccctgtgagtggctgctctgagctttggcgggggatgagcagggtgaaggtgaaaatgttctctgatgttggtttttcttagtgtctcttctctcccacgtttctagtccattggaagttctccagatcctctagatttctgacctctttttacattctaagaggtgtcatttacctgtgggtgaggggcttggagggcctgactattaagcttcctattatgattggggaaggggactcaacatcttccccttgtctggtcctgggaactcaagactgctgtccatcctttattagtaacctagttttgttgagagagaggtgcagcatttccctcaagtacctgcatgctcataggtatgcatgcttataggtatgcatgcacaccagcaccttgacttccaccaggacagtgaatctgtagtccccattaatgatactctcagaatggtctccaccaatgtgcacaacttcatgcacacaattgtattcctctttaggagagacagtgaccatgccaggctcttcaaatacacactcctgtattttcatttctgaactccctgaagcttcacccacatctccatggcactgaatcacttttctgcccaggctggagttagaagaaccatgggttgaaggccttgggagaagaggtggtaaggagctacctgggttctttggactcctcaggaaacctccccgtggaagactatatatatgagcaatatatgagcaattaagatagaactaggtcattgaaggactcagaaggaaactggcaaggggctaagtagctgtgagctgctcttcctgttaactgtcctcaggagagaaaagttgtcttgatttattccagagactcctgagaattttgttactggagctataggaactaggactccctcctcagactcatcaggaaatctgggaaaatctcatctccatgctgcagtctccccgcttggcaccatctagggctctgaagatctttaaagtgagcgttaaatgaagcaggccttctggggcatcgtgatggagctcctgaggactgggagggccgttttcttcataattcctacccagtttagggaatgagaaaaggccctgtggctcttaagtctcctgactatatccactagtttggccttgagtttgagacacctggtagatgtacctggctgccctaccaagagatttgatttgtttcttcccgtggtttcaggtgatagaacccaaaggtagctttttaattggagaattgaataatcagcatatgtaagcgcactagaaccctgtgttgaaaactgccaggtgtgggtataagaaaaggccgagagatcaccacctcctcttaccctaccccacacccataaaccagacatgtctcccaggaagcaggtgtccctggagacagaggatgacagggctctacaatctgtgtaattattattattattattattttgtatttatggggcccaagaaaggggccaggagagggtacaccccagctggggagagcaaagcagatggatccagttttctgtgtgttcttacctctgtacttcctcgtagctctgctgacaaagcaagcaggcctcccgtgtccaagaccccattcctcccacttgtgtacacctaggctggcaaatcttggagcctctgggctctgaaaactagacaatgatcattaaacctggcttgagtctctgttctggca

SEQ ID NO: 9527 - DNA, 1553 bp, Homo sapiens
  misc_feature (31)..(31): n is a, c, g, or t
aaggctaggtacgaggctggtgttaatcggncgaggattagcttcctattatgattggggaaggggactcaacatcttccccttgtctggtcctgggaactcaagactgctgtccatcctttattagtaacctagttttgttgagagagaggtgcagcatttccctcaagtacctgcatgctcataggtatgcatgcttataggtatgcatgcacaccagcaccttgacttccaccaggacagtgaatctgtagtccccattaatgatactctcagaatggtctccaccaatgtgcacaacttcatgcacacaattgtattcctctttaggagagacagtgaccatgccaggctcttcaaatacacactcctgtattttcatttctgaactccctgaagcttcacccacatctccatggcactgaatcacttttctgcccaggctggagttagaagaaccatgggttgaaggccttgggagaagaggtggtaaggagctacctgggttctttggactcctcaggaaacctccccgtggaagactatatatatgagcaatatatgagcaattaagatagaactaggtcattgaaggactcagaaggaaactggcaaggggctaagtagctgtgagctgctcttcctgttaactgtcctcaggagagaaaagttgtcttgatttattccagagactcctgagaattttgttactggagctataggaactaggactccctcctcagactcatcaggaaatctgggaaaatctcatctccatgctgcagtctccccgcttggcaccatctagggctctgaagatctttaaagtgagcgttaaatgaagcaggccttctggggcatcgtgatggagctcctgaggactgggagggccgttttcttcataattcctacccagtttagggaatgagaaaaggccctgtggctcttaagtctcctgactatatccactagtttggccttgagtttgagacacctggtagatgtacctggctgccctaccaagagatttgatttgtttcttcccgtggtttcaggtgatagaacccaaaggtagctttttaattggagaattgaataatcagcatatgtaagcgcactagaaccctgtgttgaaaactgccaggtgtgggtataagaaaaggccgagagatcaccacctcctcttaccctaccccacacccataaaccagacatgtctcccaggaagcaggtgtccctggagacagaggatgacagggctctacaatctgtgtaattattattattattattattttgtatttatggggcccaagaaaggggccaggagagggtacaccccagctggggagagcaaagcagatggatccagttttctgtgtgttcttacctctgtacttcctcgtagctctgctgacaaagcaagcaggcctcccgtgtccaagaccccattcctcccacttgtgtacacctaggctggcaaatcttggagcctctgggctctgaaaactagacaatgatcattaaacctggcttgagtctctgttctggca

SEQ ID NO: 9528 - DNA, 4955 bp, Homo sapiens
  misc_feature (2842)..(2842): n is a, c, g, or t
cccattccttgcccagttacacagcactactggacctcagtcacaacaacctgagccgcctgcgggccgagtggacccccacgcgcctgacccaactgcactccctgctgctgagccacaaccacctgaacttcatctcctctgaggccttttccccggtacccaacctgcgctacctggacctctcctccaaccagctgcgtacactggatgagttcctgttcagtgacctgcaagtactggaggtgctgctgctctacaataaccacatcatggcggtggaccggtgcgccttcgatgacatggcccagctgcagaaactctacttgagccagaaccagatctctcgcttccctctggaactggtcaaggaaggagccaagctacccaaactaacgctcctggatctctcttctaacaagctgaagaacttgccattgcctgacctgcagaagctgccggcctggatcaagaatgggctgtacctacataacaaccccctgaactgcgactgtgagctctaccagctgttttcacactggcagtatcggcagctgagctccgtgatggactttcaagaggatctgtactgcatgaactccaagaagctgcacaatgtcttcaacctgagtttcctcaactgtggcgagtacaaggagcgtgcctgggaggcccacctgggtgacaccttgatcatcaagtgtgacaccaagcagcaagggatgaccaaggtgtgggtgacaccaagtaatgaacgggtgctagatgaggtgaccaatggcacagtgagtgtgtctaaggatggcagtcttcttttccagcaggtgcaggtcgaggacggtggtgtgtatacctgctatgccatgggagagactttcaatgagacactgtctgtggaattgaaagtgcacaatttcaccttgcacggacaccatgacaccctcaacacagcctataccaccctagtgggctgtatccttagtgtggtcctggtcctcatatacctatacctcaccccttgccgctgctggtgccggggtgtagagaagccttccagccatcaaggagacagcctcagctcttccatgcttagtaccacacccaaccatgatcctatggctggtggggacaaagatgatggttttgaccggcgggtggctttcctggaacctgctggacctgggcagggtcaaaacggcaagctcaagccaggcaacaccctgccagtgcctgaggccacaggcaagggccaacggaggatgtcggatccagaatcagtcagctcggtcttctctgatacgcccattgtggtgtgagcaggatgggttggtggggagattctgccccaggagaggtaatgcacccctgaaggatatgaggggatggaagagagggctggctgcccaagggaatggattcctcctgacctcaagggaattggtcccaggtacaacagagagcaagaccccaaacagggcgtggctgccacgattttcaaatgggggtatattaatcctcaggcaaatgctacacccgtacccaaagccctgccaattctcagtgtggtagaggaagagaagcatgtctgagttggatgggaatgaggaaggagtgaggggaagaacagattccctaaactttcatgaggtcatccctagctccttaagagaaaaacatttagaaaaaaaaattttttctatctctgcccacccacacctgtgatgttgtgtgtgttgggggagcttccacaggagccacactggggaaaagctgtagtatcttctttgtttagcaagtcaaacttcacagctggggaagttgaaaacctttggaaaatgagtcaggaaaaggctgagacctcaatcggtaacaattccccaaagctgttgtaagactttgcattaaagccttcctttttcctgatgtgccctgggtggatggatctttgcaggagcctggcctgctgccttttagttacaacagcaatgtgggatgtggtatctgtgccttgtcctgggaccaatggcacagagggttatagcatgaactgaagggtccatgtcacagcataggtgccagcacgaaacttgtagatggggggtgaattccagataggctaattccctggttggtgaaacccttggttagtatttgattcccagcatctgtgtgtcaggccagagtgggggctgctgaaggcagagcttttatggatgcctgccacagacgtggtacatgggcccacttcacgatagaaggatgaaggtaaatcagcctctattatgtagcatccagctggacctagctgattctcaatgtatgccatctcttcatccagtctccttatcaagctcaggtgggattctgaattttccctaatatgctgctctgtaaagggaggagtccaagaaagcctggccccagctggcttagagtaggcttggcgatagtgaaaatccagtatatatctcctctgtgtggacaaggttgccttgctcctctcagagataccacctctgctgcaaagtcaaagcatggggttttgacatcagaagggttggaattgggtggtctctaccccagaatggcaatttggagtgcagcttcaagttctgccctctccacagattccaggcaatcctgaagcagagataatcagtagtactaaactttcagaaggggagttctgccaccccattcctccatcgagaggtctttgcagttgtggttgtgaggccagaggaacttaagaagaatgagctcaacattccattccatccaaggttgcagaatactttgagtatggagatgaccgatccctttaacctttccctttgactanactgcatgccctgtgagtggctgctctgagctttggcgggggatgagcagggtgaaggtgaaaatgttctctgatgttggtttttcttagtgtctcttctctcccacgtttctagtccattggaagttctccagatcctctagatttctgacctctttttacattctaagaggtgtcatttacctgtgggtgaggggcttggagggcctgactattaagcttcctattatgattggggaaggggactcaacatcttccccttgtctggtcctgggaactcaagactgctgtccatcctttattagtaacctagttttgttgagagagaggtgcagcatttccctcaagtacctgcatgctcataggtatgcatgcttataggtatgcatgcacaccagcaccttgacttccaccaggacagtgaatctgtagtccccattaatgatactctcagaatggtctccaccaatgtgcacaacttcatgcacacaattgtattcctctttaggagagacagtgaccatgccaggctcttcaaatacacactcctgtattttcatttctgaactccctgaagcttcacccacatctccatggcactgaatcacttttctgcccaggctggagttagaagaaccatgggttgaaggccttgggagaagaggtggtaaggagctacctgggttctttggactcctcaggaaacctccccgtggaagactatatatatgagcaatatatgagcaattaagatagaactaggtcattgaaggactcagaaggaaactggcaaggggctaagtagctgtgagctgctcttcctgttaactgtcctcaggagagaaaagttgtcttgatttattccagagactcctgagaattttgttactggagctataggaactaggactccctcctcagactcatcaggaaatctgggaaaatctcatctccatgctgcagtctccccgcttggcaccatctagggctctgaagatctttaaagtgagcgttaaatgaagcaggccttctggggcatcgtgatggagctcctgaggactgggagggccgttttcttcataattcctacccagtttagggaatgagaaaaggccctgtggctcttaagtctcctgactatatccactagtttggccttgagtttgagacacctggtagatgtacctggctgccctaccaagagatttgatttgtttcttcccgtggtttcaggtgatagaacccaaaggtagctttttaattggagaattgaataatcagcatatgtaagcgcactagaaccctgtgttgaaaactgccaggtgtgggtataagaaaaggccgagagatcaccacctcctcttaccctaccccacacccataaaccagacatgtctcccaggaagcaggtgtccctggagacagaggatgacagggctctacaatctgtgtaattattattattattattattttgtatttatggggcccaagaaaggggccaggagagggtacaccccagctggggagagcaaagcagatggatccagttttctgtgtgttcttacctctgtacttcctcgtagctctgctgacaaagcaagcaggcctcccgtgtccaagaccccattcctcccacttgtgtacacctaggctggcaaatcttggagcctctgggctctgaaaactagacaatgatcattaaacctggcttgagtctctgttctggcaaaaaaaaaaaaaaaaaaaaaaaaaaaaaaaaaaaaaaaaaaaaaaaaacaaaaaaaaaaacaaaaaagaaaaacaacaaaaaagaagagggggggcgcgcgcgcaataaatgcccccgggggggggcacacaattaccagcgacaccacaggttcgagacaaacgggcccccacaaagaggcgagcgcactatacaaaggccagcaagcaggcggggcacgacgtgaaaaaacacgcacgggcgagtgacggggcaaacaacggtcgcgagcgggcagacactggtggagaaagaccacccactcacgcgacgggggggaggcagaacaaacgggggaaaaagatcagcacagaacaacttcagacgcccggagacgaaaaa

SEQ ID NO: 9529 - DNA, 689 bp, Homo sapiens
acaaaatttccattccttggtgacccattctaaagcaaagtagtctaaaaattaaattcattctaaggtttgattgttcggtaactactcctggggaaaaaactgcatttaaaagagaaagactaaaatatatttttacctaggtaacccaaagtgacaaaccttcagtggagggatgttgaatagaagaggtatgtttatcttggaggcacgtgattttctggctactgcttaatcttacccctagcaagcaacgttattctacacagactttctcctatatggtgagagaattaacacaatccgaggcctgagaaccagagagtgcatccttgactctaatggctgcactattgctcccatagttttgttcctgaagatgcattttaggaagagccttatgaatagcttgatcattaccagaataaagtgtctatctcaactagagcctaatacaaaaaagaaaaagaaaaacgatatcctgttctaaataaaactgctgtttggtaccagttgtagaaatgagggctactggtctccttatctcaggtgggacataagtgtgtgatagagcgtctttcctcagatgaggcagtatcctgcttcaatgaacgtacccacactgtccccacattttccctcttagtcttcccaataaaaggagaagcctatttaggaagaaacagaca

SEQ ID NO: 9530 - DNA, 385 bp, Homo sapiens
tgttttcatgaataatcaccttagtaggtagatataaatttataatcaccttagtaggtagatataaatttattttaaattcggtatacataattcttggtaagatgatattattaatgtatccctctcgattaaaccttggcttttgtagatatgattattattgtggttgtgatccagagatgtattttacccttaacatttcttgaagttaaaacattttttccatcaatagatgtaaattattaaatatgcattttttaaagtatgcatcttaattactgaatttatttttgttcatttttaaggtcagttattatcctttaaatgctgaaattatttgaacctaattgatgacaaaaaaaaaaatctgtgaggaaaatgg

SEQ ID NO: 9531 - DNA, 753 bp, Homo sapiens
aattgctttgaacccaggaggcagaggttgcagtaagccaagatcgtgccactgtgctccaacctgggagacagggagtaagccctctcgcaagcaatgattgcattacttgattccatctatgaataggcctcaataagactaaatcccgtgtacaattccttggggacatgcgcgctccaccttggcccacaaagggggttttcttatcttttttcctctttcaaagtaatgatagtctatggttgccctactatgtattctctttttattattttattatttttttttttagagacagggtctcactctgttatccaggctggagtgcagtggtgcaattatagctcactgcagccttggcctcctgggctcacgcggtcatcccacctcagcctcctgcatagctaggatcacaggcatgcccccatcatgctcagctaatttaaaaaatattttttttgaggctgggcacagtggttcatgcctttaatcccagaactttgagaggctgaggcgggaggattgattgggtccaggagttcaagaacctgagaaatacagagagaccccatttttactacaaaaaaatagaatcaaaaaattagccaggcccagtggcattcacctgtagtcccagctacttatgaggctgaggcagaggattgcttgaacccaggggttcaaggcaaattgagctatgattgggcactgcacttagctttggtgacacggcaagactctgtctccatt

SEQ ID NO: 9532 - DNA, 583 bp, Homo sapiens
  misc_feature (44)..(44): n is a, c, g, or t
ttcccgggtcgactactactactaaattgcggccgcgtcgacantgtgcatgatgtattttacgtagtactctgaggaagtctctttataaaacctactaccacttagtataaatttgtttgaatttatatcatttgttactgtaaattcagcttattccaattaggttggcacagatttaaactgatacacattccacaaaaaccaattcagtgtataagtattgaagtataagcagtcattgcagcttgatgccagatcatgtatgtaataacaagtggaagttaatagggccttctaatactgtatgggtactcctaagaattatttcattttggatataaagaagttatgaggcctcctgtcacattcacagctggttctccaaaataatttggttgtttcaaaaacaaatggtaatcatttggttggattcttcagtatcatgactagatcatgtggttttaccatagttgccaagtggtgggaggtagcatacctgaaaatgtacgtgtgtgtttgttgtattttttcacattttgtgaacaaagcacatttattaaaaattttaaattttctagta

SEQ ID NO: 9533 - DNA, 471 bp, Homo sapiens
  misc_feature (44)..(44): n is a, c, g, or t
ttcccgggtcgactactactactaaattgcggccgcgtcgacanaagacaagattagtttaaacagttaagaacatttagtccacattgtcttgtcagccagcaattgtcatggaagctatcatttttaagagtgccactgtgtggatttttttttcaagtggttattacattaaaattacctcatactgaggtttttgcactgaaatatcacagtttcagatttcatggttaatgttgtgcgtatgtttgtatgtttttaaaggaaacttgcattttcaatagttgatcctaaatttcataaactgcacttctttactctggtaaagctgatgtttttgtgcttattgtgaattgccgtagtacctttgaatgtcaaactttatttagaaatataaaacttatcctttatgatataaatggttgagtgtatgtacccagtatttctaattaaatttcacatgctaaatta

SEQ ID NO: 9534 - DNA, 3835 bp, Homo sapiens
ggcggcggcggcggctgcgatatggagccaggggccggcggccgaaatactgctcgtgcgcagagggccgggtccccgaacactccgccgccccgggagcaggagcggaaactggagcaggagaagctctccggtgtggtgaagagcgtccaccggcggctccgcaagaagtaccgagaagtgggagattttgataagatctggcgagaacactgtgaggatgaagaaactctttgtgaatatgccgttgcaatgaaaaatttggcagataatcattgggcaaaaacttgtgagggcgaaggtcgtattgaatggtgttgtagtgtatgcagagaatatttccaaaatggtgggaagagaaaagcacttgagaaagatgaaaaaagagctgtacttgccactaagaccactccagccttaaatatgcatgagtcttctcaacttgaaggtcatttaaccaacctcagctttacaaaccctgaatttataactgagttgctacaagcctcaggaaaaatcagattacttgatgttggcagctgctttaacccatttctgaagtttgaagaatttctaactgttggcatagatattgtacctgctgtagagagtgtctataaatgtgatttcctgaacttacagcttcagcaaccactccagcttgcacaggatgctatagatgcttttttgaagcagctgaaaaaccctattgattctcttcctggagagcttttccatgtggttgttttctctctccttctttcttattttccatctccttaccagcgatggatttgctgcaagaaagcccatgaactgttagtgttaaatggtttattactaatcatcacacctgattcctcccatcagaaccgtcatgctatgatgatgaaaagctggaagattgctatagagtccctgggctttaaacgcttcaagtactcaaaattttcacatatgcatctgatggcatttaggaaaatctctctaaaaaccacaagtgacttggttagtaggaactacccaggaatgttatatattcctcaagatttcaacagtatagaagatgaggaatattctaacccttcctgctatgttcgatcagatatagaagatgaacaactagcatatggtttcacagaactccctgatgcgccatatgactcagattctggagaaagtcaagccagctctattcctttctatgagctagaagaccccatattacttttaagttaatatagaagcaaaaagcccctttcagtccaggctcctaaactaattgcttacaccaattggaaatactaacatgaactcagtactgaaaacctggtttgcataaaagaaatgcagaggtttacagagtttgctatttttttctacttctcaattttaaaatttattcttatatagaaagcttaaagtttcatgcagagtgactcatgtcatagcagaaactactgttactttagcatttagcactatcatagaaaggtacctttttctctttagtgctattgtgaaaacaagcataatttgctatatgttttccttttcaacttttcagtgttgactataaaccattgaatggaaaactttaagatgtagaaagctgtagattgcactttgatgactcacaagttaaatgtgatacagaaaaatagatcggttagttgttttgtgatgcacttatctttttcttttttctaactaaaattgtgatgttacagaaagtcattttatgttccttttttgtctgatgatccaatatttactgaactttttgtaattggtgataattctttttatttcttccttatattaaaagctcatttgacagcatcagacattgggggagagatgtcccccaaagtgtgtattctaattttattagccctatccaataaacaccattgccaaagtagtattttcataactttcttgttgatttgggccttggtgtgaagtatatttacctgagagttcacttttacttttcttaaacttaggcttcatttacaaaatgttttatttaagcaaggaacaatgtaatactcaataatgacctaaaacacctttttgaaagggtttgcacttggaagagagtttatgttctgttgaaaccaactttgatagggtcctcacctttccgttaaggaggtgccgcactacaagtttcaaattatatggaaaaacctaaaattaaccctctgttggtgatctcataaaatggttttgaccttttggtatcttaatttctatctaaactttatcagaaaattttctttgaatatatcaattagttggctgtgggaattttccctttccacattaataaatgcctttctgtgtttctgaatcagaagcaaatgattagggaaaaatatatgtccaaacaagacaagattagtttaaacagttaagaacatttagtccacattgtcttgtcagccagcaattgtcatggaagctatcatttttaagagtgccactgtgtggatttttttttcaagtggttattacattaaaattacctcatactgaggtttttgcactgaaatatcacagtttcagatttcatggttaatgttgtgcgtatgtttgtatgtttttaaaggaaacttgcattttcaatagttgatcctaaatttcataaactgcacttctttactctggtaaagctgatgtttttgtgcttattgtgaattgccgtagtacctttgaatgtcaaactttatttagaaatataaaacttatcctttatgatataaatggttgagtgtatgtacccagtatttctaattaaatttcacatgctaaattaatgaaagtaacaagattgtaattttttaaagtcagttgattaaatgcaataaatatggttgctcaaatatgccacaaataactcgaaatttttcatttactttcaacagcataagattctttaatatttaggattgactgttctttccagttaagcactgaaggattatgtcttgtagcttccccaagagaaggggaaggaaaaaaaagcactatgttaaggataatacagaactcttttgaactattttggtagtaccttttaccatactgtttgctttttgatttgggtaaatatcttaagagcaaagaaaacaatacaccaaatgaaaatgctttgaaagtaaatgaaaacagcgcttttgaaaggctggtatagtatgaccctggagtcagcctttgtgttacagcgaaaatgttggtgctataaattctgattgtttacagatgttgattctgcttatgctccaaagtgtgcatgatgtattttacgtagtactctgaggaagtctctttataaaacctactaccacttagtataaatttgtttgaatttatatcatttgttactgtaaattcagcttattccaattaggttggcacagatttaaactgatacacattccacaaaaaccaattcagtgtataagtattgaagtataagcagtcattgcagcttgatgccagatcatgtatgtaataacaagtggaagttaatagggccttctaatactgtatgggtactcctaagaattatttcattttggatataaagaagttatgaggcctcctgtcacattcacagctggttctccaaaataatttggttgtttcaaaaacaaatggtaatcatttggttggattcttcagtatcatgactagatcatgtggttttaccatagttgccaagtggtgggaggtagcatacctgaaaatgtacgtgtgtgtttgttgtattttttcacattttgtgaacaaagcacatttattaaaaattttaaattttctagta

SEQ ID NO: 9535 - DNA, 2824 bp, Homo sapiens
ggcggcggcggcggctgcgatatggagccaggggccggcggccgaaatactgctcgtgcgcagagggccgggtccccgaacactccgccgccccgggagcaggagcggaaactggagcaggagaagctctccggtgtggtgaagagcgtccaccggcggctccgcaagaagtaccgagaagtgggagattttgataagatctggcgagaacactgtgaggatgaagaaactctttgtgaatatgccgttgcaatgaaaaatttggcagataatcattgggcaaaaacttgtgagggcgaaggtcgtattgaatggtgttgtagtgtatgcagagaatatttccaaaatggtgggaagagaaaagcacttgagaaagatgaaaaaagagctgtacttgccactaagaccactccagccttaaatatgcatgagtcttctcaacttgaaggtcatttaaccaacctcagctttacaaaccctgaatttataactgagttgctacaagcctcaggaaaaatcagattacttgatgttggcagctgctttaacccatttctgaagtttgaagaatttctaactgttggcatagatattgtacctgctgtagagagtgtctataaatgtgatttcctgaacttacagcttcagcaaccactccagcttgcacaggatgctatagatgcttttttgaagcagctgaaaaaccctattgattctcttcctggagagcttttccatgtggttgttttctctctccttctttcttattttccatctccttaccagcgatggatttgctgcaagaaagcccatgaactgttagtgttaaatggtttattactaatcatcacacctgattcctcccatcagaaccgtcatgctatgatgatgaaaagctggaagattgctatagagtccctgggctttaaacgcttcaagtactcaaaattttcacatatgcatctgatggcatttaggaaaatctctctaaaaaccacaagtgacttggttagtaggaactacccaggaatgttatatattcctcaagatttcaacagtatagaagatgaggaatattctaacccttcctgctatgttcgatcagatatagaagatgaacaactagcatatggtttcacagaactccctgatgcgccatatgactcagattctggagaaagtcaagccagctctattcctttctatgagctagaagaccccatattacttttaagttaatatagaagcaaaaagcccctttcagtccaggctcctaaactaattgcttacaccaattggaaatactaacatgaactcagtactgaaaacctggtttgcataaaagaaatgcagaggtttacagagtttgctatttttttctacttctcaattttaaaatttattcttatatagaaagcttaaagtttcatgcagagtgactcatgtcatagcagaaactactgttactttagcatttagcactatcatagaaaggtacctttttctctttagtgctattgtgaaaacaagcataatttgctatatgttttccttttcaacttttcagtgttgactataaaccattgaatggaaaactttaagatgtagaaagctgtagattgcactttgatgactcacaagttaaatgtgatacagaaaaatagatcggttagttgttttgtgatgcacttatctttttcttttttctaactaaaattgtgatgttacagaaagtcattttatgttccttttttgtctgatgatccaatatttactgaactttttgtaattggtgataattctttttatttcttccttatattaaaagctcatttgacagcatcagacattgggggagagatgtcccccaaagtgtgtattctaattttattagccctatccaataaacaccattgccaaagtagtattttcataactttcttgttgatttgggccttggtgtgaagtatatttacctgagagttcacttttacttttcttaaacttaggcttcatttacaaaatgttttatttaagcaaggaacaatgtaatactcaataatgacctaaaacacctttttgaaagggtttgcacttggaagagagtttatgttctgttgaaaccaactttgatagggtcctcacctttccgttaaggaggtgccgcactacaagtttcaaattatatggaaaaacctaaaattaaccctctgttggtgatctcataaaatggttttgaccttttggtatcttaatttctatctaaactttatcagaaaattttctttgaatatatcaattagttggctgtgggaattttccctttccacattaataaatgcctttctgtgtttctgaatcagaagcaaatgattagggaaaaatatatgtccaaacaagacaagattagtttaaacagttaagaacatttagtccacattgtcttgtcagccagcaattgtcatggaagctatcatttttaagagtgccactgtgtggatttttttttcaagtggttattacattaaaattacctcatactgaggtttttgcactgaaatatcacagtttcagatttcatggttaatgttgtgcgtatgtttgtatgtttttaaaggaaacttgcattttcaatagttgatcctaaatttcataaactgcacttctttactctggtaaagctgatgtttttgtgcttattgtgaattgccgtagtacctttgaatgtcaaactttatttagaaatataaaacttatcctttatgatataaatggttgagtgtatgtacccagtatttctaattaaatttcacatgctaaatta

SEQ ID NO: 9536 - DNA, 301 bp, Homo sapiens
ctggttatctttccagctgtctccggtgactatggaaatgagataaggacattccaagatggatgctgcccctcttcaagccaactttcctctaggctaatattttagatcaacactgggtttgctggggtgggggtgtaggagtctcctttcaggaaactcagtaggttgaacaaattccggtcacattccccctccagggcagatgcagtctccccgcaaaagtcagctccctggtccttctgtttggtgcccccactacttccactgccagaataaatcattccgcatatttgtataa

SEQ ID NO: 9537 - DNA, 969 bp, Homo sapiens
gcactttggtcgtgggcgcgtgtgtggaatgggaggaggtcgcgctgtccatgggcgtccttggcctgcgccacccagagatgataaatagccaaagacgtcaatggcacccatggacatagtaagcatagtaggagctgaaaaactagaagcaatgacaatgtcaactattttgagcaaaaagaagcagtgtcttcggaacatttgatcataaaaccagaaattaaaggatgagaaaaacatttttctgaagcttatactttcacatttcctagagagcatatttgtgtggatgggggtgggtaaacactcaacaaaagtttctttaaaaagaagaaaccatcctggtttgatgtaatcaatggttgcccactgctcccttcctgtgcctgtgacccttcccaaactgccctgttgcttgcaggctcgcctgagctgaaaggcagccctcacatcccgtcggcacctccctggggccttctttacaccctggagaacttcacagggaatctgtgtctgtaacacaaaggcttcctggtccagatgtagatactaaggctgactggttatttaagtcctgcggacttactctgccaaaattatttaatcatgtaaaaataatttataattcttataaagtatccccttcataatataatgaatgttggtgctattacatttaagtgcacatgtacagtatacaagattattaataataatgttttcaaatagttattgtcaaagctatttttcttatgtttatgaaagtgcttataaaattcatgttttatgaggctggagatgtatattttgtaatttcattctgatatttgttaatattcgcttccaatgctggttttgtttgatgagactgacattgcctaatttcaagctttttgaatgtgtattctttcagggcaagtatgaaataactagtaaaaaatatacaaatatgcttaacaataagta

SEQ ID NO: 9538 - DNA, 958 bp, Homo sapiens
gcactttggtcgtgggcgcgtgtgtggaatgggaggaggtcgcgctgtccatgggcgtccttggcctgcgccacccagagatgataaatagccaaagacgtcaatggcacccatggacatagtaagcatagtaggagctgaaaaactagaagcaatgacaatgtcaactattttgagcaaaaagaagcagtgtcttcggaacatttgatcataaaaccagaaattaaaggatgagaaaaacaaaaaaaaaaaaaaaaaaaaaaaaacctttttgcggccgcctgtgggccctgagaaaaaggttttctaaaacacccttcggtttgggggggcgggggccccggttggtttaggggccccccgtgggcccaaaaccgttggtccacataagagagaatcccgggcagatgacacataggtggttggggttctcaccaaattaaaaagacggccgggcggggaaccggagcgttctggaacacaattccgaaattggaggtccgggagggcacataacggggtcctaaatacacgggggtgtcaacgcgaacgccgattataaaaattagcccgcgccgtggtggaaacacacatagcaaagcaggccgagcaacacaaggacaagacagcgaaagagagaaagaggaagcggagagtggaagacggataagcacgatacaaacaactctaatcgcaaaagaaagaaaagaaaaagaacagaaaaagtaccaaacagaacaaaaaaaaagaccagccaacaacaacacacacactactctcactaaataacaaacgcatatagcgacaacttgaacgacaaacaataaataaaaacgacacaagacaatgacataacagtcagtacgaatacaaaatcacacagaagcagttaaaataataataagtaaacaactacgaaaacaaacaaagacctaaccataataaacacagacccaac

SEQ ID NO: 9539 - DNA, 1111 bp, Homo sapiens
gatcaggttagtgtgcgccgcgggtgctgggggctcgagaaccgagcggagctggttgagccttcaaagtcctaaaacgcgcggccgtgggttcggggtttattgattgaattccgccggcgcgggagcctctgcagagagagagcgcgagagatggagatgggcagacggattcatttagagctgcggaacaggacgccctctgatgtgaaagaacttgtcctggacaacagtcggtcgaatgaaggcaaactcgaaggcctcacagatgaatttgaagaactggaattcttaagtacaatcaacgtaggcctcacctcaatcgcaaacttaccaaagttaaacaaacttaagaagcttgaactaagcgataacagagtctcagggggcctggaagtattggcagaaaagtgtccgaacctcacgcatctaaatttaagtggcaacaaaattaaagacctcagcacaatagagccactgaaaaagttagaaaacctcaagagcttagaccttttcaattgcgaggtaaccaacctgaacgactaccgagaaaatgtgttcaagctcctcccgcaactcacatatctcgacggctatgaccgggacgacaaggaggcccctgactcggatgctgagggctacgtggagggcctggatgatgaggaggaggatgaggatgaggaggagtatgatgaagatgctcaggtagtggaagacgaggaggacgaggatgaggaggaggaaggtgaagaggaggacgtgagtggagaggaggaggaggatgaagaaggttataacgatggagaggtagatgacgaggaagatgaagaagagcttggtgaagaagaaaggggtcagaagcgaaaacgagaacctgaagatgagggagaagatgatgactaagtggaataacctattttgaaaaattcctattgtgatttgactgtttttacccatatcccctctcccccccccctccaatcctgccccctgaaacttatttttttctgattgtaacgttgctgtgggaacgagaggggaagagtgtactgggggttgcggggggagggatggcgggtgggggtggaataaaatactatttttactgcca

SEQ ID NO: 9540 - DNA, 755 bp, Homo sapiens
gatcaggttagtgtgcgccgcgggtgctgggggctcgagaaccgagcggagctggttgagccttcaaagtcctaaaacgcgcggccgtgggttcggggtttattgattgaattccgccggcgcgggagcctctgcagagagagagcgcgagagatggagatgggcagacggattcatttagagctgcggaacaggacgccctctgatgtgaaagaacttgtcctggacaacagtcggtcgaatgaaggcaaactcgaaggcctcacagatgaatttgaagaactggaattcttaagtacaatcaacgtaggcctcacctcaatcgcaaacttaccaaagttaaacaaacttaagaagcttgaactaagcgataacagagtctcagggggcctggaagtattggcagaaaagtgtccgaacctcacgcatctaaatttaagtggcaacaaaattaaagacctcagcacaatagagccactgaaaaagttagaaaacctcaagagcttagaccttttcaattgcgaggtaaccaacctgaacgactaccgagaaaatgtgttcaagctcctcccgcaactcacatatctcgacggctatgaccgggacgacaaggaggcccctgactcggatgctgagggctacgtggagggcctggatgatgaggaggaggatgaggatgaggaggagtatgatgaagaaggttataacgatggagaggtagatgacgaggaagattaccacacaaaccacaaata

SEQ ID NO: 9541 - DNA, 598 bp, Homo sapiens
gatcaggttagtgtgcgccgcgggtgctgggggctcgagaaccgagcggagctggttgagccttcaaagtcctaaaacgcgcggccgtgggttcggggtttattgattgaattccgccggcgcgggagcctctgcagagagagagcgcgagagatggagatgggcagacggattcatttagagctgcggaacaggacgccctctgatgtgaaagaacttgtcctggacaacagtcggtcgaatgaaggcaaactcgaaggcctcacagatgaatttgaagaactggaattcttaagtacaatcaacgtaggcctcacctcaatcgcaaacttaccaaagttaaacaaacttaagaagcttgaactaagcgataacagagtctcagggggcctggaagtattggcagaaaagtgtccgaacctcacgcatctaaatttaagtggcaacaaaattaaagacctcagcacaatagagccactgaaacttatttttttctgattgtaacgttgctgtgggaacgagaggggaagagtgtactgggggttgcggggggagggatggcgggtgggggtggaataaaatactatttttactgcca

SEQ ID NO: 9542 - DNA, 631 bp, Homo sapiens
gatcaggttagtgtgcgccgcgggtgctgggggctcgagaaccgagcggagctggttgagccttcaaagtcctaaaacgcgcggccgtgggttcggggtttattgattgaattccgccggcgcgggagcctctgcagagagagagcgcgagagatggagatgggcagacggattcatttagagctgcggaacaggacgccctctgatgtgaaagaacttgtcctggacaacagtcggtcgaatgaaggcaaactcgaaggcctcacagatgaatttgaagaactggaattcttaagtacaatcaacgtaggcctcacctcaatcgcaaacttaccaaagttaaacaaacttaagaagcttgaactaagcgataacagagtctcagggggcctggaagtattggcagaaaagtgtccgaacctcacgcatctaaatttaagtggcaacaaaattaaagacctcagcacaatagagccactggtaagtcattcggaccctcccctccctgcaggggtaggaggtgggaggaattggcatcagcaaatactacttttgcatttgtccttttcccacttaatttttttgactctcatgatgtgctatgagatagaattgagctattgtttctgct

SEQ ID NO: 9543 - DNA, 327 bp, Homo sapiens
  misc_feature (38)..(39): n is a, c, g, or t
tgcaggagatacgggggtgcactccccccattcgaacnncgctgggttttttttttcatacacccgagcacggaaaaactaacgcaaaattgtattttcttacctagtggaaatctgaaatgactgcaaattcctagtgaatgtacaggtttgctttcgtgtccctcttctggttgctttagaagtgacgtgtaatttctgaacccatgtttcatctgtataaaagaacatctgcaccagtttttctcctgcccctcagaagagccaaactttgagttttatgtctgtttgtcattgataaatttcaataaatctttttatacaatt

SEQ ID NO: 9544 - DNA, 433 bp, Homo sapiens
gatcaggttagtgtgcgccgcgggtgctgggggctcgagaaccgagcggagctggttgagccttcaaagtcctaaaacgcgcggccgtgggttcggggtttattgattgaattccgccggcgcgggagcctctgcagagagagagcgcgagagatggagatgggcagacggattcatttagagctgcggaacaggacgccctctgatgtgaaagaacttgtcctggacaacagtcggtcgaatgaaggcaaactcgaaggcctcacagatgaatttgaagaactggaattcttaagtacaatcaacgtaggcctcacctcaatcgcaaacttaccaaagttaaacaaacttaagaagcctgaaacttatttttttctgattgtaacgttgctgtgggggtggaataaaatactatttttactgccaaaaaaaa

SEQ ID NO: 9545 - DNA, 629 bp, Homo sapiens
  misc_feature (14)..(14): n is a, c, g, or t
ccggcagtactccngggcgtatgtagcgaggctgggtggcgaaaaagttagaaaacctcaagagcttagaccttttcaattgcgaggtaaccaacctgaacgactaccgagaaaatgtgttcaagctcctcccgcaactcacatatctcgacggctatgaccgggacgacaaggaggcccctgactcggatgctgagggctacgtggagggcctggatgatgaggaggaggatgaggatgaggaggagtatgatgaagatgctcaggtagtggaagacgaggaggacgaggatgaggaggaggaaggtgaagaggaggacgtgagtggagaggaggagaggatgaagaaggttataacgatggacgaggtacgatgcacgcggaccgatgaacgaagacgctcgctgaagacgaacacggggtcacgccgcgaacaacgagcagcccctggaaacgactgacgggggacgcaacgaccggccgaccctactgctggacactacagcgtacttacggaagaacgtgccgtgatcagtcgcactcggcacgtgtacagtacaccactgcacggcagacccaccgacacgccaccgccaaacccccgaccaaccccgccccgacccccccct

SEQ ID NO: 9546 - DNA, 484 bp, Homo sapiens
ggcctggcttcctggctctgcgatgctttcctgccctagggcagaaggcctcacaggatttattcccaggcactcttgccatgaccttgagaaggtggcttgacctggacatctggatctcagggactgagggggtgggaaaggactgagcctccccctcccagacccaacaggaaggtgggctttggtgaccatttcctaggctgagagctccttagctccaggagagggctgcgctccctggttctcctgctctgtgggctgtgctagatgaaacccacaaattgctgctgtcccgggcggagtggcatgcctccacccaccagtgaagaatgaaggcagggcagttgcagggccctgcaggactctgagatccagatgtgtaccccagtgctcccctgctctgcccactggcaagaggggatggcgggtgggggtggaataaaatactatttttactgccaaaaaaaaaacaaaacacaca

SEQ ID NO: 9547 - DNA, 185 bp, Homo sapiens
gcggccgcctactactactactactgctcgaattcaagcttctaacgatgtacggggtgaacccatgtttcatctgtataaaagaacatctgcaccagtttttctcctgcccctcagaagagccaaactttgagttttatgtctgtttgtcattgataaatttcaataaatctttttatacaatt

SEQ ID NO: 9548 - DNA, 387 bp, Homo sapiens
gatcaggttagtgtgcgccgcgggtgctgggggctcgagaaccgagcggagctggttgagccttcaaagtcctaaaacgcgcggccgtgggttcggggtttattgattgaattccgccggcgcgggagcctctgcagagagagagcgcgagagatggagatgggcagacggattcatttagagctgcggaacaggacgccctctgatgtgagcatttgccaaaaatatctctgtcggtccattctcctactttgtgtgtgtgtgtgtgtgtgcgcgctggggggaggcactttttttgggggggggcgcccgggaggtgcgggtttgggggtcggactgcaagcgaattggcaaggctggggggttgcaatgccatccgagcatgtt

SEQ ID NO: 9549 - DNA, 2079 bp, Homo sapiens
gatcaggttagtgtgcgccgcgggtgctgggggctcgagaaccgagcggagctggttgagccttcaaagtcctaaaacgcgcggccgtgggttcggggtttattgattgaattccgccggcgcgggagcctctgcagagagagagcgcgagagatggagatgggcagacggattcatttagagctgcggaacaggacgccctctgatgtgaaagaacttgtcctggacaacagtcggtcgaatgaaggcaaactcgaaggcctcacagatgaatttgaagaactggaattcttaagtacaatcaacgtaggcctcacctcaatcgcaaacttaccaaagttaaacaaacttaagaagcttgaactaagcgataacagagtctcagggggcctggaagtattggcagaaaagtgtccgaacctcacgcatctaaatttaagtggcaacaaaattaaagacctcagcacaatagagccactgaaaaagttagaaaacctcaagagcttagaccttttcaattgcgaggtaaccaacctgaacgactaccgagaaaatgtgttcaagctcctcccgcaactcacatatctcgacggctatgaccgggacgacaaggaggcccctgactcggatgctgagggctacgtggagggcctggatgatgaggaggaggatgaggatgaggaggagtatgatgaagatgctcaggtagtggaagacgaggaggacgaggatgaggaggaggaaggtgaagaggaggacgtgagtggagaggaggaggaggatgaagaaggttataacgatggagaggtagatgacgaggaagatgaagaagagcttggtgaagaagaaaggggtcagaagcgaaaacgagaacctgaagatgagggagaagatgatgactaagtggaataacctattttgaaaaattcctattgtgatttgactgtttttacccatatcccctctcccccccccctccaatcctgccccctgaaacttatttttttctgattgtaacgttgctgtgggaacgagaggggaagagtgtactgggggttgcggggggagggatggcgggtgggggtggaataaaatactatttttactgccactctttatttttttcccctactttttctttgtgtccggtttttgtccctgtaaatgcgatagctaagtacacactaagtgagcatttgttcctgactctcaaagaggatggtttggagttctcttacgtttcctggtatttcccaagtctcttgggttggttggaaggctgtggctggtctcagtttggttactcaatgcccaggaggggctgagcaccagccatatcttttgctttggttcacatgatgatacctgcttttctcaggcctgctagaggcatccaacgccctggtttgtaaatagcaacctaaaggcgtattttggcactggtctggggacattccccatctctcatcccttttcccccttcacagatggtggtgggcttcgctctacaaagaggactctgatgttactcttgagcttatgagccagagagctgaaaaccgcaggcttgttgtgttaagttacaaggaaaatggatttggtaattaaaattagaagaaacacaccttcaaacttcaacttctttaaaagaaaaaaaaaactgtcctatcttgttctgtaaaatattagaacgctttgttttacaaaaaatgatgagagaattcttccacatgtacttctgtgcttagaacatttttacggacctaagcgctggagacgttgctgcatgtcggctgggttttttttttcatacacccgagcacggaaaaactaacgcaaaattgtattttcttacctagtggaaatctgaaatgactgcaaattcctagtgaatgtacaggtttgctttcgtgtccctcttctggttgctttagaagtgacgtgtaatttctgaacccatgtttcatctgtataaaagaacatctgcaccagtttttctcctgcccctcagaagagccaaactttgagttttatgtctgtttgtcattgataaatttcaataaatctttttatacaatt

SEQ ID NO: 9550 - DNA, 2456 bp, Homo sapiens
gatcaggttagtgtgcgccgcgggtgctgggggctcgagaaccgagcggagctggttgagccttcaaagtcctaaaacgcgcggccgtgggttcggggtttattgattgaattccgccggcgcgggagcctctgcagagagagagcgcgagagatggagatgggcagacggattcatttagagctgcggaacaggacgccctctgatgtgaaagaacttgtcctggacaacagtcggtcgaatgaaggcaaactcgaaggcctcacagatgaatttgaagaactggaattcttaagtacaatcaacgtaggcctcacctcaatcgcaaacttaccaaagttaaacaaacttaagaagcttgaactaagcgataacagagtctcagggggcctggaagtattggcagaaaagtgtccgaacctcacgcatctaaatttaagtggcaacaaaattaaagacctcagcacaatagagccactgaaaaagttagaaaacctcaagagcttagaccttttcaattgcgaggtaaccaacctgaacgactaccgagaaaatgtgttcaagctcctcccgcaactcacatatctcgacggctatgaccgggacgacaaggaggcccctgactcggatgctgagggctacgtggagggcctggatgatgaggaggaggatgaggatgaggaggagtatgatgaagatgctcaggtagtggaagacgaggaggacgaggatgaggaggaggaaggtgaagaggaggacgtgagtggagaggaggaggaggatgaagaaggttataacgatggagaggtagatgacgaggaagatgaagaagagcttggtgaagaagaaaggggtcagaagcgaaaacgagaacctgaagatgagggagaagatgatgactaagtggaataacctattttgaaaaattcctattgtgatttgactgtttttacccatatcccctctcccccccccctccaatcctgccccctgaaacttatttttttctgattgtaacgttgctgtgggaacgagaggggaagagtgtactgggggttgcggggggagggatggcgggtgggggtggaataaaatactatttttactgccactctttatttttttcccctactttttctttgtgtccggtttttgtccctgtaaatgcgatagctaagtacacactaagtgagcatttgttcctgactctcaaagaggatggtttggagttctcttacgtttcctggtatttcccaagtctcttgggttggttggaaggctgtggctggtctcagtttggttactcaatgcccaggaggggctgagcaccagccatatcttttgctttggttcacatgatgatacctgcttttctcaggcctgctagaggcatccaacgccctggtttgtaaatagcaacctaaaggcgtattttggcactggtctggggacattccccatctctcatcccttttcccccttcacagatggtggtgggcttcgctctacaaagaggactctgatgttactcttgagcttatgagccagagagctgaaaaccgcaggcttgttgtgttaagttacaaggaaaatggatttggtaattaaaattagaagaaacacaccttcaaacttcaacttctttaaaagaaaaaaaaaactgtcctatcttgttctgtaaaatattagaacgctttgttttacaaaaaatgatgagagaattcttccacatgtacttctgtgcttagaacatttttacggacctaagcgctggagacgttgctgcatgtcggctgggttttttttttcatacacccgagcacggaaaaactaacgcaaaattgtattttcttacctagtggaaatctgaaatgactgcaaattcctagtgaatgtacaggtttgctttcgtgtccctcttctggttgctttagaagtgacgtgtaatttctgaacccatgtttcatctgtataaaagaacatctgcaccagtttttctcctgcccctcagaagagccaaactttgagttttatgtctgtttgtcattgataaatttcaataaatctttttatacaatttttttggggatggcttctttgagtccaacaggccattgatcttttcaagatgcattccagatgaactgctaggtgagggggaagcttcatttttgttacctgatagaatagcttttcttatgagatatatataatgtgatactatgtttggatatttttggtcttaaagcaagactcagtggtgtatcttcattaaaagcttcctttaaaaaagttacagagttactaaaaaaacaagtacccaaacaatcaagttgggccaaccttggaaccttgttttgaatatctttcattgttttgtttgtcgtattgtaaaaagaatgtatggttgaaaactcaggaatgtttataaaacaaattatttcacaaaaaaaaag

SEQ ID NO: 9551 - DNA, 2099 bp, Homo sapiens
gatcaggttagtgtgcgccgcgggtgctgggggctcgagaaccgagcggagctggttgagccttcaaagtcctaaaacgcgcggccgtgggttcggggtttattgattgaattccgccggcgcgggagcctctgcagagagagagcgcgagagatggagatgggcagacggattcatttagagctgcggaacaggacgccctctgatgtgaaagaacttgtcctggacaacagtcggtcgaatgaaggcaaactcgaaggcctcacagatgaatttgaagaactggaattcttaagtacaatcaacgtaggcctcacctcaatcgcaaacttaccaaagttaaacaaacttaagaagcttgaactaagcgataacagagtctcagggggcctggaagtattggcagaaaagtgtccgaacctcacgcatctaaatttaagtggcaacaaaattaaagacctcagcacaatagagccactgaaaaagttagaaaacctcaagagcttagaccttttcaattgcgaggtaaccaacctgaacgactaccgagaaaatgtgttcaagctcctcccgcaactcacatatctcgacggctatgaccgggacgacaaggaggcccctgactcggatgctgagggctacgtggagggcctggatgatgaggaggaggatgaggatgaggaggagtatgatgaagatgctcaggtagtggaagacgaggaggacgaggatgaggaggaggaaggtgaagaggaggacgtgagtggagaggaggaggaggatgaagaaggttataacgatggagaggtagatgacgaggaagatgaagaagagcttggtgaagaagaaaggggtcagaagcgaaaacgagaacctgaagatgagggagaagatgatgactaagtggaataacctattttgaaaaattcctattgtgatttgactgtttttacccatatcccctctcccccccccctccaatcctgccccctgaaacttatttttttctgattgtaacgttgctgtgggaacgagaggggaagagtgtactgggggttgcggggggagggatggcgggtgggggtggaataaaatactatttttactgccactctttatttttttcccctactttttctttgtgtccggtttttgtccctgtaaatgcgatagctaagtacacactaagtgagcatttgttcctgactctcaaagaggatggtttggagttctcttacgtttcctggtatttcccaagtctcttgggttggttggaaggctgtggctggtctcagtttggttactcaatgcccaggaggggctgagcaccagccatatcttttgctttggttcacatgatgatacctgcttttctcaggcctgctagaggcatccaacgccctggtttgtaaatagcaacctaaaggcgtattttggcactggtctggggacattccccatctctcatcccttttcccccttcacagatggtggtgggcttcgctctacaaagaggactctgatgttactcttgagcttatgagccagagagctgaaaaccgcaggcttgttgtgttaagttacaaggaaaatggatttggtaattaaaattagaagaaacacaccttcaaacttcaacttctttaaaagaaaaaaaaaactgtcctatcttgttctgtaaaatattagaacgctttgttttacaaaaaatgatgagagaattcttccacatgtacttctgtgcttagaacatttttacggacctaagcgctggagacgttgctgcatgtcggctgggttttttttttcatacacccgagcacggaaaaactaacgcaaaattgtattttcttacctagtggaaatctgaaatgactgcaaattcctagtgaatgtacaggtttgctttcgtgtccctcttctggttgctttagaagtgacgtgtaatttctgaacccatgtttcatctgtataaaagaacatctgcaccagtttttctcctgcccctcagaagagccaaactttgagttttatgtctgtttgtcattgataaatttcaataaatctttttatacaattaaaaaaaaacaaaacacaca

SEQ ID NO: 9552 - DNA, 2003 bp, Homo sapiens
gatcaggttagtgtgcgccgcgggtgctgggggctcgagaaccgagcggagctggttgagccttcaaagtcctaaaacgcgcggccgtgggttcggggtttattgattgaattccgccggcgcgggagcctctgcagagagagagcgcgagagatggagatgggcagacggattcatttagagctgcggaacaggacgccctctgatgtgaaagaacttgtcctggacaacagtcggtcgaatgaaggcaaactcgaaggcctcacagatgaatttgaagaactggaattcttaagtacaatcaacgtaggcctcacctcaatcgcaaacttaccaaagttaaacaaacttaagaagcttgaactaagcgataacagagtctcagggggcctggaagtattggcagaaaagtgtccgaacctcacgcatctaaatttaagtggcaacaaaattaaagacctcagcacaatagagccactgaaaaagttagaaaacctcaagagcttagaccttttcaattgcgaggtaaccaacctgaacgactaccgagaaaatgtgttcaagctcctcccgcaactcacatatctcgacggctatgaccgggacgacaaggaggcccctgactcggatgctgagggctacgtggagggcctggatgatgaggaggaggatgaggatgaggaggagtatgatgaagatgctcaggtagtggaagacgaggaggacgaggatgaggaggaggaaggtgaagaggaggacgtgagtggagaggaggaggaggatgaagaaggttataacgatggagaggtagatgacgaggaagatgaagaagagcttggtgaagaagaaaggggtcagaagcgaaaacgagaacctgaagatgagggagaagatgatgactaagtggaataacctattttgaaaaattcctattgtgatttgactgtttttacccatatcccctctcccccccccctccaatcctgccccctgaaacttatttttttctgattgtaacgttgctgtgggaacgagaggggaagagtgtactgggggttgcggggggagggatggcgggtgggggtggaataaaatactatttttactgccactctttatttttttcccctactttttctttgtgtccggtttttgtccctgtaaatgcgatagctaagtacacactaagtgagcatttgttcctgactctcaaagaggatggtttggagttctcttacgtttcctggtatttcccaagtctcttgggttggttggaaggctgtggctggtctcagtttggttactcaatgcccaggaggggctgagcaccagccatatcttttgctttggttcacatgatgatacctgcttttctcaggcctgctagaggcatccaacgccctggtttgtaaatagcaacctaaaggcgtattttggcactggtctggggacattccccatctctcatcccttttcccccttcacagatggtggtgggcttcgctctacaaagaggactctgatgttactcttgagcttatgagccagagagctgaaaaccgcaggcttgttgtgttaagttacaaggaaaatggatttggtaattaaaattagaagaaacacaccttcaaacttcaacttctttaaaagaaaaaaaaaactgtcctatcttgttctgtaaaatattagaacgctttgttttacaaaaaatgatgagagaattcttccacatgtacttctgtgcttagaacatttttacggacctaagcgctggagacgttgctgcatgtcggctgggttttttttttcatacacccgagcacggaaaaactaacgcaaaattgtattttcttacctagtggaaatctgaaatgactgcaaattcctagtgaatgtacaggtttgctttcgtgtccctcttctggttgctttagaagtgacgtgtaatttcgaaattgtacacggtgaagaacatgagaggtgtagaaagggatcctctagaa

SEQ ID NO: 9553 - DNA, 1950 bp, Homo sapiens
gatcaggttagtgtgcgccgcgggtgctgggggctcgagaaccgagcggagctggttgagccttcaaagtcctaaaacgcgcggccgtgggttcggggtttattgattgaattccgccggcgcgggagcctctgcagagagagagcgcgagagatggagatgggcagacggattcatttagagctgcggaacaggacgccctctgatgtgaaagaacttgtcctggacaacagtcggtcgaatgaaggcaaactcgaaggcctcacagatgaatttgaagaactggaattcttaagtacaatcaacgtaggcctcacctcaatcgcaaacttaccaaagttaaacaaacttaagaagcttgaactaagcgataacagagtctcagggggcctggaagtattggcagaaaagtgtccgaacctcacgcatctaaatttaagtggcaacaaaattaaagacctcagcacaatagagccactgaaaaagttagaaaacctcaagagcttagaccttttcaattgcgaggtaaccaacctgaacgactaccgagaaaatgtgttcaagctcctcccgcaactcacatatctcgacggctatgaccgggacgacaaggaggcccctgactcggatgctgagggctacgtggagggcctggatgatgaggaggaggatgaggatgaggaggagtatgatgaagatgctcaggtagtggaagacgaggaggacgaggatgaggaggaggaaggtgaagaggaggacgtgagtggagaggaggaggaggatgaagaaggttataacgatggagaggtagatgacgaggaagatgaagaagagcttggtgaagaagaaaggggtcagaagcgaaaacgagaacctgaagatgagggagaagatgatgactaagtggaataacctattttgaaaaattcctattgtgatttgactgtttttacccatatcccctctcccccccccctccaatcctgccccctgaaacttatttttttctgattgtaacgttgctgtgggaacgagaggggaagagtgtactgggggttgcggggggagggatggcgggtgggggtggaataaaatactatttttactgccactctttatttttttcccctactttttctttgtgtccggtttttgtccctgtaaatgcgatagctaagtacacactaagtgagcatttgttcctgactctcaaagaggatggtttggagttctcttacgtttcctggtatttcccaagtctcttgggttggttggaaggctgtggctggtctcagtttggttactcaatgcccaggaggggctgagcaccagccatatcttttgctttggttcacatgatgatacctgcttttctcaggcctgctagaggcatccaacgccctggtttgtaaatagcaacctaaaggcgtattttggcactggtctggggacattccccatctctcatcccttttcccccttcacagatggtggtgggcttcgctctacaaagaggactctgatgttactcttgagcttatgagccagagagctgaaaaccgcaggcttgttgtgttaagttacaaggaaaatggatttggtaattaaaattagaagaaacacaccttcaaacttcaacttctttaaaagaaaaaaaaaactgtcctatcttgttctgtaaaatattagaacgctttgttttacaaaaaatgatgagagaattcttccacatgtacttctgtgcttagaacatttttacggacctaagcgctggagacgttgctgcatgtcggctgggttttttttttcatacacccgagcacggaaaaactaacgcaaaattgtattttcttacctagtggaaatctgaaatgactgcaaattcctagtgaatgtacaggtttgctttcgtgtccctcttctctttatgtacattcctcatccgtggga

SEQ ID NO: 9554 - DNA, 2398 bp, Homo sapiens
gatcaggttagtgtgcgccgcgggtgctgggggctcgagaaccgagcggagctggttgagccttcaaagtcctaaaacgcgcggccgtgggttcggggtttattgattgaattccgccggcgcgggagcctctgcagagagagagcgcgagagatggagatgggcagacggattcatttagagctgcggaacaggacgccctctgatgtgaaagaacttgtcctggacaacagtcggtcgaatgaaggcaaactcgaaggcctcacagatgaatttgaagaactggaattcttaagtacaatcaacgtaggcctcacctcaatcgcaaacttaccaaagttaaacaaacttaagaagcttgaactaagcgataacagagtctcagggggcctggaagtattggcagaaaagtgtccgaacctcacgcatctaaatttaagtggcaacaaaattaaagacctcagcacaatagagccactgaaaaagttagaaaacctcaagagcttagaccttttcaattgcgaggtaaccaacctgaacgactaccgagaaaatgtgttcaagctcctcccgcaactcacatatctcgacggctatgaccgggacgacaaggaggcccctgactcggatgctgagggctacgtggagggcctggatgatgaggaggaggatgaggatgaggaggagtatgatgaagatgctcaggtagtggaagacgaggaggacgaggatgaggaggaggaaggtgaagaggaggacgtgagtggagaggaggaggaggatgaagaaggttataacgatggagaggtagatgacgaggaagatgaagaagagcttggtgaagaagaaaggggtcagaagcgaaaacgagaacctgaagatgagggagaagatgatgactaagtggaataacctattttgaaaaattcctattgtgatttgactgtttttacccatatcccctctcccccccccctccaatcctgccccctgaaacttatttttttctgattgtaacgttgctgtgggaacgagaggggaagagtgtactgggggttgcggggggagggatggcgggtgggggtggaataaaatactatttttactgccactctttatttttttcccctactttttctttgtgtccggtttttgtccctgtaaatgcgatagctaagtacacactaagtgagcatttgttcctgactctcaaagaggatggtttggagttctcttacgtttcctggtatttcccaagtctcttgggttggttggaaggctgtggctggtctcagtttggttactcaatgcccaggaggggctgagcaccagccatatcttttgctttggttcacatgatgatacctgcttttctcaggcctgctagaggcatccaacgccctggtttgtaaatagcaacctaaaggcgtattttggcactggtctggggacattccccatctctcatcccttttcccccttcacagatggtggtgggcttcgctctacaaagaggactctgatgttactcttgagcttatgagccagagagctgaaaaccgcaggcttgttgtgttaagttacaaggaaaatggatttggtaattaaaattagaagaaacacaccttcaaacttcaacttctttaaaaaaatgatgagagaattcttccacatgtacttctgtgcttagaacatttttacggacctaagcgctggagacgttgctgcatgtcggctgggttttttttttcatacacccgagcacggaaaaactaacgcaaaattgtattttcttacctagtggaaatctgaaatgactgcaaattcctagtgaatgtacaggtttgctttcgtgtccctcttctggttgctttagaagtgacgtgtaatttctgaacccatgtttcatctgtataaaagaacatctgcaccagtttttctcctgcccctcagaagagccaaactttgagttttatgtctgtttgtcattgataaatttcaataaatctttttatacaatttttttggggatggcttctttgagtccaacaggccattgatcttttcaagatgcattccagatgaactgctaggtgagggggaagcttcatttttgttacctgatagaatagcttttcttatgagatatatataatgtgatactatgtttggatatttttggtcttaaagcaagactcagtggtgtatcttcattaaaagcttcctttaaaaaagttacagagttactaaaaaaacaagtacccaaacaatcaagttgggccaaccttggaaccttgttttgaatatctttcattgttttgtttgtcgtattgtaaaaagaatgtatggttgaaaactcaggaatgtttataaaacaaattatttcacaaaaaaaaag

SEQ ID NO: 9555 - DNA, 2099 bp, Homo sapiens
gatcaggttagtgtgcgccgcgggtgctgggggctcgagaaccgagcggagctggttgagccttcaaagtcctaaaacgcgcggccgtgggttcggggtttattgattgaattccgccggcgcgggagcctctgcagagagagagcgcgagagatggagatgggcagacggattcatttagagctgcggaacaggacgccctctgatgtgaaagaacttgtcctggacaacagtcggtcgaatgaaggcaaactcgaaggcctcacagatgaatttgaagaactggaattcttaagtacaatcaacgtaggcctcacctcaatcgcaaacttaccaaagttaaacaaacttaagaagcttgaactaagcgataacagagtctcagggggcctggaagtattggcagaaaagtgtccgaacctcacgcatctaaatttaagtggcaacaaaattaaagacctcagcacaatagagccactgaaaaagttagaaaacctcaagagcttagaccttttcaattgcgaggtaaccaacctgaacgactaccgagaaaatgtgttcaagctcctcccgcaactcacatatctcgacggctatgaccgggacgacaaggaggcccctgactcggatgctgagggctacgtggagggcctggatgatgaggaggaggatgaggatgaggaggagtatgatgaagatgctcaggtagtggaagacgaggaggacgaggatgaggaggaggaaggtgaagaggaggacgtgagtggagaggaggaggtgtctgtcctttctcctaggaggatgaagaaggttataacgatggagaggtagatgacgaggaagatgaagaagagcttggtgaagaagaaaggggtcagaagcgaaaacgagaacctgaagatgagggagaagatgatgactaagtggaataacctattttgaaaaattcctattgtgatttgactgtttttacccatatcccctctcccccccccctccaatcctgccccctgaaacttatttttttctgattgtaacgttgctgtgggaacgagaggggaagagtgtactgggggttgcggggggagggatggcgggtgggggtggaataaaatactatttttactgccactctttatttttttcccctactttttctttgtgtccggtttttgtccctgtaaatgcgatagctaagtacacactaagtgagcatttgttcctgactctcaaagaggatggtttggagttctcttacgtttcctggtatttcccaagtctcttgggttggttggaaggctgtggctggtctcagtttggttactcaatgcccaggaggggctgagcaccagccatatcttttgctttggttcacatgatgatacctgcttttctcaggcctgctagaggcatccaacgccctggtttgtaaatagcaacctaaaggcgtattttggcactggtctggggacattccccatctctcatcccttttcccccttcacagatggtggtgggcttcgctctacaaagaggactctgatgttactcttgagcttatgagccagagagctgaaaaccgcaggcttgttgtgttaagttacaaggaaaatggatttggtaattaaaattagaagaaacacaccttcaaacttcaacttctttaaaagaaaaaaaaaactgtcctatcttgttctgtaaaatattagaacgctttgttttacaaaaaatgatgagagaattcttccacatgtacttctgtgcttagaacatttttacggacctaagcgctggagacgttgctgcatgtcggctgggttttttttttcatacacccgagcacggaaaaactaacgcaaaattgtattttcttacctagtggaaatctgaaatgactgcaaattcctagtgaatgtacaggtttgctttcgtgtccctcttctggttgctttagaagtgacgtgtaatttctgaacccatgtttcatctgtataaaagaacatctgcaccagtttttctcctgcccctcagaagagccaaactttgagttttatgtctgtttgtcattgataaatttcaataaatctttttatacaatt

SEQ ID NO: 9556 - DNA, 2086 bp, Homo sapiens
agcgttcagaggtcccactcagttacacaatcaaagaagcatgtagtttacttttagaaacatacaatgggcccaatatgggaattttcataatagttcatacattgtcagccaacattaaaaggtaaccaactcctcaggtattgtagtttaccctaacgcttctttaaaagaaagtaggtaaaaaaagaaaagggtagataatctttcgtatgcaaacttttcccttatattttgtctttctttcctttttgactttagtagcatcctccacacatttgtgtaaactgattatcagtttacacaaatcaacgtaggcctcacctcaatcgcaaacttaccaaagttaaacaaacttaagaagcttgaactaagcgataacagagtctcagggggcctggaagtattggcagaaaagtgtccgaacctcacgcatctaaatttaagtggcaacaaaattaaagacctcagcacaatagagccactgaaaaagttagaaaacctcaagagcttagaccttttcaattgcgaggtaaccaacctgaacgactaccgagaaaatgtgttcaagctcctcccgcaactcacatatctcgacggctatgaccgggacgacaaggaggcccctgactcggatgctgagggctacgtggagggcctggatgatgaggaggaggatgaggatgaggaggagtatgatgaagatgctcaggtagtggaagacgaggaggacgaggatgaggaggaggaaggtgaagaggaggacgtgagtggagaggaggaggaggatgaagaaggttataacgatggagaggtagatgacgaggaagatgaagaagagcttggtgaagaagaaaggggtcagaagcgaaaacgagaacctgaagatgagggagaagatgatgactaagtggaataacctattttgaaaaattcctattgtgatttgactgtttttacccatatcccctctcccccccccctccaatcctgccccctgaaacttatttttttctgattgtaacgttgctgtgggaacgagaggggaagagtgtactgggggttgcggggggagggatggcgggtgggggtggaataaaatactatttttactgccactctttatttttttcccctactttttctttgtgtccggtttttgtccctgtaaatgcgatagctaagtacacactaagtgagcatttgttcctgactctcaaagaggatggtttggagttctcttacgtttcctggtatttcccaagtctcttgggttggttggaaggctgtggctggtctcagtttggttactcaatgcccaggaggggctgagcaccagccatatcttttgctttggttcacatgatgatacctgcttttctcaggcctgctagaggcatccaacgccctggtttgtaaatagcaacctaaaggcgtattttggcactggtctggggacattccccatctctcatcccttttcccccttcacagatggtggtgggcttcgctctacaaagaggactctgatgttactcttgagcttatgagccagagagctgaaaaccgcaggcttgttgtgttaagttacaaggaaaatggatttggtaattaaaattagaagaaacacaccttcaaacttcaacttctttaaaagaaaaaaaaaactgtcctatcttgttctgtaaaatattagaacgctttgttttacaaaaaatgatgagagaattcttccacatgtacttctgtgcttagaacatttttacggacctaagcgctggagacgttgctgcatgtcggctgggttttttttttcatacacccgagcacggaaaaactaacgcaaaattgtattttcttacctagtggaaatctgaaatgactgcaaattcctagtgaatgtacaggtttgctttcgtgtccctcttctggttgctttagaagtgacgtgtaatttctgaacccatgtttcatctgtataaaagaacatctgcaccagtttttctcctgcccctcagaagagccaaactttgagttttatgtctgtttgtcattgataaatttcaataaatctttttatacaatt

SEQ ID NO: 9557 - DNA, 1777 bp, Homo sapiens
acaggacttcgagttagcgggcactcctcgcatatacaagttaacaacttagaagcttgaactaagcgataacagagtctcagggggcctggaagtattggcagaaaagtgtccgaacctcacgcatctaaatttaagtggcaacaaaattaaagacctcagcacaatagagccactgaaaaagttagaaaacctcaagagcttagaccttttcaattgcgaggtaaccaacctgaacgactaccgagaaaatgtgttcaagctcctcccgcaactcacatatctcgacggctatgaccgggacgacaaggaggcccctgactcggatgctgagggctacgtggagggcctggatgatgaggaggaggatgaggatgaggaggagtatgatgaagatgctcaggtagtggaagacgaggaggacgaggatgaggaggaggaaggtgaagaggaggacgtgagtggagaggaggaggaggatgaagaaggttataacgatggagaggtagatgacgaggaagatgaagaagagcttggtgaagaagaaaggggtcagaagcgaaaacgagaacctgaagatgagggagaagatgatgactaagtggaataacctattttgaaaaattcctattgtgatttgactgtttttacccatatcccctctcccccccccctccaatcctgccccctgaaacttatttttttctgattgtaacgttgctgtgggaacgagaggggaagagtgtactgggggttgcggggggagggatggcgggtgggggtggaataaaatactatttttactgccactctttatttttttcccctactttttctttgtgtccggtttttgtccctgtaaatgcgatagctaagtacacactaagtgagcatttgttcctgactctcaaagaggatggtttggagttctcttacgtttcctggtatttcccaagtctcttgggttggttggaaggctgtggctggtctcagtttggttactcaatgcccaggaggggctgagcaccagccatatcttttgctttggttcacatgatgatacctgcttttctcaggcctgctagaggcatccaacgccctggtttgtaaatagcaacctaaaggcgtattttggcactggtctggggacattccccatctctcatcccttttcccccttcacagatggtggtgggcttcgctctacaaagaggactctgatgttactcttgagcttatgagccagagagctgaaaaccgcaggcttgttgtgttaagttacaaggaaaatggatttggtaattaaaattagaagaaacacaccttcaaacttcaacttctttaaaagaaaaaaaaaactgtcctatcttgttctgtaaaatattagaacgctttgttttacaaaaaatgatgagagaattcttccacatgtacttctgtgcttagaacatttttacggacctaagcgctggagacgttgctgcatgtcggctgggttttttttttcatacacccgagcacggaaaaactaacgcaaaattgtattttcttacctagtggaaatctgaaatgactgcaaattcctagtgaatgtacaggtttgctttcgtgtccctcttctggttgctttagaagtgacgtgtaatttctgaacccatgtttcatctgtataaaagaacatctgcaccagtttttctcctgcccctcagaagagccaaactttgagttttatgtctgtttgtcattgataaatttcaataaatctttttatacaatt

SEQ ID NO: 9558 - DNA, 1783 bp, Homo sapiens
ttagaggagctgagggtctcttcctcaatccaaattaccaaagttaaacaaacttaagaagcttgaactaagcgataacagagtctcagggggcctggaagtattggcagaaaagtgtccgaacctcacgcatctaaatttaagtggcaacaaaattaaagacctcagcacaatagagccactgaaaaagttagaaaacctcaagagcttagaccttttcaattgcgaggtaaccaacctgaacgactaccgagaaaatgtgttcaagctcctcccgcaactcacatatctcgacggctatgaccgggacgacaaggaggcccctgactcggatgctgagggctacgtggagggcctggatgatgaggaggaggatgaggatgaggaggagtatgatgaagatgctcaggtagtggaagacgaggaggacgaggatgaggaggaggaaggtgaagaggaggacgtgagtggagaggaggaggaggatgaagaaggttataacgatggagaggtagatgacgaggaagatgaagaagagcttggtgaagaagaaaggggtcagaagcgaaaacgagaacctgaagatgagggagaagatgatgactaagtggaataacctattttgaaaaattcctattgtgatttgactgtttttacccatatcccctctcccccccccctccaatcctgccccctgaaacttatttttttctgattgtaacgttgctgtgggaacgagaggggaagagtgtactgggggttgcggggggagggatggcgggtgggggtggaataaaatactatttttactgccactctttatttttttcccctactttttctttgtgtccggtttttgtccctgtaaatgcgatagctaagtacacactaagtgagcatttgttcctgactctcaaagaggatggtttggagttctcttacgtttcctggtatttcccaagtctcttgggttggttggaaggctgtggctggtctcagtttggttactcaatgcccaggaggggctgagcaccagccatatcttttgctttggttcacatgatgatacctgcttttctcaggcctgctagaggcatccaacgccctggtttgtaaatagcaacctaaaggcgtattttggcactggtctggggacattccccatctctcatcccttttcccccttcacagatggtggtgggcttcgctctacaaagaggactctgatgttactcttgagcttatgagccagagagctgaaaaccgcaggcttgttgtgttaagttacaaggaaaatggatttggtaattaaaattagaagaaacacaccttcaaacttcaacttctttaaaagaaaaaaaaaactgtcctatcttgttctgtaaaatattagaacgctttgttttacaaaaaatgatgagagaattcttccacatgtacttctgtgcttagaacatttttacggacctaagcgctggagacgttgctgcatgtcggctgggttttttttttcatacacccgagcacggaaaaactaacgcaaaattgtattttcttacctagtggaaatctgaaatgactgcaaattcctagtgaatgtacaggtttgctttcgtgtccctcttctggttgctttagaagtgacgtgtaatttctgaacccatgtttcatctgtataaaagaacatctgcaccagtttttctcctgcccctcagaagagccaaactttgagttttatgtctgtttgtcattgataaatttcaataaatctttttatacaatt

SEQ ID NO: 9559 - DNA, 1690 bp, Homo sapiens
gatcaggttagtgtgcgccgcgggtgctgggggctcgagaaccgagcggagctggttgagccttcaaagtcctaaaacgcgcggccgtgggttcggggtttattgattgaattccgccggcgcgggagcctctgcagagagagagcgcgagagatggagatgggcagacggattcatttagagctgcggaacaggacgccctctgatgtgaaagaacttgtcctggacaacagtcggtcgaatgaaggcaaactcgaaggcctcacagatgaatttgaagaactggaattcttaagtacaatcaacgtaggcctcacctcaatcgcaaacttaccaaagttaaacaaacttaagaagcttgaactaagcgataacagagtctcagggggcctggaagtattggcagaaaagtgtccgaacctcacgcatctaaatttaagtggcaacaaaattaaagacctcagcacaatagagccactgaaaaagttagaaaacctcaagagcttagaccttttcaattgcgaggtaaccaacctgaacgactaccgagaaaatgtgttcaagctcctcccgcaactcacatatctcgacggctatgaccgggacgacaaggaggcccctgactcggatgctgagggctacgtggagggcctggatgatgaggaggaggatgaggatgggatggcgggtgggggtggaataaaatactatttttactgccactctttatttttttcccctactttttctttgtgtccggtttttgtccctgtaaatgcgatagctaagtacacactaagtgagcatttgttcctgactctcaaagaggatggtttggagttctcttacgtttcctggtatttcccaagtctcttgggttggttggaaggctgtggctggtctcagtttggttactcaatgcccaggaggggctgagcaccagccatatcttttgctttggttcacatgatgatacctgcttttctcaggcctgctagaggcatccaacgccctggtttgtaaatagcaacctaaaggcgtattttggcactggtctggggacattccccatctctcatcccttttcccccttcacagatggtggtgggcttcgctctacaaagaggactctgatgttactcttgagcttatgagccagagagctgaaaaccgcaggcttgttgtgttaagttacaaggaaaatggatttggtaattaaaattagaagaaacacaccttcaaacttcaacttctttaaaagaaaaaaaaaactgtcctatcttgttctgtaaaatattagaacgctttgttttacaaaaaatgatgagagaattcttccacatgtacttctgtgcttagaacatttttacggacctaagcgctggagacgttgctgcatgtcggctgggttttttttttcatacacccgagcacggaaaaactaacgcaaaattgtattttcttacctagtggaaatctgaaatgactgcaaattcctagtgaatgtacaggtttgctttcgtgtccctcttctggttgctttagaagtgacgtgtaatttctgaacccatgtttcatctgtataaaagaacatctgcaccagtttttctcctgcccctcagaagagccaaactttgagttttatgtctgtttgtcattgataaatttcaataaatctttttatacaatt

SEQ ID NO: 9560 - DNA, 1717 bp, Homo sapiens
gatcaggttagtgtgcgccgcgggtgctgggggctcgagaaccgagcggagctggttgagccttcaaagtcctaaaacgcgcggccgtgggttcggggtttattgattgaattccgccggcgcgggagcctctgcagagagagagcgcgagagatggagatgggcagacggattcatttagagctgcggaacaggacgccctctgatgtgaaagaacttgtcctggacaacagtcggtcgaatgaaggcaaactcgaaggcctcacagatgaatttgaagaactggaattcttaagtacaatcaacgtaggcctcacaggaggagtatgatgaagatgctcaggtagtggaagacgaggaggacgaggatgaggaggaggaaggtgaagaggaggacgtgagtggagaggaggaggaggatgaagaaggttataacgatggagaggtagatgacgaggaagatgaagaagagcttggtgaagaagaaaggggtcagaagcgaaaacgagaacctgaagatgagggagaagatgatgactaagtggaataacctattttgaaaaattcctattgtgatttgactgtttttacccatatcccctctcccccccccctccaatcctgccccctgaaacttatttttttctgattgtaacgttgctgtgggaacgagaggggaagagtgtactgggggttgcggggggagggatggcgggtgggggtggaataaaatactatttttactgccactctttatttttttcccctactttttctttgtgtccggtttttgtccctgtaaatgcgatagctaagtacacactaagtgagcatttgttcctgactctcaaagaggatggtttggagttctcttacgtttcctggtatttcccaagtctcttgggttggttggaaggctgtggctggtctcagtttggttactcaatgcccaggaggggctgagcaccagccatatcttttgctttggttcacatgatgatacctgcttttctcaggcctgctagaggcatccaacgccctggtttgtaaatagcaacctaaaggcgtattttggcactggtctggggacattccccatctctcatcccttttcccccttcacagatggtggtgggcttcgctctacaaagaggactctgatgttactcttgagcttatgagccagagagctgaaaaccgcaggcttgttgtgttaagttacaaggaaaatggatttggtaattaaaattagaagaaacacaccttcaaacttcaacttctttaaaagaaaaaaaaaactgtcctatcttgttctgtaaaatattagaacgctttgttttacaaaaaatgatgagagaattcttccacatgtacttctgtgcttagaacatttttacggacctaagcgctggagacgttgctgcatgtcggctgggttttttttttcatacacccgagcacggaaaaactaacgcaaaattgtattttcttacctagtggaaatctgaaatgactgcaaattcctagtgaatgtacaggtttgctttcgtgtccctcttctggttgctttagaagtgacgtgtaatttctgaacccatgtttcatctgtataaaagaacatctgcaccagtttttctcctgcccctcagaagagccaaactttgagttttatgtctgtttgtcattgataaatttcaataaatctttttatacaatt

SEQ ID NO: 9561 - DNA, 1270 bp, Homo sapiens
gagccagagagctgaaaaccgcaggcttggtgaagaagaaaggggtcagaagcgaaaacgagaacctgaagatgagggagaagatgatgactaagtggaataacctattttgaaaaattcctattgtgatttgactgtttttacccatatcccctctcccccccccctccaatcctgccccctgaaacttatttttttctgattgtaacgttgctgtgggaacgagaggggaagagtgtactgggggttgcggggggagggatggcgggtgggggtggaataaaatactatttttactgccactctttatttttttcccctactttttctttgtgtccggtttttgtccctgtaaatgcgatagctaagtacacactaagtgagcatttgttcctgactctcaaagaggatggtttggagttctcttacgtttcctggtatttcccaagtctcttgggttggttggaaggctgtggctggtctcagtttggttactcaatgcccaggaggggctgagcaccagccatatcttttgctttggttcacatgatgatacctgcttttctcaggcctgctagaggcatccaacgccctggtttgtaaatagcaacctaaaggcgtattttggcactggtctggggacattccccatctctcatcccttttcccccttcacagatggtggtgggcttcgctctacaaagaggactctgatgttactcttgagcttatgagccagagagctgaaaaccgcaggcttgttgtgttaagttacaaggaaaatggatttggtaattaaaattagaagaaacacaccttcaaacttcaacttctttaaaagaaaaaaaaaactgtcctatcttgttctgtaaaatattagaacgctttgttttacaaaaaatgatgagagaattcttccacatgtacttctgtgcttagaacatttttacggacctaagcgctggagacgttgctgcatgtcggctgggttttttttttcatacacccgagcacggaaaaactaacgcaaaattgtattttcttacctagtggaaatctgaaatgactgcaaattcctagtgaatgtacaggtttgctttcgtgtccctcttctggttgctttagaagtgacgtgtaatttctgaacccatgtttcatctgtataaaagaacatctgcaccagtttttctcctgcccctcagaagagccaaactttgagttttatgtctgtttgtcattgataaatttcaataaatctttttatacaatt

SEQ ID NO: 9562 - DNA, 1432 bp, Homo sapiens
ggcctggcttcctggctctgcgatgctttcctgccctagggcagaaggcctcacaggatttattcccaggcactcttgccatgaccttgagaaggtggcttgacctggacatctggatctcagggactgagggggtgggaaaggactgagcctccccctcccagacccaacaggaaggtgggctttggtgaccatttcctaggctgagagctccttagctccaggagagggctgcgctccctggttctcctgctctgtgggctgtgctagatgaaacccacaaattgctgctgtcccgggcggagtggcatgcctccacccaccagtgaagaatgaaggcagggcagttgcagggccctgcaggactctgagatccagatgtgtaccccagtgctcccctgctctgcccactggcaagaggggatggcgggtgggggtggaataaaatactatttttactgccactctttatttttttcccctactttttctttgtgtccggtttttgtccctgtaaatgcgatagctaagtacacactaagtgagcatttgttcctgactctcaaagaggatggtttggagttctcttacgtttcctggtatttcccaagtctcttgggttggttggaaggctgtggctggtctcagtttggttactcaatgcccaggaggggctgagcaccagccatatcttttgctttggttcacatgatgatacctgcttttctcaggcctgctagaggcatccaacgccctggtttgtaaatagcaacctaaaggcgtattttggcactggtctggggacattccccatctctcatcccttttcccccttcacagatggtggtgggcttcgctctacaaagaggactctgatgttactcttgagcttatgagccagagagctgaaaaccgcaggcttgttgtgttaagttacaaggaaaatggatttggtaattaaaattagaagaaacacaccttcaaacttcaacttctttaaaagaaaaaaaaaactgtcctatcttgttctgtaaaatattagaacgctttgttttacaaaaaatgatgagagaattcttccacatgtacttctgtgcttagaacatttttacggacctaagcgctggagacgttgctgcatgtcggctgggttttttttttcatacacccgagcacggaaaaactaacgcaaaattgtattttcttacctagtggaaatctgaaatgactgcaaattcctagtgaatgtacaggtttgctttcgtgtccctcttctggttgctttagaagtgacgtgtaatttctgaacccatgtttcatctgtataaaagaacatctgcaccagtttttctcctgcccctcagaagagccaaactttgagttttatgtctgtttgtcattgataaatttcaataaatctttttatacaatt

SEQ ID NO: 9563 - DNA, 923 bp, Homo sapiens
ggcctaagtcctttgcggtgccttcccactaagtgagcatttgttcctgactctcaaagaggatggtttggagttctcttacgtttcctggtatttcccaagtctcttgggttggttggaaggctgtggctggtctcagtttggttactcaatgcccaggaggggctgagcaccagccatatcttttgctttggttcacatgatgatacctgcttttctcaggcctgctagaggcatccaacgccctggtttgtaaatagcaacctaaaggcgtattttggcactggtctggggacattccccatctctcatcccttttcccccttcacagatggtggtgggcttcgctctacaaagaggactctgatgttactcttgagcttatgagccagagagctgaaaaccgcaggcttgttgtgttaagttacaaggaaaatggatttggtaattaaaattagaagaaacacaccttcaaacttcaacttctttaaaagaaaaaaaaaactgtcctatcttgttctgtaaaatattagaacgctttgttttacaaaaaatgatgagagaattcttccacatgtacttctgtgcttagaacatttttacggacctaagcgctggagacgttgctgcatgtcggctgggttttttttttcatacacccgagcacggaaaaactaacgcaaaattgtattttcttacctagtggaaatctgaaatgactgcaaattcctagtgaatgtacaggtttgctttcgtgtccctcttctggttgctttagaagtgacgtgtaatttctgaacccatgtttcatctgtataaaagaacatctgcaccagtttttctcctgcccctcagaagagccaaactttgagttttatgtctgtttgtcattgataaatttcaataaatctttttatacaatt

SEQ ID NO: 9564 - DNA, 789 bp, Homo sapiens
ggccctgatcactttagaggcttttaagaaattgtttaaagaagccaatgcctctgagtgaagtgtactatcccctccctgaagccccccggcaccagtcctaccaatttaaaaaggctcgatggcaaaatttctccatcctggaatcccctagggaaggggtccggagaaagtgccctgcttgatatttaagaactcccccgctctttaacataagcacttatccctgacctgccatactgccagatgccagctaaacttatcccgaagtatgtagtcgactacatacttcccaaggaaaatggatttggtaattaaaattagaagaaacacaccttcaaacttcaacttctttaaaagaaaaaaaaaactgtcctatcttgttctgtaaaatattagaacgctttgttttacaaaaaatgatgagagaattcttccacatgtacttctgtgcttagaacatttttacggacctaagcgctggagacgttgctgcatgtcggctgggttttttttttcatacacccgagcacggaaaaactaacgcaaaattgtattttcttacctagtggaaatctgaaatgactgcaaattcctagtgaatgtacaggtttgctttcgtgtccctcttctggttgctttagaagtgacgtgtaatttctgaacccatgtttcatctgtataaaagaacatctgcaccagtttttctcctgcccctcagaagagccaaactttgagttttatgtctgtttgtcattgataaatttcaataaatctttttatacaatt

SEQ ID NO: 9565 - DNA, 783 bp, Homo sapiens
gatcaggttagtgtgcgccgcgggtgctgggggctcgagaaccgagcggagctggttgagccttcaaagtcctaaaacgcgcggccgtgggttcggggtttattgattgaattccgccggcgcgggagcctctgcagagagagagcgcgagagatggagatgggcagacggattcatttagagctgcggaacaggacgccctctgatgtgaaagaacttgtcctggacaacagtcggtcgaatgaaggcaaactcgaaggcctcacagatgaatttgaagaactggaattcttaagtacaatcaacgtaggcctcacctcaatcgcaaacttaccaaagttaaacaaacttaagaagcttgaactaagcgataacagagtctcagggggcctggaagtattggcagaaaagtgtccgaacctcacgcatctaaatttaagtggcaacaaaattaaagacctcagcacaatagagccactgaaaaagttagaaaacctcaagagcttagaccttttcaattgcgaggtaaccaacctgaacgactaccgagaaaatgtgttcaagctcctcccgcaactcacatatctcgacggctatgaccgggacgacaaggaggcccctgactcggatgctgagggctacgtggagggcctggatgatgaggaggaggatgaggatgataaacagaggaaatattaattaaatgggctgtaaacaataacaactgtgaataagattatcaaatctgttttagtgtaatgattgtcaagtttaaaaacattt

SEQ ID NO: 9566 - DNA, 186 bp, Homo sapiens
tgacttctcactgggtgggttgagttaaagaggtgggattaataactaatctaaatgccgctttcttacttttccagaagaagaaaggggtcagaagcgaaaacgagaacctgaagatgagggagaagatgatgactaagtggaataacctattttgaaaaattcctattgtgatttgactgtttt

SEQ ID NO: 9567 - DNA, 1394 bp, Homo sapiens
ttagaggagctgagggtctcttcctcaatccaaattaccaaagttaaacaaacttaagaagcttgaactaagcgataacagagtctcagggggcctggaagtattggcagaaaagtgtccgaacctcacgcatctaaatttaagtggcaacaaaattaaagacctcagcacaatagagccactgaaaaagttagaaaacctcaagagcttagaccttttcaattgcgaggtaaccaacctgaacgactaccgagaaaatgtgttcaagctcctcccgcaactcacatatctcgacggctatgaccgggacgacaaggaggcccctgactcggatgctgagggctacgtggagggcctggatgatgaggaggaggatgaggatgggatggcgggtgggggtggaataaaatactatttttactgccactctttatttttttcccctactttttctttgtgtccggtttttgtccctgtaaatgcgatagctaagtacacactaagtgagcatttgttcctgactctcaaagaggatggtttggagttctcttacgtttcctggtatttcccaagtctcttgggttggttggaaggctgtggctggtctcagtttggttactcaatgcccaggaggggctgagcaccagccatatcttttgctttggttcacatgatgatacctgcttttctcaggcctgctagaggcatccaacgccctggtttgtaaatagcaacctaaaggcgtattttggcactggtctggggacattccccatctctcatcccttttcccccttcacagatggtggtgggcttcgctctacaaagaggactctgatgttactcttgagcttatgagccagagagctgaaaaccgcaggcttgttgtgttaagttacaaggaaaatggatttggtaattaaaattagaagaaacacaccttcaaacttcaacttctttaaaagaaaaaaaaaactgtcctatcttgttctgtaaaatattagaacgctttgttttacaaaaaatgatgagagaattcttccacatgtacttctgtgcttagaacatttttacggacctaagcgctggagacgttgctgcatgtcggctgggttttttttttcatacacccgagcacggaaaaactaacgcaaaattgtattttcttacctagtggaaatctgaaatgactgcaaattcctagtgaatgtacaggtttgctttcgtgtccctcttctggttgctttagaagtgacgtgtaatttctgaacccatgtttcatctgtataaaagaacatctgcaccagtttttctcctgcccctcagaagagccaaactttgagttttatgtctgtttgtcattgataaatttcaataaatctttttatacaatt

SEQ ID NO: 9568 - DNA, 1422 bp, Homo sapiens
gatcaggttagtgtgcgccgcgggtgctgggggctcgagaaccgagcggagctggttgagccttcaaagtcctaaaacgcgcggccgtgggttcggggtttattgattgaattccgccggcgcgggagcctctgcagagagagagcgcgagagatggagatgggcagacggattcatttagagctgcggaacaggacgccctctgatgtgaaagaacttgtcctggacaacagtcggtcgaatgaaggcaaactcgaaggcctcacagatgaatttgaagaactggaattcttaagtacaatcaacgtaggcctcacctcaatcgcaaacttaccaaagttaaacaaacttaagaagcttgaactaagcgataacagagtctcagggggcctggaagtattggcagaaaagtgtccgaacctcacgcatctaaatttaagtggcaacaaaattaaagacctcagcacaatagagccactgaaaaagttagaaaacctcaagagcttagaccttttcaattgcgaggtaaccaacctgaacgactaccgagaaaatgtgttcaagctcctcccgcaactcacatatctcgacggctatgaccgggacgacaaggaggcccctgactcggatgctgagggctacgtggagggcctggatgatgaggaggaggatgaggatgaggaggagtatgatgaagatgctcaggtagtggaagacgaggaggacgaggatgaggaggaggaaggtgaagaggaggacgtgagtggagaggaggaggtaaggaggctgggctgggcagggccaccgtctgcccctttgaggcagtcccactgactgcctctgtgatcagtcttggcagccccggagccctggttaggaaagtcgctccccgatgggtagtgaagtgagtccatttcagagcctttcactgggctgtttctggggagacaagacttgcagtaagctctggggaggctggattagaagaggggaagaggattttagaggcagggactgaacctgctggggtaagcctggccgttgtttctatgtgaagaagtacagaatgcatggccccattttctgctttttgctttcatatgctaattaagatattcattgagcacttaaactgtgctagggaaaaccaaagtctgccttgaactgataggtagcaggataacactgctggatcccaaatcagagagtgacactatggaaatagagcaccaggagttggccattttcctaaagagattggctggttcccagttttttaacaagatctgtgagggggtgagtcccagctctaccactcgcaagctgtgtgtccccagacaatttacctgacctttctgagcctatttcttcatctgtaaaatagggatcatgatagctttctcacagggttgttaagaggat

SEQ ID NO: 9569 - DNA, 469 bp, Homo sapiens
gatcaggttagtgtgcgccgcgggtgctgggggctcgagaaccgagcggagctggttgagccttcaaagtcctaaaacgcgcggccgtgggttcggggtttattgattgaattccgccggcgcgggagcctctgcagagagagagcgcgagagatggagatgggcagacggattcatttagagctgcggaacaggacgccctctgatgtgaaagaacttgtcctggacaacagtcggtcgaatgaaggcaaactcgaaggcctcacagatgaatttgaagaactggaattcttaagtacaatcaacgtaggcctcacctcaatcgcaaacttaccaaagttaaacaaacttaagaagcttgaactaagcgataacagagtctcagggggcctggaagtattggcagaaaagtgtccgaacctcacgcatctaaatttaagtgcgctcgtagagggatcctctaagtagt

SEQ ID NO: 9570 - DNA, 492 bp, Homo sapiens
agatcaaccccctcccaccacagcaggagtggatcaatcagccagtgagggtcaacgtcaagcgggagtatgaccacatgaatggatccagggagtctccggtggactgcagcgttagcaaatgcagcaagctggtgggcggaggcgagtccaaccccatgaactacaacagctatatggacgagaagaatggcccccctcctcccaacatgaccaccaacgagaggagagtcatcgtccccgcaggtaattcgagaaccaggctgcctgggcgccattcacttccccactctctggggggcagggagcatctaaacctttatctgatactctattccctgtggaattgcaaaatggagaaagctgcacgccagccgggagtggtggctcgcgcctgtaatcccagcactttgagaggccaagacgggtgaatcacttgtcaggagttcaagaccagcctagccaacgtggtgaaacctcatctctactaaa

SEQ ID NO: 9571 - DNA, 614 bp, Homo sapiens
gacagtctgaacagtttaagcagactggctgaagctttgcccaaacaatccatggatggaaaagcaccacttgctactggggaggatgatgatgatgaagttcctgatcttgtggagaattttgatgaggcttccaagaatgaggcaaactgaattgagtcaacttctgaagataaaacttgaagaagttactgggagctgctattttatattatgactactttttaagaatttttgtttatggatctgataaaatctagatctctaatatttttaagcccaagccctttggacactgcagctcttttcaggttttgcttatacacaattcattctttgcagctaataaagccgaagaagcctgagaataaactttgaaacaaaggttaataaagttctttgcctagtaaaacaaaacaaaacaaaacaaaacaaaacaaaacaaaacaaaaagcttatatcattaaggccaggcgcagtggctcacacctgtagtcccagcactttgggagaccaaggcaggtggatcacttgagtgcaggagttcaagtacggcttaggcaacatggcgaaacaccatctctacaaaaaactaataaaagtaaaatttaaaa

SEQ ID NO: 9572 - DNA, 663 bp, Homo sapiens
aaaagccagtctacatctttacccatgcttttcttcctccctcttggaacaacagaagaaggtaactctcttccaccaactccctccctctatgagccagatccaccctacccagactgtctggaactttttactattcctattctctcccatatctgaatatctccaatctgttcaccttggcatgcttaagccttttacatctttaaaaacaacaaaacaaacctttccttgatccccacatcttcatcgcactctcttccttcacatcttcaccctctatttgctttttttttttttaagagacagggccttgctgtgttggccaggctggagcacagaggtacaatcatagctcactgcagcctcaaactcctgtgctcaagggatcctcctgcttcagcctcccaagcagctagaactataagcatgagccaccatacctagctaaatttaaaaaattttttgtagacacagggtctcactatgttgctcagattggtctaaaactcctgaggtcaagcaacctgtccactaagctttcttcggtcctctcacgcaacagcaccttagctctgctccaccattgggtagctggttttcagtaaggtcagcagtgatcaccaggtcaataaatctaacacaggccttctcagttcttcc

SEQ ID NO: 9573 - DNA, 389 bp, Homo sapiens
cactccatatgcagaacatcattgtgtggaccttgcaggcggattctgagtttggattgctggcatctgctctccctctccctgcactgattctcgggttcttgacctgagcagggtctcaccactgagacacagccctggagggtgggcttacatgaaaacatggccggatggggagtggacggcagaggagaccagaggacaatatccagagactcccagtttagctgcatgcagagacctgttgtttgtatatttttgctttctaaaagaaatgctagagatagctgggcccagtggcatgtacctatagtctcaactactcaggagttcaagtccagcctgggcaacatattgagaccccgtctctaaaaaaaaaaaaaaaaaag

SEQ ID NO: 9574 - DNA, 319 bp, Homo sapiens
ggaggcagaggttgtggtgagctgagatcatgccactgcactccagcctgggcaacagagtgagagactctgtgtcaaaaaaaaaaaaaaaagaaccgcagccacaataatgaggaatgaatgaaagagggaacatcactaaagaaataaaaaagataatatgggaatactatgaataactgggcaccagccagttagacaccctagactaaacaaattcccagaaagatacaaactaccagaaccaactcacaaagtatagaaaatatgaatagaactataacaagtgattatatcagtaactttaaacgtctcccaa

SEQ ID NO: 9575 - DNA, 469 bp, Homo sapiens
ttgctgtgttgacccccacctggatgtctgtcacatctatggagagagggtggagaagaaaggacggtgagcagggggttgaacttgttcttgacccctctgtggcctcagtttcctccccagatctgtaaaggggtctgtaggttagctgtttctgagaagctagacaaaccacttaagtctgaggattggtcactttagtggaaagagtgagatggaaacccacaaagtcaggacaccctggattctaatccttgtccaaccagtaaccaaatttattttgccttggagggcaaatgaaatccctgggccttagattcctcatctgtaatgcgatattcttagttatgcccatgttttttaaagtgtaggaaccttggcactaggatggcataacactgaatcacacattgagaactgtattcctttccgatcactttaaatccttctggttgttaaaaaaaaaaaa

SEQ ID NO: 9576 - DNA, 313 bp, Homo sapiens
gaaagaaacctcgacccacgtcacatctgcaatctaagagccccactgtggccatctccccagtttctcccatgcactagaaaagggctgagcaatcgctcatccttggtattgggtggcctctgttatggtcctctgaagtatgctgtgctcgcagagtttatctgccctgcactctttactcttgctgctttgatgtcttcttatggctggtatgtgttttgtagttattctggccaccagcagttttttctgcaaatcctgtgtcctgctgggtatgtctgttccttcctgttcccccaacaacacattc

SEQ ID NO: 9577 - DNA, 566 bp, Homo sapiens
ataattattctcaatcactgagctggattgacgaatgcttgcttttatctcttgaattttgggtatctcttaatttattaaaaatatgtgtgttttgatatttacttatcatctcatggtttaatatcacaaaaactgtttttttaaaaataacctttgttcattagcattagattcattaaaccaatctcaactgtgtgcttgaattatttctatgctcctaaaaaagtataataatgcaatgtaactgcctgatgggttctctctgtccactgcacaaataccatggcattgcagtaaaaaagagtttaactgatgcaaggctaatcatgtcaaatgggagatagagttattgctcaaataagtcacctagaggttttgagggtaggagtttttcaaagacagcttggtgggcagggagctagggtaatggcggttctgattgggtcaaagatggaatcatagggaagtcgaagctggcctctttggctgagtcacttctgggtgggaccacaggagtgattggcaggtgaaggtggagccatcagtgatcagacatgaaaaaa

SEQ ID NO: 9578 - DNA, 226 bp, Homo sapiens
tcattttctcttgctgccaccatgtaagaagtgcctttcacctcccgccatgattctgaggcctcccctgtcatgtggaactgtaagtctaattaaacctctttttcttcccagtcttgggtatgtcttcatcagcagcatgaaaacagactaacacaccttgaaaacaatgccaagcaatgaaattcacttactcaaaaagttagggagtacaaaaacaaaaaat

SEQ ID NO: 9579 - DNA, 439 bp, Homo sapiens
caagagtgtgggagaaaaaaaatacgactatataacactccaagataatgagttagttaaggactcacagattcatcatttaatcactgaaacgacaggcacgcaagaacaagatcaagcttaatacaataacgctagattatatcaacaaatggatgccaacgggttaagacgggaggcctacataaaatgggttcaattcagagtgtggactcacacaaagttgcgaaactcgctttattggttctacaaatccaagtaagtgactagacccaggcttgcaaagctatatgtcagacacactttgttgcaagatgcaaagatgtcatcctaccccttgaacaggaaatcaccccacatactagtttattcttgttatcagcacatctcgttatgctccattttaacttattaaggttcctcaagagatgctcaattt

SEQ ID NO: 9580 - DNA, 181 bp, Homo sapiens
cctcaggagacctctgtaaactgcatccatgccgtagaccccgcatccaagcagtgctgcatccaccagccttaggaaagtggatcagaaaggaaatgtctcagtgatcctagacactaactttgacaaggaaagaccacccatagtggaagtggttggaaggtgagccttcaaattcaag

SEQ ID NO: 9581 - DNA, 492 bp, Homo sapiens
tgggtgaatgtaacatgggattatgtggctcctctgaaactctgggaattaccttaattttagccactggaaggagacagggtcctgctgatcattatataaagtagtattcagattgatgcataggtctcgtctgttttggttaggatgactgcatcatggacatcattttcagctatactcattgttgaccctcttgtagacctgtgagaatagcaactaagccttgggatcactgacacacctaaaaccctgcctaactaactgaaacactgaggaccccatcacctcagatatgagattgtcttattgcatccaatgaagattagtagaactacaaaaatggtttctctgtatgtttattaacaggaccttaagcacacctgtgccacaaggccacattttccatgatgtggataaaacacatctttgtttaccatggatgctatttttgtatgaaataaaacatgagacattaaataaaaaaaaaaa

SEQ ID NO: 9582 - DNA, 442 bp, Homo sapiens
cacatgtgaaggaaaaaggaaagaaaaagggagggaagaatagaaagactgtagtaagaaatccatgatcggtgcgaaacatggagttttcacaacgagctaaagaaacactataggctgtctcctagagacacacatttctgccatctaatctgcagatttgtttacattaaaaaacaagactaaatttaagcttcaaagtaaaagctcaacatttagggagacatacgggctgtttgctttgaatgaggggcaggagccagccttctccgagttggcccagagaaaatttttgaaacacagaaatgtaataatagctggcacatgggatgtgtggaatgaaatcagcactttcaaaaagaaaagaatgaagagaataataataataagccaatgcattcagttcttttggttaatgtcaaattttactcaccaatcttaa

SEQ ID NO: 9583 - DNA, 808 bp, Homo sapiens
ggtgaggctgggatgagaatcggccgaggattatttccatgagtaactatttctaaatgattggaaatttttgaaaaagtggtatggtttatatacctaatctgcttatctgctataagtcatatgagaacaacagctaggatgattgtccaagcagctttagatgtgtttagggccaggcaaaaggtttgcttgttttttctttttgcttaagatctgggagattagcaaatttctcaagactatagactgaactgtaatttttaccaactcttgctcatgagcctcaaaatgaatatatccttgaataaagtataaatatttcaatagatacatctctctattatccattttcacaattataaaagcatcagcaaaattgtggatatgtgttccagtcactcatggatccatggaaatggaccgtgtttaaatgaatgcttcccttggatgggatgttcagcaatagcaaaaaaaaaaaaaaaaaagttatcaataactgagatttcctgtggccccacttctgcatctgtactaccgagatgcatttggctactgagtttgtagcagtcagaacagcattcttccgggttcattaacttaatttttctcaataaaatattcataccctggaaaataaacataactgactactaaagataatttgagataaataaaagacccaatttaaatagttattcaggatagaaaaatttcatgaaagaggggaaaaacatagagagactatctttgactatcatacttaaaaagcatctattactaaattgaatgtcaaacttttctttaa

SEQ ID NO: 9584 - DNA, 837 bp, Homo sapiens
cacaccttccttctcttaattttgctttcccacccaccaagaaatttgtaagtcaaaatttatttccatgagtaactatttctaaatgattggaaatttttgaaaaagtggtatggtttatatacctaatctgcttatctgctataagtcatatgagaacaacagctaggatgattgtccaagcagctttagatgtgtttagggccaggcaaaaggtttgcttgttttttctttttgcttaagatctgggagattagcaaatttctcaagactatagactgaactgtaatttttaccaactcttgctcatgagcctcaaaatgaatatatccttgaataaagtataaatatttcaatagatacatctctctattatccattttcacaattataaaagcatcagcaaaattgtggatatgtgttccagtcactcatggatccatggaaatggaccgtgtttaaatgaatgcttcccttggatgggatgttcagcaatagcaaaaaaaaaaaaaaaaaagttatcaataactgagatttcctgtggccccacttctgcatctgtactaccgagatgcatttggctactgagtttgtagcagtcagaacagcattcttccgggttcattaacttaatttttctcaataaaatattcataccctggaaaataaacataactgactactaaagataatttgagataaataaaagacccaatttaaatagttattcaggatagaaaaatttcatgaaagaggggaaaaacatagagagactatctttgactatcatacttaaaaagcatctattactaaattgaatgtcaaacttttctttaa

SEQ ID NO: 9585 - DNA, 458 bp, Homo sapiens
gaaaattccatcagctgaatgttgaaaaataactatttccttaggaggataatggtgttacctgaccgttgaaggagaaatataatagatgtgaccatatccaaaaaggtcactgaaaagatatcttaaggaaaaaaaaatggactaggtgcagtggctcacgcctgtaatcccagcattttgggaggctgagatgggtggatcacttgagcccaggggttggagaccagcctaggcaacatagcaaaatcccatctctataaaaaacgcaaacaatcagccaggaatagtggcagacaccagtagtcccagatacctggaaggctgaggtggaaggatcacctgagcccaggacattgaggttacagtgagccttgaccatgccactgcactgcagcctgggaaaagagcgagactttgtcttgaaacaaaaaggaaaaaaaagaagtattattaat

SEQ ID NO: 9586 - DNA, 401 bp, Homo sapiens
tttatcagtttctcatccaattctgaactttattaaaggacattaatcatagagaccatttactcttttgaggttgctgactagatgtctgtggaactatatgaatctactaagacaaacacacgtctataagagagtgaggcaaatagttggttatggctgctaatacgcttctgaaaggcaattttaaagaagataaaatgtgttttgtgcaatcaatgtcagtgaaatcagttgaattttccaaagcaattgctctaaaagacaacactcatctgttttgctggatatttgatttgtttttgtggtcgttgtttaaatccatttctactcttttaaagttataacttattggtatatggttcattcttcaccaatgcagatatattgagaagaatgga

SEQ ID NO: 9587 - DNA, 600 bp, Homo sapiens
tcccttctcagcctcttttttcatgctaacaggcataaatgaaatgataaaagtttgagctcttctcgtggaattctcgtgatacagatatgtgctacatgttcatcatctcgttggtcttcaccatgataactgtggagtaagaattataagcaggtcacagattagggacttgagattgacagtttggcttccctgttctgggtggcaaagcctgtggagtactcacctacctgctgcatgaaggcagcatggagggactgtggtggattatctgcaaagatggccaaaattctctcatccctgcaggcacatacaagatgccagaatcagtcaaaactaagctcactgtccttgctaatattctgccccagagaagaactgaagctcagctcttcaccctacagaaagcctgaattttgtaaatgttctgcttagaatgaggaagaaagatgaagaatgaggaggaagaagggaggaacgagagagaggtaaagccaacaagcagaacagacctacatttgcagcatctccaagtttctgcaacagcattatgttgttgttatgttttgttttaataaaagcacataccatttaaaa

SEQ ID NO: 9588 - DNA, 544 bp, Homo sapiens
tcccttctcagcctcttttttcatgctaacaggcataaatgaaatgataaaagtttgagctcttctcgtggaattctcgtgatacagatatgtgctacatgttcatcatctcgttggtcttcaccatgataactgtggagtaagaattataagcaggtcacagattagggacttgagattgacagtttggcttccctgttctgggtggcaaagcctgtggagtactcacctacctgctgcatgaaggcagcatggagggactgtggtggattatctgcaaagatggccaaaattctctcatccctgcaggcacatacaagaagaactgaagctcagctcttcaccctacagaaagcctgaattttgtaaatgttctgcttagaatgaggaagaaagatgaagaatgaggaggaagaagggaggaacgagagagaggtaaagccaacaagcagaacagacctacatttgcagcatctccaagtttctgcaacagcattatgttgttgttatgttttgttttaataaaagcacataccatttaaaa

SEQ ID NO: 9589 - DNA, 326 bp, Homo sapiens
caatccagttttcttacgtcaatactttggtttttgctttgtgaagatgccagaatcagtcaaaactaagctcactgtccttgctaatattctgccccagagaagaactgaagctcagctcttcaccctacagaaagcctgaattttgtaaatgttctgcttagaatgaggaagaaagatgaagaatgaggaggaagaagggaggaacgagagagaggtaaagccaacaagcagaacagacctacatttgcagcatctccaagtttctgcaacagcattatgttgttgttatgttttgttttaataaaagcacataccatttaaaa

SEQ ID NO: 9590 - DNA, 314 bp, Homo sapiens
tcccttctcagcctcttttttcatgctaacaggcataaatgaaatgataaaagtttgagctcttctcgtggaattctcgtgatacagatatgtgctacatgttcatcatctcgttggtcttcaccatgataactgtggagtaagaattataaaatgaggaagaaagatgaagaatgaggaggaagaagggaggaacgagagagaggtaaagccaacaagcagaacagacctacatttgcagcatctccaagtttctgcaacagcattatgttgttgttatgttttgttttaataaaagcacataccatttaaaa

SEQ ID NO: 9591 - DNA, 675 bp, Homo sapiens
tcccttctcagcctcttttttcatgctaacaggcataaatgaaatgataaaagtttgagctcttctcgtggaattctcgtgatacagatatgtgctacatgttcatcatctcgttggtcttcaccatgataactgtggagtaagaattataagcaggtcacagattagggacttgagattgacagtttggcttccctgttctgggtggcaaagcctgtggagtactcacctacctgctgcatgaaggcagcatggagggactgtggtggattatctgcaaagatggccaaaattctctcatccctgcaggcacatacaaggtaagaacacctttaccagtggaatgtgatgaaaatgctgcccagacaattctagacagggccttaagaggtctagatgcttccacatttgctttcttgggagctctgagttatcatgtgagaaccaccagtctccccaacctgcaccctaagctcattatccacaaggctgtgcaaaataataaatcactgttgttaggacgcaaagtttggtagtggtttgttatgtagtcgtggataactgcagcagggatctcagcaacttttcttctctgaactaatgtttaaagtcaggatgtaacatattgtctccatgtgactttgttgaactaaataaagaatgctaataccagat

SEQ ID NO: 9592 - DNA, 2016 bp, Homo sapiens
tggatttggtgattctacaaaaaaagacactgaggttgagaccttgaagcatgacactgctgcagtcgatcgttccgtcaagcgtcttttcaaagttcggagtgatcttgattttgctgagcaactgtggtgcaaaatgagcagtagtgtgatttcataccaagacttggtgaagtgtttcacattgatcatccagagtctacaacgtggtgatatacagccatggctccatagtggaagtaacagtttactaagtaagctcattcatcagtcttatcatggaaccatggacacagtttctctcagtgggactattccagttcaaatgcttttggaaattggtttggacaaactaaagaaagattatatcagttttttcataggtcaggaacttgcatctttgaatcatttggaatacttcattgctccatcagtagatatacaagaacaggtttatcgtgtccaaaaactccaccatattctagaaatattagtcagttgcatgcctttcattaaatctcaacatgaactcctcttttctttaacacagatctgcataaagtattacaaacaaaatcctcttgatgagcaacacatttttcagctgccagtcagaccaactgctgtaaagaacttatatcaaagtgagaagccacagaaatggagagtggaaatatatagtggtcaaaagaagattaagacagtttggcaactgagtgacagctcacccatagaccatctgaattttcacaaacctgatttttcggaattaacactaaacggtagcctggaagaaaggatattctttactaacatggttacctgcagccaggtgcatttcaagtgaagtgtgctgatgaagtcctctataagcacaagccaaaaagagaaagagaaaaaaaggtaattattgtagaacctgaaaacagcaatgtatggaaaccctcaaagcagaaaagggaggaagatcctgaagattctcttatgaagctccaaaattgataatcctgtctcagctctgcctcctcaggaggagcattagtagaacagcagtgatgaggacacagagggagcagacagtgggtaccacgatctccgtaaccatttgcatgtgacttagcaagggctctgaaatgacaaagagaacgagcaccacaaatgagaacaggatcattttagtaaatacagctttatcccaaaagctttaactgtattgggaaaacttaaaaaatagcatcctcaaattttctgattcttatttgccatgaaatagaacttagtaaattaaatgttatttgaaaatgttataagagctttgtaaatatttcagaaaatatgggataaatgcctgaatttggttcttctacaggtgctataataaagtccatctctcaatacttatactttctaaattcatctcagaatattagcagccatattccacagttcctataatttttactgggggggatttgtgataggaaagtccttgggaaacatttccaatctttcaaaatattattgtgtatcttaagaagtataggaacttgtatgttgaaatgttgtatggtagttcttgtatagttaaataataatctttttaagagttaatgataagcatatgttatgtgcattattaataaaatagtggccacttaggtaatacccacttttatcttgtgtgctgggtactctggttactgagataaataaggcactggacatcctcacgtggagttcacaggctcatcagtgaattctgtaccacatttcaaccttgtttattttagtttaatggaatatacattcttagtattgcctgattatttaaatttgttgagggggattgcatgttgctttattggcctgtaaaaatagctagtttggtaagatttggtctcgcaccttccatctttgctaccacattaaagatgagcttgttaaaaaggaaagcatatttctctgattgcccttatggagaaataaagataaaattcaaagaaacaaaaaaaaagt

SEQ ID NO: 9593 - DNA, 1161 bp, Homo sapiens
ccttgctatattaatttcattactgtgtttaattgcacccttgccaaaatatttagcatgtgaaaaggttttttttaaaaaatatgtaatgccttcatattgaagctggttactgtacgcaagttgagtgccagacctctagtacgccgtatgttacatgaaactactgccaaaatcttagtaagattgttgttgaaaagattgttgtcttaagcattaatattgaatttatatagaagttaaatgtagatgataatgacatcattgatcttcctgtgtccgtattttcctacaatttggtgccttgtatctgttgctgattcacttttaccactagtgtaaaaataagtgaaaaaatatttttactttacatttttatatatcagagtaacataaattataaatttgtgtctcaaaaccacctgtgatggaggatgtgctaattgtaatgtcataggtacaaagtattttggcatgatgaaaagctcaatagctattgtttttcaatagcagattttatctcggctaccttcaatcacaagtaaaattataaagataaaaaacatctacataaacatgttggctgccaaattttttgcattggaaatactggaatctctcattaaagttcttggaacattatagtgatgccatgttagattaccttggagcttcataactttagctttttcctaaaaatatatgtttatgctgataaaaactattacatttatgggatattttgtatccatatagagtttttcagaattgttcattaaaatgctttttataagcttatattatttgtagaatatggcaaaagcatttacagctcatcatgtatctatctgctcctgttcacttccaaacctcttgtagttaggcaatgccatttgactacttcaagcagagggattgtaaacagaagtgattttctatttccatgttggactgtaaaaagttctgcatgaccctccagttttcttttgcctgtcatggtgacctgaaagcaagatgttccaaatggcatacttacaagacggatgcaacctgggtccttaggtcgctgtttagaagggacctgactggagtgctgatggacttgcagtaaactttttaagtgtaagaaataaactgttatgtgttaaaccactgtgaatt

SEQ ID NO: 9594 - DNA, 430 bp, Homo sapiens
taggtactattatagccccattttataagatgagggaaaactgagggttttgaagaatttaaagtaagcttgcccccaaggtcaccccagctagtgaatgggcagagtgggatttgaattcaatatagtcatgatccccctactgccctacttgaaaggggcagggatggggtttgggagcagagagaaacaacaacaacaacaaaaaactccacccccaaattgctctttctgccaaagcatctcctgctattgactgccaacctgaacacttagtcacaggacagctctgggtatgtctcttggggctaaatgtctcctttagggctaactgcttctcctgtggggactgtgttaaagtttatcttctgcctcccctcccaggagtttccacacctgctgcagctttaaataggaatcttaattattt

SEQ ID NO: 9595 - DNA, 549 bp, Homo sapiens
attcttttatttagtagctgtttattgagcatctactcagtgcttgacacatagactaaatgagattctgtcaaggactggtgccatgtttttaagaacatggaatgctgtgagctaagagcttactttttttttttttttagaatttattcacacatttttagatattgtacccatgactctataattttgtcttcccacttctctaatatcaaaatttttttaaactgtcaattaaacaaaaagttttaggtcctactaaggcttctagcttttgcccttgaaaccaggcctaagtacagctatacgtgctccttgccacctccctaagttttcttgaaaaagctctaggtgcagatgaactgaaaaaaacaaaaaaagttggttaaagaggaaaaatcagcaaaacaaactactttgcataacacttatattttctacataatattaagatatgctataaatagcaaagattataattcttaagttctttttaaagaacaaaatacgctcataataatcagagcaaaaataaactaaaatatatgt

SEQ ID NO: 9596 - DNA, 528 bp, Homo sapiens
acttcttaactgctgtcgacaccaaagcacttccatagatgtcccaactatcccctagatgattgtgttgtcctcattaagaatgacctctagtcatacaggaaaacatttttctgttttatcattcactcttcttttttttttcttgcttattattcactactttagcacagccttttagtctaaaagacaaagatttacttggcctttagacaattcctatatgtctttaaatttcttatttcctcaccactcttattattgatgttttcttttccataagtgttaggacagtgccttggtacatagtagatactcaattagtatttgttgaatgaaggaaacttaactgtaggctttttcttcttgccactttctgctttttgtacctgttgaaaatgatggaggtaccagtgttcataaaaaccttgaaaacaggctgggtgcagtggctcatgcctgtaatcccagcactttgggaaggcgaggcaggcagatcactcgaggtcaggagttcaagaccaacct

SEQ ID NO: 9597 - DNA, 2977 bp, Homo sapiens
gggtagctggagatttccatcatggcggcgtccatttcgggctacaccttcagtgctgtgtgtttccacagcgccaacagcaacgcggaccacgaaggatttttactgggagaggtaagacaagaggaaacgtttagcatcagtgactcacaaatcagcaacacagaatttctgcaagtaattgaaatccataaccatcagccttgttcaaaactttttagtttttatgactacgcaagcaaagtgaatgaggagagtttggacaggattcttaaagatcggagaaagaaagtcattgggtggtacagattccggcgcaatacgcagcagcagatgtcctacagagagcaggttcttcacaagcagctcacccgcatcctcggcgtgcccgacctcgtctttcttctcttcagcttcatctccactgccaacaattccactcacgctttagaatatgtgctcttcagaccaaatagaaggtataatcagaggatatcactcgctattcccaatctaggaaatactagccagcaagagtacaaagtgtcttcagtgccaaatacttctcagagttatgccaaagtgattaaagaacatggtactgacttttttgacaaggatggagtgatgaaagacatcagggcgatttatcaggtttataatgcacttcaggagaaagttcaggcagtgtgtgcagatgttgaaaagagtgagcgagttgttgaatcttgtcaggcagaagtgaacaaattaagaagacaaatcactcagaggaaaaatgaaaaggaacaagaaagaagattgcagcaggcagtgttaagcagacagatgccgtctgaaagcttggacccagcgttcagtcctcggatgccgtcctctgggtttgcagctgaaggcagaagtacacttggagatgcagaggcctcggatcctcctcccccttactctgattttcacccaaacaatcaagaaagtactttgagccactctcgcatggaaaggagtgtctttatgcctcgacctcaagctgtgggctcttccaattatgcttccaccagtgccggactgaagtatcctggaagtggggctgaccttcctcctccccaaagagcagctggagacagtggtgaggattcagacgacagtgattatgaaaatttgattgaccctacagagccttctaatagtgaatactcacattcaaaggattctcgacccatggcacatcccgacgaggaccccaggaacactcagacctcccagatttaactaaacaaaagaaactctccacctagcactgtttttcttcattgcttactgagagggtttttgagaacttaatctggggggagaactgctttctcagataccttaactcccgagaagagagtccttgtgcacagaacttgtgggagcctccatccgctgctctttacctttggatacagtgtgcaagtttcatgacagaatcattaagataatcaaattgtcctaattctggtgcgattcatggatatactggtaaatttaggcaaagtgaaacttatcagcgtagtttctgttctttaaaataaattggaaattagagactaagcacaattagtctataaatgttctataaatcaaaaacttacctcttgcactatcatgccttgaaatttactttttcaaagggaaacaagtttagcagcagccttcaaagaacttctttctatgatgagccaaattcatctttgccagaaaagaaattttgataattccaagaagcctgattagaacaaatcagatataccttctcttgtctgcatgactttgtgagataaaagagagggcttccaacttttttctactagcttgatatgtattatcacttaaaatggttgcctttaaaaaaaaaaagtagagatactaattaccagtaagtaatcatccaaataaatacgtcataaaataaattaattattttttctttgatggattacagtgactactgtgttgcactggcacatttatggtctctgttctggaatcttggaggacacacagcagtggagaacagaaggagtgagttttataatgaacagattccagacacggtaggtttagctgagttcatacagaggagatataactcatttagatcttctgacaaatcctagtgttagttttatctgtggaggaaagacatttaataataaactgtttgggaatcttggtgaataaagattcattttcaagctgaataaccatacttattttattttaagttgccatttggggaataattgcagtatgtgtagagactctcttgggatgcacttatatttttatttaatgactacttgttttctagttttgcccacaacgtctgaaaccactaagacattcaggagcatgttgagcttctggtttggaaacagcaagacccaccatttatgacaaggacagccatgaggttaatacttggagtttaactgccttccctttgaactagttaaaatctgtaagaataaggaagttgttgaaggcttaaaatctgggttctgaaaaagtagtttcagtttataggatacacatttactcactgagctccagttccaatactaaattagacagtatcatatagacggaaaatgaaatgctagaactgccgttctttggatcgccactctatgggggtctgtcttttaactactctcctggttatgttggccttacaccactgccatttgatttaaaacgctgcagacactttatctgcaaatgtgttccagttgttatcagctacctactacgcagcttcagcgccagtgtgaatttatttttttttaagtgccattaccgtctcctctgttcagattttgacattcaggaaaatatttttattttgatgccatactgaaatctacaatgtatatctgacaaagcagttaaatgtgacaataaaaaacttatttaatcatggtaaaaaaaaaaa

SEQ ID NO: 9598 - DNA, 460 bp, Homo sapiens
tagatctccctactgtatcctagtgttagttttatctgtggaggaaagacatttaataataaactgtttgggaatcttggtgaataaagattcattttccagctgaataaccatacttattttattttaagttgccatttggggaataattgcagtatgtgtagagactctcttgggatgcacttatatttttatttaatgactacttgttttctagttttgcccacaacgtctgaaaccactaagacattcaggagcatgttgagcttctggtttggaaacagcaagacccaccatttatgacaaggacagccatgaggttaatacttggagtttaactgccttccctttgaactagttaaaatctgtaagaataaggaagttgttgaaggcttaaaatctggcttctgccaaagtagttcccgtttataggataccctactcactgagctccagttcc

SEQ ID NO: 9599 - DNA, 3224 bp, Homo sapiens
gggtagctggagatttccatcatggcggcgtccatttcgggctacaccttcagtgctgtgtgtttccacagcgccaacagcaacgcggaccacgaaggatttttactgggagaggtaagacaagaggaaacgtttagcatcagtgactcacaaatcagcaacacagaatttctgcaagtaattgttctaggagtagcagggagaaggcagcaacagaagtgtccttagttaatgaggtgatgcagtaacaagtattggaaagaatgaaagcaggaaggagaagaaatgttcaacgcacccaacagaaagagaagcaagaacaacagtaccacacagcagggatttgtaaagaaatgtgtgccgagaggcgatgtgtacatgagcaggtgtctactgtgttgttgaggcacaagaaactctggaaattccagaaatccataaccatcagccttgttcaaaactttttagtttttatgactacgcaagcaaagtgaatgaggagagtttggacaggattcttaaagatcggagaaagaaagtcattgggtggtacagattccggcgcaatacgcagcagcagatgtcctacagagagcaggttcttcacaagcagctcacccgcatcctcggcgtgcccgacctcgtctttcttctcttcagcttcatctccactgccaacaattccactcacgctttagaatatgtgctcttcagaccaaatagaaggtataatcagaggatatcactcgctattcccaatctaggaaatactagccagcaagagtacaaagtgtcttcagtgccaaatacttctcagagttatgccaaagtgattaaagaacatggtactgacttttttgacaaggatggagtgatgaaagacatcagggcgatttatcaggtttataatgcacttcaggagaaagttcaggcagtgtgtgcagatgttgaaaagagtgagcgagttgttgaatcttgtcaggcagaagtgaacaaattaagaagacaaatcactcagaggaaaaatgaaaaggaacaagaaagaagattgcagcaggcagtgttaagcagacagatgccgtctgaaagcttggacccagcgttcagtcctcggatgccgtcctctgggtttgcagctgaaggcagaagtacacttggagatgcagaggcctcggatcctcctcccccttactctgattttcacccaaacaatcaagaaagtactttgagccactctcgcatggaaaggagtgtctttatgcctcgacctcaagctgtgggctcttccaattatgcttccaccagtgccggactgaagtatcctggaagtggggctgaccttcctcctccccaaagagcagctggagacagtggtgaggattcagacgacagtgattatgaaaatttgattgaccctacagagccttctaatagtgaatactcacattcaaaggattctcgacccatggcacatcccgacgaggaccccaggaacactcagacctcccagatttaactaaacaaaagaaactctccacctagcactgtttttcttcattgcttactgagagggtttttgagaacttaatctggggggagaactgctttctcagataccttaactcccgagaagagagtccttgtgcacagaacttgtgggagcctccatccgctgctctttacctttggatacagtgtgcaagtttcatgacagaatcattaagataatcaaattgtcctaattctggtgcgattcatggatatactggtaaatttaggcaaagtgaaacttatcagcgtagtttctgttctttaaaataaattggaaattagagactaagcacaattagtctataaatgttctataaatcaaaaacttacctcttgcactatcatgccttgaaatttactttttcaaagggaaacaagtttagcagcagccttcaaagaacttctttctatgatgagccaaattcatctttgccagaaaagaaattttgataattccaagaagcctgattagaacaaatcagatataccttctcttgtctgcatgactttgtgagataaaagagagggcttccaacttttttctactagcttgatatgtattatcacttaaaatggttgcctttaaaaaaaaaaagtagagatactaattaccagtaagtaatcatccaaataaatacgtcataaaataaattaattattttttctttgatggattacagtgactactgtgttgcactggcacatttatggtctctgttctggaatcttggaggacacacagcagtggagaacagaaggagtgagttttataatgaacagattccagacacggtaggtttagctgagttcatacagaggagatataactcatttagatcttctgacaaatcctagtgttagttttatctgtggaggaaagacatttaataataaactgtttgggaatcttggtgaataaagattcattttcaagctgaataaccatacttattttattttaagttgccatttggggaataattgcagtatgtgtagagactctcttgggatgcacttatatttttatttaatgactacttgttttctagttttgcccacaacgtctgaaaccactaagacattcaggagcatgttgagcttctggtttggaaacagcaagacccaccatttatgacaaggacagccatgaggttaatacttggagtttaactgccttccctttgaactagttaaaatctgtaagaataaggaagttgttgaaggcttaaaatctgggttctgaaaaagtagtttcagtttataggatacacatttactcactgagctccagttccaatactaaattagacagtatcatatagacggaaaatgaaatgctagaactgccgttctttggatcgccactctatgggggtctgtcttttaactactctcctggttatgttggccttacaccactgccatttgatttaaaacgctgcagacactttatctgcaaatgtgttccagttgttatcagctacctactacgcagcttcagcgccagtgtgaatttatttttttttaagtgccattaccgtctcctctgttcagattttgacattcaggaaaatatttttattttgatgccatactgaaatctacaatgtatatctgacaaagcagttaaatgtgacaataaaaaacttatttaatcatggtaaaaaaaaaaa

SEQ ID NO: 9600 - DNA, 2241 bp, Homo sapiens
gggtagctggagatttccatcatggcggcgtccatttcgggctacaccttcagtgctgtgtgtttccacagcgccaacagcaacgcggaccacgaaggatttttactgggagaggtaagacaagaggaaacgtttagcatcagtgactcacaaatcagcaacacagaatttctgcaagtaattgaaatccataaccatcagccttgttcaaaactttttagtttttatgactacgcaagcaaagtgaatgaggagagtttggacaggattcttaaagatcggagaaagaaagtcattgggtggtacagattccggcgcaatacgcagcagcagatgtcctacagagagcaggttcttcacaagcagctcacccgcatcctcggcgtgcccgacctcgtctttcttctcttcagcttcatctccactgccaacaattccactcacgctttagaatatgtgctcttcagaccaaatagaaggtataatcagaggatatcactcgctattcccaatctaggaaatactagccagcaagagtacaaagtgtcttcagtgccaaatacttctcagagttatgccaaagtgattaaagaacatggtactgacttttttgacaaggatggagtgatgaaagacatcagggcgatttatcaggtttataatgcacttcaggagaaagttcaggcagtgtgtgcagatgttgaaaagagtgagcgagttgttgaatcttgtcaggcagaagtgaacaaattaagaagacaaatcactcagaggaaaaatgaaaaggaacaagaaagaagattgcagcaggcagtgttaagcagacagatgccgtctgaaagcttggacccagcgttcagtcctcggatgccgtcctctgggtttgcagctgaaggcagaagtacacttggagatgcagaggcctcggatcctcctcccccttactctgattttcacccaaacaatcaagaaagtactttgagccactctcgcatggaaaggagtgtctttatgcctcgacctcaagctgtgggctcttccaattatgcttccaccagtgccggactgaagtatcctggaagtggggctgaccttcctcctccccaaagagcagctggagacagtggtgaggattcagacgacagtgattatgaaaatttgattgaccctacagagccttctaatagtgaatactcacattcaaaggattctcgacccatggcacatcccgacgaggaccccaggaacactcagacctcccagatttaactaaacaaaagaaactctccacctagcactgtttttcttcattgcttactgagagggtttttgagaacttaatctggggggagaactgctttctcagataccttaactcccgagaagagagtccttgtgcacagaacttgtgggagcctccatccgctgctctttacctttggatacagtgtgcaagtttcatgacagaatcattaagataatcaaattgtcctaattctggtgcgattcatggatatactggtaaatttaggcaaagtgaaacttatcagcgtagtttctgttctttaaaataaattggaaattagagactaagcacaattagtctataaatgttctataaatcaaaaacttacctcttgcactatcatgccttgaaatttactttttcaaagggaaacaagtttagcagcagccttcaaagaacttctttctatgatgagccaaattcatctttgccagaaaagaaattttgataattccaagaagcctgattagaacaaatcagatataccttctcttgtctgcatgactttgtgagataaaagagagggcttccaacttttttctactagcttgatatgtattatcacttaaaatggttgcctttaaaaaaaaaaagtagagatactaattaccagtaagtaatcatccaaataaatacgtcataaaataaattaattattttttctttgatggattacagtgactactgtgttgcactggcacatttatggtctctgttctggaatcttggaggacacacagcagtggagaacagaaggagtgagttttataatgaacagattccagacacggtaggtttagctgagttcatacagaggagatataactcatttagatcttctgacaaatcctagtgttagttttatctgtggaggaaagacatttaataataaactgtttgggaatcttggtgaataaagattcattttcaagctg

SEQ ID NO: 9601 - DNA, 225 bp, Homo sapiens
tgggaggctgaagtacgagaatcgcttgaatgtgggaggcggaggttgcagtgagtcgagatcgtgccactgcactccagcctgggcgacaaagcgagactccatctcaacaacaacaaaaaagaatatcacattttgaacatgaaatgtctgcatcttgttttgaatatgtatgaattgaaaaagctgtgctaactcacttgaagcagagctgtctacccttag

SEQ ID NO: 9602 - DNA, 349 bp, Homo sapiens
caagaaagtactttgagccactctcgcatggaaaggagtgtctttatgcctcgacctcaagctgtgggctcttccaattatgcttccaccagtgccggactgaagtatcctggaagtggggctgaccttcctcctccccaaagagcagctggagacagtggtgaggattcagacgacagtgattatgaaaatttgattgaccaaatcagatataccttctcttgtctgcatgactttgtgagataaaagagagggcttccaacttttttctactagcttgatatgtattatcacttaaaatggttgcctttaaaaaaaaaaagtagagatactaattaccagtaagtaa

SEQ ID NO: 9603 - DNA, 2778 bp, Homo sapiens
tagacgctcgggcaccagccgcggcaaggatggagctgggttgctggacgcagttggggctcacttttcttcagctccttctcatctcgtccttgccaagagagtacacagtcattaatgaagcctgccctggagcagagtggaatatcatgtgtcgggagtgctgtgaatatgatcagattgagtgcgtctgccccggaaagagggaagtcgtgggttataccatcccttgctgcaggaatgaggagaatgagtgtgactcctgcctgatccacccaggttgtaccatctttgaaaactgcaagagctgccgaaatggctcatgggggggtaccttggatgacttctatgtgaaggggttctactgtgcagagtgccgagcaggctggtacggaggagactgcatgcgatgtggccaggttctgcgagccccaaagggtcagattttgttggaaagctatcccctaaatgctcactgtgaatggaccattcatgctaaacctgggtttgtcatccaactaagatttgtcatgttgagcctggagtttgactacatgtgccagtatgactatgttgaggttcgtgatggagacaaccgcgatggccagatcatcaagcgtgtctgtggcaacgagcggccagctcctatccagagcataggatcctcactccacgtcctcttccactccgatggctccaagaattttgacggtttccatgccatttatgaggagatcacagcatgctcctcatccccttgtttccatgacggcacgtgcgtccttgacaaggctggatcttacaagtgtgcctgcttggcaggctatactgggcagcgctgtgaaaatcttctggaggctgggaagtccaagatcaaggcgtcagaagattcattgtctgtccttgaagaaagaaactgctcagaccctgggggcccagtcaatgggtaccagaaaataacagggggccctgggcttatcaacggacgccatgctaaaattggcaccgtggtgtctttcttttgtaacaactcctatgttcttagtggcaatgagaaaagaacttgccagcagaatggagagtggtcagggaaacagcccatctgcataaaagcctgccgagaaccaaagatttcagacctggtgagaaggagagttcttccgatgcaggttcagtcaagggagacaccattacaccagctatactcagcggccttcagcaagcagaaactgcagagtgcccctaccaagaagccagcccttccctttggagatctgcccatgggataccaacatctgcatacccagctccagtatgagtgcatctcacccttctaccgccgcctgggcagcagcaggaggacatgtctgaggactgggaagtggagtgggcgggcaccatcctgcatccctatctgcgggaaaattgagaacatcactgctccaaagacccaagggttgcgctggccgtggcaggcagccatctacaggaggaccagcggggtgcatgacggcagcctacacaagggagcgtggttcctagtctgcagcggtgccctggtgaatgagcgcactgtggtggtggctgcccactgtgttactgacctggggaaggtcaccatgatcaagacagcagacctgaaagttgttttggggaaattctaccgggatgatgaccgggatgagaagaccatccagagcctacagatttctgctatcattctgcatcccaactatgaccccatcctgcttgatgctgacatcgccatcctgaagctcctagacaaggcccgtatcagcacccgagtccagcccatctgcctcgctgccagtcgggatctcagcacttccttccaggagtcccacatcactgtggctggctggaatgtcctggcagacgtgaggagccctggcttcaagaacgacacactgcgctctggggtggtcagtgtggtggactcgctgctgtgtgaggagcagcatgaggaccatggcatcccagtgagtgtcactgataacatgttctgtgccagctgggaacccactgccccttctgatatctgcactgcagagacaggaggcatcgcggctgtgtccttcccgggacgagcatctcctgagccacgctggcatctgatgggactggtcagctggagctatgataaaacatgcagccacaggctctccactgccttcaccaaggtgctgccttttaaagactggattgaaagaaatatgaaatgaaccatgctcatgcactccttgagaagtgtttctgtatatccgtctgtacgtgtgtcattgcgtgaagcagtgtgggcctgaagtgtgatttggcctgtgaacttggctgtgccagggcttctgacttcagggacaaaactcagtgaagggtgagtagacctccattgctggtaggctgatgccgcgtccactactaggacagccaattggaagatgccagggcttgcaagaagtaagtttcttcaaagaagaccatatacaaaacctctccactccactgacctggtggtcttccccaactttcagttatacgaatgccatcagcttgaccagggaagatctgggcttcatgaggccccttttgaggctctcaagttctagagagctgcctgtgggacagcccagggcagcagagctgggatgtggtgcatgcctttgtgtacatggccacagtacagtctggtccttttccttccccatctcttgtacacattttaataaaataagggttggcttctgaactacaaaaaaaaag

SEQ ID NO: 9604 - DNA, 2727 bp, Homo sapiens
tagacgctcgggcaccagccgcggcaaggatggagctgggttgctggacgcagttggggctcacttttcttcagctccttctcatctcgtccttgccaagagagtacacagtcattaatgaagcctgccctggagcagagtggaatatcatgtgtcgggagtgctgtgaatatgatcagattgagtgcgtctgccccggaaagagggaagtcgtgggttataccatcccttgctgcaggaatgaggagaatgagtgtgactcctgcctgatccacccaggttgtaccatctttgaaaactgcaagagctgccgaaatggctcatgggggggtaccttggatgacttctatgtgaaggggttctactgtgcagagtgccgagcaggctggtacggaggagactgcatgcgatgtggccaggttctgcgagccccaaagggtcagattttgttggaaagctatcccctaaatgctcactgtgaatggaccattcatgctaaacctgggtttgtcatccaactaagatttgtcatgttgagcctggagtttgactacatgtgccagtatgactatgttgaggttcgtgatggagacaaccgcgatggccagatcatcaagcgtgtctgtggcaacgagcggccagctcctatccagagcataggatcctcactccacgtcctcttccactccgatggctccaagaattttgacggtttccatgccatttatgaggagatcacagcatgctcctcatccccttgtttccatgacggcacgtgcgtccttgacaaggctggatcttacaagtgtgcctgcttggcaggctatactgggcagcgctgtgaaaatctccttgaagaaagaaactgctcagaccctgggggcccagtcaatgggtaccagaaaataacagggggccctgggcttatcaacggacgccatgctaaaattggcaccgtggtgtctttcttttgtaacaactcctatgttcttagtggcaatgagaaaagaacttgccagcagaatggagagtggtcagggaaacagcccatctgcataaaagcctgccgagaaccaaagatttcagacctggtgagaaggagagttcttccgatgcaggttcagtcaagggagacaccattacaccagctatactcagcggccttcagcaagcagaaactgcagagtgcccctaccaagaagccagcccttccctttggagatctgcccatgggataccaacatctgcatacccagctccagtatgagtgcatctcacccttctaccgccgcctgggcagcagcaggaggacatgtctgaggactgggaagtggagtgggcgggcaccatcctgcatccctatctgcgggaaaattgagaacatcactgctccaaagacccaagggttgcgctggccgtggcaggcagccatctacaggaggaccagcggggtgcatgacggcagcctacacaagggagcgtggttcctagtctgcagcggtgccctggtgaatgagcgcactgtggtggtggctgcccactgtgttactgacctggggaaggtcaccatgatcaagacagcagacctgaaagttgttttggggaaattctaccgggatgatgaccgggatgagaagaccatccagagcctacagatttctgctatcattctgcatcccaactatgaccccatcctgcttgatgctgacatcgccatcctgaagctcctagacaaggcccgtatcagcacccgagtccagcccatctgcctcgctgccagtcgggatctcagcacttccttccaggagtcccacatcactgtggctggctggaatgtcctggcagacgtgaggagccctggcttcaagaacgacacactgcgctctggggtggtcagtgtggtggactcgctgctgtgtgaggagcagcatgaggaccatggcatcccagtgagtgtcactgataacatgttctgtgccagctgggaacccactgccccttctgatatctgcactgcagagacaggaggcatcgcggctgtgtccttcccgggacgagcatctcctgagccacgctggcatctgatgggactggtcagctggagctatgataaaacatgcagccacaggctctccactgccttcaccaaggtgctgccttttaaagactggattgaaagaaatatgaaatgaaccatgctcatgcactccttgagaagtgtttctgtatatccgtctgtacgtgtgtcattgcgtgaagcagtgtgggcctgaagtgtgatttggcctgtgaacttggctgtgccagggcttctgacttcagggacaaaactcagtgaagggtgagtagacctccattgctggtaggctgatgccgcgtccactactaggacagccaattggaagatgccagggcttgcaagaagtaagtttcttcaaagaagaccatatacaaaacctctccactccactgacctggtggtcttccccaactttcagttatacgaatgccatcagcttgaccagggaagatctgggcttcatgaggccccttttgaggctctcaagttctagagagctgcctgtgggacagcccagggcagcagagctgggatgtggtgcatgcctttgtgtacatggccacagtacagtctggtccttttccttccccatctcttgtacacattttaataaaataagggttggcttctgaactacaaaaaaaaag

SEQ ID NO: 9605 - DNA, 432 bp, Homo sapiens
gctttatatttctcttctccagcttcaggaggatgctccaccattgatgaaggaagggtcaagagtgaagaagggatgctccatgtggcaatgtgacaccaattttccacgacggggaggaaaaagtccagtagttgacaatgaataggatgccacaacctcttgagtgaaaggtaacctgtatggtggactctcaatctctgtatactcataagagatccacaggggaacataaagagagaagtaaaatgtgttcagaagtttaagattctccaaggtttaagctggtcagttgatcagtcaaaggatgaagattcagttttacaagacaagaattaagaagttttacttacatatacgaagttgcattggattacgtttcattaccataaaaatagtcataagactatcaagtagtttaatgataatgta

SEQ ID NO: 9606 - DNA, 392 bp, Homo sapiens
tggcctttacaatccatggaaagacagacatttacttcttatgatgtgattaatgtataattacaaactgtgactgaaaggtgtgtggtgctgcaggtgggctataactaagaaatgggctgggcatggtggctcacgcctgtaaccccagcacttggtgaggccgaggtgagtggattgcttgaggccaggagtttgagaccagcctgaccaacacagtaaaaccccgtcactaataaaaatgcaaaaattagctgggcatgatggtgagtgcctctagtcccagctactcagggggctgaggcaggaggatcacttgaacctgagagatcgaggctgcagtgagtggagattgcaccactgtactccagcctgggtgacagagtgagtga

SEQ ID NO: 9607 - DNA, 310 bp, Homo sapiens
aatatttcagtcacttagttgtttatttcaataaagaaaatatgtaaaaaatgaatgccaatatgaaaatacctctttatttatttactttttgcttccagattgctgatttcagattcaattaccaaagtagaattactcaagtaaacacaaaagaattctagtacagaatgtgttccacaaaaatatgttcagtaaaagacaactccatagattccctacttggagattgagaaaataaattaacatcataaaagtgctgagaacgtgcaatatagaaattctattgttttaaaagccatatatcctt

SEQ ID NO: 9608 - DNA, 334 bp, Homo sapiens
acatgcattgcaacattagtaactaaaagaagctacaagttaaacaaattggctttgccttcacatgctttatcacataattctcctaagtgttagaaaacatcacttttagacaaattatccaggttaacaaaccaatgtatgtattaatcagaaaataacaaaagaaattggtttcattctctagcttatataaccaaaagattaacatttcaaatcctgtattagttcaaccccaggaaaaggtgaaagtcaaacattaatctaagttaaaaaattttgctagaataagtttgatatcagaaccaaaacaatggcaatgtttgttttgtct

SEQ ID NO: 9609 - DNA, 479 bp, Homo sapiens
ctctctaatacatgatctgtttttctcatgtacatttcattctagcatcataaatattattaggtacatctctaaaagattcatatttcttggttgcggttatcttagcagtttgtacttcaaggaaactggaagggtctgttgaacaaaattgtgcaatttttacttaggttagtgcccactgcccatcttcttcaagttcaggtgcggtggctcacgcctgtaatcccagcactttgggaggctgagacaggtggatcatgaggtcaggagttcaagatcagcctggccaacatagtgaaaccctgtctctactgaaaatacaaaactcagctgggtgtggtggtgggcacctgtggtcccagctactcaggaggctgaggcaggagaattgctttaacccaagagatagaggtcgcagtgagccaagatcgtgccactgcattccaccctgggtgacagagcaagactctgccttc

SEQ ID NO: 9610 - DNA, 392 bp, Homo sapiens
taggcttcccataggcaaggatgactttcagaatgttctagaaaaaaggatacttcagggggcccataactgcttgattcaaatctttcctttaaaaacataaaaacaacagttggacttctaaaacacacactgaagacatacgcgctgccacgtaagctctccacatgttcactttgccttcagggaaactgtgtgcacatcaacgtgccctgggaaaggctgcagggctgcactgcgggcagttcagatcctagagcacttgctctggcctgggagcgctgcaggcaactgaagccacacagaccctgctcctgcaagaacttttgtgtgtgtcccatggtgatgtcattagtttgcttattaattatatttatataaacttctaaacc

SEQ ID NO: 9611 - DNA, 1529 bp, Homo sapiens
tttttttagagatgggatcttgctacgttggccaggctggtctcgaactcctggcctgaagtgatccttctgccttggcctcccaaaatgctgagattgtaggcatgagccgccatgcctagcccagcttgtctttttgtttacttaccagtgtttttcagagaacaaaaattttaatttgatgaagtccaattaattaaatttttaaaatagagtgtgatttttttgtcatgtctaagaaactattgtctagtcctaggtcctaattctcctttgttttcttctaaatgttttattattttacatgttaacgtttagatttatgatctattttaagttttttttaagtatgaggtttatgttttttgtttgtgtttaggagcatatggatggatgtctagttgttccagcaccatttgttggaaagactatcctttctctgctgaatttcttttatatctttgtcaggaattagccatattggtatgggtctatttctagactttttattttctcccattgatctgtacatctctccttttgccaataccacataagtcaagatgactatagctttgtaataagtattaaaatctggtaatataattcttccaattttatttttcttttaaaattattttgactattgtatcagtgttacctttccatttaaattttaggattagcttagctacaaaagtcctgctgggattttgattagaattgcattaaatctatagataagtttggggagaattaacatatttatgatcgccttttaatccgtgaacatgacgtgtctctccatttatttgcatgtttagtttctttcttcagcattttatagttttagcatacagatcttgtacatattttcttagatttgtaactattttcttggagctgttgtaaatggtattgtttttctgatttttggtttctacttgttcattgctggtgtatagaaatacagttggcttttgtgtcggctttgtatcccgtgatgcaagtaaagcagtactgaggggaatttatagggctcaatgcctgtgttagaaaaaaaggtctcaaatcagtgacctcagcttccactttaagaaactaggaaaaaaagaccaaattaaaagtgtacacagaaaaggggaaatcatgcaagtaaaacagaaattagacattaggaagagaaaatatagaaaattaattaaccaaaagctggttctttgagaagctcaagaaaattctctttagactgatcaggagaaaagatagattaccaatgtcagaaattaggtagcttcactacagattctacagatattacaacaataataagagactattacgaataacttctaggaatacatttgacaatttagatgaacccatgcagattccttaaaagatacaaattagtttacttaggaagaagtggaaaacctacatagctctatgaaagatgtgttatcacaaagaaaacggtagacataggtagctttagtggtaaatgttgccacgtatttaagggaata

SEQ ID NO: 9612 - DNA, 1130 bp, Homo sapiens
agagagagagagagagagagagagagagagagagagagctctgctgaatttcttttatatctttgtcaggaattagccatattggtatgggtctatttctagactttttattttctcccattgatctgtacatctctccttttgccaataccacataagtcaagatgactatagctttgtaataagtattaaaatctggtaatataattcttccaattttatttttcttttaaaattattttgactattgtatcagtgttacctttccatttaaattttaggattagcttagctacaaaagtcctgctgggattttgattagaattgcattaaatctatagataagtttggggagaattaacatatttatgatcgccttttaatccgtgaacatgacgtgtctctccatttatttgcatgtttagtttctttcttcagcattttatagttttagcatacagatcttgtacatattttcttagatttgtaactattttcttggagctgttgtaaatggtattgtttttctgatttttggtttctacttgttcattgctggtgtatagaaatacagttggcttttgtgtcggctttgtatcccgtgatgcaagtaaagcagtactgaggggaatttatagggctcaatgcctgtgttagaaaaaaaggtctcaaatcagtgacctcagcttccactttaagaaactaggaaaaaaagaccaaattaaaagtgtacacagaaaaggggaaatcatgcaagtaaaacagaaattagacattaggaagagaaaatatagaaaattaattaaccaaaagctggttctttgagaagctcaagaaaattctctttagactgatcaggagaaaagatagattaccaatgtcagaaattaggtagcttcactacagattctacagatattacaacaataataagagactattacgaataacttctaggaatacatttgacaatttagatgaacccatgcagattccttaaaagatacaaattagtttacttaggaagaagtggaaaacctacatagctctatgaaagatgtgttatcacaaagaaaacggtagacataggtagctttagtggtaaatgttgccacgtatttaagggaata

SEQ ID NO: 9613 - DNA, 479 bp, Homo sapiens
gctctttcgctctgacttcctagaaccaaaatgaaaagaaaaccctaactttccatgtctaagtaacaaagaaccagaggctactacctctgaccttttctgtgaggcagatgggaaattggctgtctgcaacaagtaagactgattgctggtcaagtcttcatttgcaaagaagtataactttgtaacttcatcctagcctctgattggttgctttttgcaactcatcagattgtttgcacaggagtgtgacttttgtaacttcacttcagcctctggttggctgctttctgcaaccaatcagactgattgcggctaccatttcagttacatgaggtgagcatgaagtggccgatgggaaaattctggtgggtatttggaccaggaagattctgtatccaggcccctgagctgctgctcaggcccactcccacactgtggagtgtacttttgttttcaataaattcctgctttggttc

SEQ ID NO: 9614 - DNA, 366 bp, Homo sapiens
gactcaaataccttctgcttttaaataagcattgtttttcttggatgaaaaattcatagtagtgatcaagaagaatatattcacttatgtgtgtagaaggtagttaaagagcacctactatgttctacgctctgtgctggctccatgaaaaggacagatacagacatttcctttggagctgagagtagagtgagagttttttaaaataattacccaatggaattatacattctccatagactatattcaggttaacgtttgatcacattaaaaaatcttttttgaaaaccttttatcatttcatctttccctatggaaattgaaaaaaaacattttatcacctcctctttccccacagaaattcaa

SEQ ID NO: 9615 - DNA, 445 bp, Homo sapiens
atccttttatactcaatcaaacaaaagctcaaagtttttgttttgataagaaaataaaaattttgtgggctcttacatagtgggtactttgattatgtgtgataatactgtgctgtgacaaataatataatgaagaaattaataccaagattgctattctgaaagattaaacattctttaatacttagatctttcatctgtttatgtaacaaaccctaacatacaggcttaaggccttgcagatattaacttctttaacttaatctttgtaacagtcccatgaagtaggtactattatgattacgtttcccatttgaggactacaagtcataaagatattaacgaccttgcccaacagctagttagtggcggagcctacttttgaactcagacactctggctctagactcttttcgtttattaaccactgcactatgttacattg

SEQ ID NO: 9616 - DNA, 468 bp, Homo sapiens
caaaaattagctgggtgtggtggcacatgcctataatcccaggtacttgggaggctgaggcaggagaatcatttgaacccaggaggcagaggttgcagtgagccaaggttgcaccactgtactccagcctgggtgatatagcaagactatgtctcaaaaaaaaaaaaaaaaaaaaaaaaaaaagaagaagaagaagaaaaaaaaagaagaagagaaaaagaagaagaaaactctttgctttgaattggggggcatagctgggtgcagtggcccacacctatagttccagctatgcaagaggctgaggctggaggatcacttgagcccaggagttccagtccagtgtgggcaacatggcaagacccttatatcttaaaaaaaaatccctcaaggctgggtgcggtggctcacacctgtaatcctagcattttgggaggccaaggcaggcagatcccttgaggtcaggag

SEQ ID NO: 9617 - DNA, 301 bp, Homo sapiens
aagcacaccagatctcatgtgttgaaatgtgaacatgctcaccacagaccaaggacattcaacctgtcaatccccaggatttccaagccaggagtttcatctcttacttgtggaaaatttgtccatttaattgtgaaccaatcagcttttcattgtgtcaaaatcaaatctagatagtgaaatatatattttatctttattgttatcttaaatatatcttggcttaaagagacataagtagctcttccccactacaccagataatgagttgcaaataaatcattcagtagtaaagttcaaa

SEQ ID NO: 9618 - DNA, 364 bp, Homo sapiens
  misc_feature (319)..(320): n is a, c, g, or t
agtgagcattacatgagatctgatggttttgtaagtgtttggtaattcctcctgcgttcattctcccctctgctgccttgtgaaaaagatgccttgctttccctttgccttctgccatcattgtaagtttcctgaggcctccccagccatgcagaactgtgagtcaattaaacctctttcctttctagattacccagtctcaggcagttctttataggcagtgtgagaatggactaatactgtggtcttgggataacatctgggaggaattctctgggattaccagggtaggagactcttgttttcttcccttactttnntccaaaatgagtggcagtctctctctctctctggggctaaggtt

SEQ ID NO: 9619 - DNA, 344 bp, Homo sapiens
ttttttttttcttattatccttttagttttcccaagtattttcagcaagacttaatgattgagattttcaccacaactaggcaagttcaagttgtatactctttaatctacaggcactcttcacaagttcatctacgatggtgtgctggaagttaaagagctgagctactgtggagatattgagatgaatatatttaagctgggcatggtagcatgtgcctgtagtcctagctactcaggaggctgaggtgggaggatcacttgagcccagtagtttgaagttgcactgagctatgatcatgccactgcattccagtttgggtgaaagagtaagaccccacctc

SEQ ID NO: 9620 - DNA, 410 bp, Homo sapiens
agagcccgtcaaagatgttatgtttccttttttctgacctcggggactcgagaggtgagtgcttagttctcccagaggtacagagattacgaaggcttatggagacaagtaagttgccagacatcacacagccagtgtcctggtgtcttaacctcagcttgtaggtgccatcctgctgagacatccagcttagagctgccatcctcagctctaagcatcagacatgcatctcgtttctcctgaaggatttcctccatccttgatgtgtgcttgtggggagggaggattttccacatgaaacttggctttcctagtaagcattgtcccccgtccccagtttaactaaaactgcaatttgtgttctaatcaattcagattagaagaaagcaataaagaattaaaaaacaata

SEQ ID NO: 9621 - DNA, 498 bp, Homo sapiens
ggcgcgtagtagagggaagcgactgaggagcggggactgggcagcatttgaatggatgcgggtgccgctggcacccgggaagacgcctgggagccggcgctggggagccgggcatgggctgggatgtgtttggattccaatctgggcctgacaccagttcagtgacctcgggaagttccccaaccctgcgggcctgtttcctccctctgaagtggcgacagtaatagaaccgacctcgtaggctcatcgggaggtcctgatgggagaacccatgcaacttgccaccacagagccaggcccgcggcgactggctcctggtgggtattaaagacgagtcgggaaagaagagcaggctcaatcaaaccttcaatggccccgaaagacatcttgattgaaacctcatgagagactctgagccagaaaacccagcaacttagaacccagatacctgaccatcagccactgtgtgaaataataaatgtttgttgttaaaaaaag

SEQ ID NO: 9622 - DNA, 543 bp, Homo sapiens
ggcgcgtagtagagggaagcgactgaggagcggggactgggcagcatttgaatggatgcgggtgccgctggcacccgggaagacgcctgggagccggcgctggggagccgggcatgggctgggatgtgtttggattccaatctgggcctgacaccagttcagtgacctcgggaagttccccaaccctgcgggcctgtttcctccctctgaagtggcgacagtaatagaaccgacctcgtaggctcatcgggaggtcctgatgggagaacccatgcaacttgccaccacagagccaggcccgcggcgactggctcctggtgggtattaaagacgagtcgggaaagaagagcagggttgcctgctgaggaagcttttcacagcatgagaccttccgcaggctcaatcaaaccttcaatggccccgaaagacatcttgattgaaacctcatgagagactctgagccagaaaacccagcaacttagaacccagatacctgaccatcagccactgtgtgaaataataaatgtttgttgttaaaaaaag

SEQ ID NO: 9623 - DNA, 1952 bp, Homo sapiens
  misc_feature (6)..(6): n is a, c, g, or t
gccctnctctgcctggtggcgccgggaggctgtttttccactcactggcgcgcagactccatcccactgttttcttctctcttttctggagttagattagtctgaagccgccaccagccccaggcccccgtgcagaagaaaagcgggagggaacggcggaggccgccgctgccctgcaccgccctcctggaggccacttggagagtccggccccgaggaggccatggccacaagtgcccacagctggccccaggttgccagcgtcgctacagcccagaccaaggcagaataatctccggatgagctggtggcaccgctgagcctttggtctcaccagggcttcctgttgctggcaggcggggtggagcggagctgctgggaggctgctggataggagaggggtcacggctgcggaagaggaggttcttcgggacacccgtggatggacacggcaaggaaacaccaggccaaccacagctggggataaaatagcacaaccacaccctgccgtccagcgcctcccagcctgtgccccttcctagtaccaccagcaaccatcaatcccgtctcctcctgcctcctctcctgcaatccaccccgccacgactatcgccatggcagccctgatcgcagagaacttccgcttcctgtcacttttcttcaagagcaaggatgtgatgattttcaacggcctggtggcactgggcacggtgggcagccaggagctgttctctgtggtggccttccactgcccctgctcgccggcccggaactacctgtacgggctggcggccatcggcgtgcccgccctggtgctcttcatcattggcatcatcctcaacaaccacacctggaacctcgtggccgagtgccagcaccggaggaccaagaactgctccgccgcccccaccttcctccttctaagctccatcctgggacgtgcggctgtggcccctgtcacctggtctgtcatctccctgctgcgtggtgaggcttatgtctgtgctctcagtgagttcgtggacccttcctcactcacggccagggaagagcacttcccatcagcccacgccactgaaatcctggccaggttcccctgcaaggagaaccctgacaacctgtcagacttccgggaggaggtcagccgcaggctcaggtatgagtcccagctctttggatggctgctcatcggcgtggtggccatcctggtgttcctgaccaagtgcctcaagcattactgctcaccactcagctaccgccaggaggcctactgggcgcagtaccgcgccaatgaggaccagctgttccagcgcacggccgaggtgcactctcgggtgctcgctgccaacaatgtgcgccgcttctttggctttgtggcgctcaacaaggatgatgaggaactgattgccaacttcccagtggaaggcacgcagccacggccacagtggaatgccatcaccggcgtctacttgtaccgtgagaaccagggcctcccactctacagccgcctgcacaagtgggcccagggtctggcaggcaacggcgcggcccctgacaacgtggagatggccctgctcccctcctaaggaggtgcttcccatgctctttgtaaatggcactacttggtcccaaactgaaccccactgcttgctcacatccatatcagaaggggatttttaaaaaactgttatcttcttggccaggggaaaggaccacaaggcaatctggggtgtggacagacccagtagacaatggaagccccagccagcagggccaggtgacagtgaagctcaccagtgggctcctttatggtactctatgcagttaacatgtatctagctgcatagggacacccagcgcagcagtgcaccactgggaagtggcctccagtgcagcctctggccttattttatatatttaaatttttgataaagtttttcttactaaaagga

SEQ ID NO: 9624 - DNA, 1849 bp, Homo sapiens
  misc_feature (6)..(6): n is a, c, g, or t
gccctnctctgcctggtggcgccgggaggctgtttttccactcactggcgcgcagactccatcccactgttttcttctctcttttctggagttagattagtctgaagccgccaccagccccaggcccccgtgcagaagaaaagcgggagggaacggcggaggccgccgctgccctgcaccgccctcctggaggccacttggagagtccggccccgaggaggccatggccacaagtgcccacagctggccccaggcggggtggagcggagctgctgggaggctgctggataggagaggggtcacggctgcggaagaggaggttcttcgggacacccgtggatggacacggcaaggaaacaccaggccaaccacagctggggataaaatagcacaaccacaccctgccgtccagcgcctcccagcctgtgccccttcctagtaccaccagcaaccatcaatcccgtctcctcctgcctcctctcctgcaatccaccccgccacgactatcgccatggcagccctgatcgcagagaacttccgcttcctgtcacttttcttcaagagcaaggatgtgatgattttcaacggcctggtggcactgggcacggtgggcagccaggagctgttctctgtggtggccttccactgcccctgctcgccggcccggaactacctgtacgggctggcggccatcggcgtgcccgccctggtgctcttcatcattggcatcatcctcaacaaccacacctggaacctcgtggccgagtgccagcaccggaggaccaagaactgctccgccgcccccaccttcctccttctaagctccatcctgggacgtgcggctgtggcccctgtcacctggtctgtcatctccctgctgcgtggtgaggcttatgtctgtgctctcagtgagttcgtggacccttcctcactcacggccagggaagagcacttcccatcagcccacgccactgaaatcctggccaggttcccctgcaaggagaaccctgacaacctgtcagacttccgggaggaggtcagccgcaggctcaggtatgagtcccagctctttggatggctgctcatcggcgtggtggccatcctggtgttcctgaccaagtgcctcaagcattactgctcaccactcagctaccgccaggaggcctactgggcgcagtaccgcgccaatgaggaccagctgttccagcgcacggccgaggtgcactctcgggtgctcgctgccaacaatgtgcgccgcttctttggctttgtggcgctcaacaaggatgatgaggaactgattgccaacttcccagtggaaggcacgcagccacggccacagtggaatgccatcaccggcgtctacttgtaccgtgagaaccagggcctcccactctacagccgcctgcacaagtgggcccagggtctggcaggcaacggcgcggcccctgacaacgtggagatggccctgctcccctcctaaggaggtgcttcccatgctctttgtaaatggcactacttggtcccaaactgaaccccactgcttgctcacatccatatcagaaggggatttttaaaaaactgttatcttcttggccaggggaaaggaccacaaggcaatctggggtgtggacagacccagtagacaatggaagccccagccagcagggccaggtgacagtgaagctcaccagtgggctcctttatggtactctatgcagttaacatgtatctagctgcatagggacacccagcgcagcagtgcaccactgggaagtggcctccagtgcagcctctggccttattttatatatttaaatttttgataaagtttttcttactaaaagga

SEQ ID NO: 9625 - DNA, 2085 bp, Homo sapiens
  misc_feature (6)..(6): n is a, c, g, or t
gccctnctctgcctggtggcgccgggaggctgtttttccactcactggcgcgcagactccatcccactgttttcttctctcttttctggagttagattagtctgaagccgccaccagccccaggcccccgtgcagaagaaaagcgggagggaacggcggaggccgccgctgccctgcaccgccctcctggaggccacttggagagtccggccccgaggaggccatggccacaagtgcccacagctggccccaggcggggtggagcggagctgctgggaggctgctggataggagaggggtcacggctgcggaagaggaggttcttcgggacacccgtggatggacacggcaaggaaacaccaggccaaccacagctggggataaaatagcacaaccacaccctgccgtccagcgcctcccagcctgtgccccttcctagtaccaccagcaaccatcaatcccgtctcctcctgcctcctctcctgcaatccaccccgccacgactatcgccatggcagccctgatcgcagagaacttccgcttcctgtcacttttcttcaagagcaaggatgtgatgattttcaacggcctggtggcactgggcacggtgggcagccaggagctgttctctgtggtggccttccactgcccctgctcgccggcccggaactacctgtacgggctggcggccatcggcgtgcccgccctggtgctcttcatcattggcatcatcctcaacaaccacacctggaacctcgtggccgagtgccagcaccggaggaccaagaactgctccgccgcccccaccttcctccttctaagctccatcctgggacgtgcggctgtggcccctgtcacctggtctgtcatctccctgctgcgtggtgaggcttatgtctgtgctctcagtgagttcgtggacccttcctcactcacggccagggaagagcacttcccatcagcccacgccactgaaatcctggccaggttcccctgcaaggagaaccctgacaacctgtcagacttccgggaggaggtcagccgcaggctcaggtatgagtcccagctctttggatggctgctcatcggcgtggtggccatcctggtgttcctgaccaagtgcctcaagcattactgctcaccactcagctaccgccaggaggcctactgggcgcagtaccgcgccaatgaggaccagctgttccagcgcacggccgaggtgcactctcgggtgctcgctgccaacaatgtgcgccgcttctttggctttgtggcgctcaacaaggatgatgaggaactgattgccaacttcccagtggaaggcacgcagccacggccacagtggaatgccatcaccggcgtctacttgtaccgtgagaaccagggcctcccactctacagccgcctgcacaagtgggcccagggtctggcaggcaacggcgcggcccctgacaacgtggagatggccctgctcccctcctaaggaggtgcttcccatgctctttgtaaatggcactacttggtcccaaactgaaccccactgcttgctcacatccatatcagaaggggatttttaaaaaactgttatcttcttggccaggggaaaggaccacaaggcaatctggggtgtggacagacccagtagacaatggaagccccagccagcagggccaggtgacagtgaagctcaccagtgggctcctttatggtactctatgcagttaacatgtatctagctgcatagggacacccagcgcagcagtgcaccactgggaagtggcctccagtgcagcctctggccttattttatatatttaaatttttgataaagtttttcttactaaaaggaaaaaaaaaaaaaacaaaaaaaacaaaacaaaaaggggggccccccctaaaaaatttcccatacagagagggcgccccacgaggaactaagcagcggagacccacagcaggacacagggacacaaaaagagggggccaccaaaaataacgggacggcagcggaatcaagaacaccacaggggacacacacgggccggacggggagaaacacagcggggagcacggggagaacaacgg

SEQ ID NO: 9626 - DNA, 2244 bp, Homo sapiens
cacaatcaggcatcttttattcttttctttccctccaacatccctaggaaagagcaaggctcaggatgatttatcctcttttcactgatgaggaatctgaggcccagagaacagtcatgaagtgtgatcagaccctgaggtctccaaaaagataatgtccttgcgaactccagggattctggcatcttgctgtacccaccccagcccacacggcaggatcctatccaagtcccttatccacccggacactcactttagcttttacaccctcaaggctgagaccctaaggacacgccctggatccaaggagtccctggcccctctgctaatatgcgccacctggactcccagagggaaagccggtcagcaccccacatgcattagcaccatgggccacccccaagccctaccccaggagaagctcgtggtggcaaaaagaacctaagcatttgaggcaggtcacccaagcttgaatctcagtctgcctctcatctgtgaccctggcgagccactcgtcctcaggaagccttcactttccctagtgcacggcgggcacacagctcaacgtgggactgtgaggatgggaaatgaggggtgccatgcaccctggaggaactcagtgaacagtggcaactgtcacttccctggggccctatggtccttcctttctccccagcctgtccacactagcatcttcctcaactcctggttttcagagggaaacacttatcggtcatctgctccacaggaaacaccaggccaaccacagctggggataaaatagcacaaccacaccctgccgtccagcgcctcccagcctgtgccccttcctagtaccaccagcaaccatcaatcccgtctcctcctgcctcctctcctgcaatccaccccgccacgactatcgccatggcagccctgatcgcagagaacttccgcttcctgtcacttttcttcaagagcaaggatgtgatgattttcaacggcctggtggcactgggcacggtgggcagccaggagctgttctctgtggtggccttccactgcccctgctcgccggcccggaactacctgtacgggctggcggccatcggcgtgcccgccctggtgctcttcatcattggcatcatcctcaacaaccacacctggaacctcgtggccgagtgccagcaccggaggaccaagaactgctccgccgcccccaccttcctccttctaagctccatcctgggacgtgcggctgtggcccctgtcacctggtctgtcatctccctgctgcgtggtgaggcttatgtctgtgctctcagtgagttcgtggacccttcctcactcacggccagggaagagcacttcccatcagcccacgccactgaaatcctggccaggttcccctgcaaggagaaccctgacaacctgtcagacttccgggaggaggtcagccgcaggctcaggtatgagtcccagctctttggatggctgctcatcggcgtggtggccatcctggtgttcctgaccaagtgcctcaagcattactgctcaccactcagctaccgccaggaggcctactgggcgcagtaccgcgccaatgaggaccagctgttccagcgcacggccgaggtgcactctcgggtgctcgctgccaacaatgtgcgccgcttctttggctttgtggcgctcaacaaggatgatgaggaactgattgccaacttcccagtggaaggcacgcagccacggccacagtggaatgccatcaccggcgtctacttgtaccgtgagaaccagggcctcccactctacagccgcctgcacaagtgggcccagggtctggcaggcaacggcgcggcccctgacaacgtggagatggccctgctcccctcctaaggaggtgcttcccatgctctttgtaaatggcactacttggtcccaaactgaaccccactgcttgctcacatccatatcagaaggggatttttaaaaaactgttatcttcttggccaggggaaaggaccacaaggcaatctggggtgtggacagacccagtagacaatggaagccccagccagcagggccaggtgacagtgaagctcaccagtgggctcctttatggtactctatgcagttaacatgtatctagctgcatagggacacccagcgcagcagtgcaccactgggaagtggcctccagtgcagcctctggccttattttatatatttaaatttttgataaagtttttcttactaaaagga

SEQ ID NO: 9627 - DNA, 2653 bp, Homo sapiens
  misc_feature (6)..(6): n is a, c, g, or t
gccctnctctgcctggtggcgccgggaggctgtttttccactcactggcgcgcagactccatcccactgttttcttctctcttttctggagttagattagtctgaagccgccaccagccccaggcccccgtgcagaagaaaagcgggagggaacggcggaggccgccgctgccctgcaccgccctcctggaggccacttggagagtccggccccgaggaggccatggccacaagtgcccacagctggccccaggttgccagcgtcgctacagcccagaccaaggcagaataatctccggatgagctggtggcaccgctgagcctttggtctcaccagggcttcctgttgctggcaggcggggtggagcggagctgctgggaggctgctggataggagaggggtcacggctgcggaagaggaggttcttcgggacacccgtggatggacacggcaaggaaagagcaaggctcaggatgatttatcctcttttcactgatgaggaatctgaggcccagagaacagtcatgaagtgtgatcagaccctgaggtctccaaaaagataatgtccttgcgaactccagggattctggcatcttgctgtacccaccccagcccacacggcaggatcctatccaagtcccttatccacccggacactcactttagcttttacaccctcaaggctgagaccctaaggacacgccctggatccaaggagtccctggcccctctgctaatatgcgccacctggactcccagagggaaagccggtcagcaccccacatgcattagcaccatgggccacccccaagccctaccccaggagaagctcgtggtggcaaaaagaacctaagcatttgaggcaggtcacccaagcttgaatctcagtctgcctctcatctgtgaccctggcgagccactcgtcctcaggaagccttcactttccctagtgcacggcgggcacacagctcaacgtgggactgtgaggatgggaaatgaggggtgccatgcaccctggaggaactcagtgaacagtggcaactgtcacttccctggggccctatggtccttcctttctccccagcctgtccacactagcatcttcctcaactcctggttttcagagggaaacacttatcggtcatctgctccacaggaaacaccaggccaaccacagctggggataaaatagcacaaccacaccctgccgtccagcgcctcccagcctgtgccccttcctagtaccaccagcaaccatcaatcccgtctcctcctgcctcctctcctgcaatccaccccgccacgactatcgccatggcagccctgatcgcagagaacttccgcttcctgtcacttttcttcaagagcaaggatgtgatgattttcaacggcctggtggcactgggcacggtgggcagccaggagctgttctctgtggtggccttccactgcccctgctcgccggcccggaactacctgtacgggctggcggccatcggcgtgcccgccctggtgctcttcatcattggcatcatcctcaacaaccacacctggaacctcgtggccgagtgccagcaccggaggaccaagaactgctccgccgcccccaccttcctccttctaagctccatcctgggacgtgcggctgtggcccctgtcacctggtctgtcatctccctgctgcgtggtgaggcttatgtctgtgctctcagtgagttcgtggacccttcctcactcacggccagggaagagcacttcccatcagcccacgccactgaaatcctggccaggttcccctgcaaggagaaccctgacaacctgtcagacttccgggaggaggtcagccgcaggctcaggtatgagtcccagctctttggatggctgctcatcggcgtggtggccatcctggtgttcctgaccaagtgcctcaagcattactgctcaccactcagctaccgccaggaggcctactgggcgcagtaccgcgccaatgaggaccagctgttccagcgcacggccgaggtgcactctcgggtgctcgctgccaacaatgtgcgccgcttctttggctttgtggcgctcaacaaggatgatgaggaactgattgccaacttcccagtggaaggcacgcagccacggccacagtggaatgccatcaccggcgtctacttgtaccgtgagaaccagggcctcccactctacagccgcctgcacaagtgggcccagggtctggcaggcaacggcgcggcccctgacaacgtggagatggccctgctcccctcctaaggaggtgcttcccatgctctttgtaaatggcactacttggtcccaaactgaaccccactgcttgctcacatccatatcagaaggggatttttaaaaaactgttatcttcttggccaggggaaaggaccacaaggcaatctggggtgtggacagacccagtagacaatggaagccccagccagcagggccaggtgacagtgaagctcaccagtgggctcctttatggtactctatgcagttaacatgtatctagctgcatagggacacccagcgcagcagtgcaccactgggaagtggcctccagtgcagcctctggccttattttatatatttaaatttttgataaagtttttcttactaaaagga

SEQ ID NO: 9628 - DNA, 2706 bp, Homo sapiens
atggccacatggctctgcctgagcccatctggcagccttccttggcagggacagaaggggtgatctagaaggggtgatccctccatgaagcatggaagggaacagggctaggtctgtgtttggcgctcaccccatccctccactccctggcttcctctggcctggggagttttgtttttcaccctccagagggggaggacatggggccacaccctggcctgtctctcaggcttgtgtgggtggaggctgggaagggagttgggctaaacttcgctgttgcccgaggccatggccacttcccggcaggttgccagcgtcgctacagcccagaccaaggcagaataatctccggatgagctggtggcaccgctgagcctttggtctcaccagggcttcctgttgctggcaggcggggtggagcggagctgctgggaggctgctggataggagaggggtcacggctgcggaagaggaggttcttcgggacacccgtggatggacacggcaaggaaagagcaaggctcaggatgatttatcctcttttcactgatgaggaatctgaggcccagagaacagtcatgaagtgtgatcagaccctgaggtctccaaaaagataatgtccttgcgaactccagggattctggcatcttgctgtacccaccccagcccacacggcaggatcctatccaagtcccttatccacccggacactcactttagcttttacaccctcaaggctgagaccctaaggacacgccctggatccaaggagtccctggcccctctgctaatatgcgccacctggactcccagagggaaagccggtcagcaccccacatgcattagcaccatgggccacccccaagccctaccccaggagaagctcgtggtggcaaaaagaacctaagcatttgaggcaggtcacccaagcttgaatctcagtctgcctctcatctgtgaccctggcgagccactcgtcctcaggaagccttcactttccctagtgcacggcgggcacacagctcaacgtgggactgtgaggatgggaaatgaggggtgccatgcaccctggaggaactcagtgaacagtggcaactgtcacttccctggggccctatggtccttcctttctccccagcctgtccacactagcatcttcctcaactcctggttttcagagggaaacacttatcggtcatctgctccacaggaaacaccaggccaaccacagctggggataaaatagcacaaccacaccctgccgtccagcgcctcccagcctgtgccccttcctagtaccaccagcaaccatcaatcccgtctcctcctgcctcctctcctgcaatccaccccgccacgactatcgccatggcagccctgatcgcagagaacttccgcttcctgtcacttttcttcaagagcaaggatgtgatgattttcaacggcctggtggcactgggcacggtgggcagccaggagctgttctctgtggtggccttccactgcccctgctcgccggcccggaactacctgtacgggctggcggccatcggcgtgcccgccctggtgctcttcatcattggcatcatcctcaacaaccacacctggaacctcgtggccgagtgccagcaccggaggaccaagaactgctccgccgcccccaccttcctccttctaagctccatcctgggacgtgcggctgtggcccctgtcacctggtctgtcatctccctgctgcgtggtgaggcttatgtctgtgctctcagtgagttcgtggacccttcctcactcacggccagggaagagcacttcccatcagcccacgccactgaaatcctggccaggttcccctgcaaggagaaccctgacaacctgtcagacttccgggaggaggtcagccgcaggctcaggtatgagtcccagctctttggatggctgctcatcggcgtggtggccatcctggtgttcctgaccaagtgcctcaagcattactgctcaccactcagctaccgccaggaggcctactgggcgcagtaccgcgccaatgaggaccagctgttccagcgcacggccgaggtgcactctcgggtgctcgctgccaacaatgtgcgccgcttctttggctttgtggcgctcaacaaggatgatgaggaactgattgccaacttcccagtggaaggcacgcagccacggccacagtggaatgccatcaccggcgtctacttgtaccgtgagaaccagggcctcccactctacagccgcctgcacaagtgggcccagggtctggcaggcaacggcgcggcccctgacaacgtggagatggccctgctcccctcctaaggaggtgcttcccatgctctttgtaaatggcactacttggtcccaaactgaaccccactgcttgctcacatccatatcagaaggggatttttaaaaaactgttatcttcttggccaggggaaaggaccacaaggcaatctggggtgtggacagacccagtagacaatggaagccccagccagcagggccaggtgacagtgaagctcaccagtgggctcctttatggtactctatgcagttaacatgtatctagctgcatagggacacccagcgcagcagtgcaccactgggaagtggcctccagtgcagcctctggccttattttatatatttaaatttttgataaagtttttcttactaaaagga

SEQ ID NO: 9629 - DNA, 2450 bp, Homo sapiens
  misc_feature (6)..(6): n is a, c, g, or t
gccctnctctgcctggtggcgccgggaggctgtttttccactcactggcgcgcagactccatcccactgttttcttctctcttttctggagttagattagtctgaagccgccaccagccccaggcccccgtgcagaagaaaagcgggagggaacggcggaggccgccgctgccctgcaccgccctcctggaggccacttggagagtccggccccgaggaggccatggccacaagtgcccacagctggccccaggaaagagcaaggctcaggatgatttatcctcttttcactgatgaggaatctgaggcccagagaacagtcatgaagtgtgatcagaccctgaggtctccaaaaagataatgtccttgcgaactccagggattctggcatcttgctgtacccaccccagcccacacggcaggatcctatccaagtcccttatccacccggacactcactttagcttttacaccctcaaggctgagaccctaaggacacgccctggatccaaggagtccctggcccctctgctaatatgcgccacctggactcccagagggaaagccggtcagcaccccacatgcattagcaccatgggccacccccaagccctaccccaggagaagctcgtggtggcaaaaagaacctaagcatttgaggcaggtcacccaagcttgaatctcagtctgcctctcatctgtgaccctggcgagccactcgtcctcaggaagccttcactttccctagtgcacggcgggcacacagctcaacgtgggactgtgaggatgggaaatgaggggtgccatgcaccctggaggaactcagtgaacagtggcaactgtcacttccctggggccctatggtccttcctttctccccagcctgtccacactagcatcttcctcaactcctggttttcagagggaaacacttatcggtcatctgctccacaggaaacaccaggccaaccacagctggggataaaatagcacaaccacaccctgccgtccagcgcctcccagcctgtgccccttcctagtaccaccagcaaccatcaatcccgtctcctcctgcctcctctcctgcaatccaccccgccacgactatcgccatggcagccctgatcgcagagaacttccgcttcctgtcacttttcttcaagagcaaggatgtgatgattttcaacggcctggtggcactgggcacggtgggcagccaggagctgttctctgtggtggccttccactgcccctgctcgccggcccggaactacctgtacgggctggcggccatcggcgtgcccgccctggtgctcttcatcattggcatcatcctcaacaaccacacctggaacctcgtggccgagtgccagcaccggaggaccaagaactgctccgccgcccccaccttcctccttctaagctccatcctgggacgtgcggctgtggcccctgtcacctggtctgtcatctccctgctgcgtggtgaggcttatgtctgtgctctcagtgagttcgtggacccttcctcactcacggccagggaagagcacttcccatcagcccacgccactgaaatcctggccaggttcccctgcaaggagaaccctgacaacctgtcagacttccgggaggaggtcagccgcaggctcaggtatgagtcccagctctttggatggctgctcatcggcgtggtggccatcctggtgttcctgaccaagtgcctcaagcattactgctcaccactcagctaccgccaggaggcctactgggcgcagtaccgcgccaatgaggaccagctgttccagcgcacggccgaggtgcactctcgggtgctcgctgccaacaatgtgcgccgcttctttggctttgtggcgctcaacaaggatgatgaggaactgattgccaacttcccagtggaaggcacgcagccacggccacagtggaatgccatcaccggcgtctacttgtaccgtgagaaccagggcctcccactctacagccgcctgcacaagtgggcccagggtctggcaggcaacggcgcggcccctgacaacgtggagatggccctgctcccctcctaaggaggtgcttcccatgctctttgtaaatggcactacttggtcccaaactgaaccccactgcttgctcacatccatatcagaaggggatttttaaaaaactgttatcttcttggccaggggaaaggaccacaaggcaatctggggtgtggacagacccagtagacaatggaagccccagccagcagggccaggtgacagtgaagctcaccagtgggctcctttatggtactctatgcagttaacatgtatctagctgcatagggacacccagcgcagcagtgcaccactgggaagtggcctccagtgcagcctctggccttattttatatatttaaatttttgataaagtttttcttactaaaagga

SEQ ID NO: 9630 - DNA, 2073 bp, Homo sapiens
cacaatcaggcatcttttattcttttctttccctccaacatccctaggaaagagcaaggctcaggatgatttatcctcttttcactgatgaggaatctgaggcccagagaacagtcatgaagtgtgatcagaccctgaggtctccaaaaagataatgtccttgcgaactccagggattctggcatcttgctgtacccaccccagcccacacggcaggatcctatccaagtcccttatccacccggacactcactttagcttttacaccctcaaggctgagaccctaaggacacgccctggatccaaggagtccctggcccctctgctaatatgcgccacctggactcccagagggaaagccggtcagcaccccacatgcattagcaccatgggccacccccaagccctaccccaggagaagctcgtggtggcaaaaagaacctaagcatttgaggcaggtcacccaagcttgaatctcagtctgcctctcatctgtgaccctggcgagccactcgtcctcaggaagccttcactttccctagtgcacggcgggcacacagctcaacgtgggactgtgaggatgggaaatgaggggtgccatgcaccctggaggaactcagtgaacagtggcaactgtcacttccctggggccctatggtccttcctttctccccagcctgtccacactagcatcttcctcaactcctggttttcagagggaaacacttatcggtcatctgctccacaggaaacaccaggccaaccacagctggggataaaatagcacaaccacaccctgccgtccagcgcctcccagcctgtgccccttcctagtaccaccagcaaccatcaatcccgtctcctcctgcctcctctcctgcaatccaccccgccacgactatcgccatggcggccatcggcgtgcccgccctggtgctcttcatcattggcatcatcctcaacaaccacacctggaacctcgtggccgagtgccagcaccggaggaccaagaactgctccgccgcccccaccttcctccttctaagctccatcctgggacgtgcggctgtggcccctgtcacctggtctgtcatctccctgctgcgtggtgaggcttatgtctgtgctctcagtgagttcgtggacccttcctcactcacggccagggaagagcacttcccatcagcccacgccactgaaatcctggccaggttcccctgcaaggagaaccctgacaacctgtcagacttccgggaggaggtcagccgcaggctcaggtatgagtcccagctctttggatggctgctcatcggcgtggtggccatcctggtgttcctgaccaagtgcctcaagcattactgctcaccactcagctaccgccaggaggcctactgggcgcagtaccgcgccaatgaggaccagctgttccagcgcacggccgaggtgcactctcgggtgctcgctgccaacaatgtgcgccgcttctttggctttgtggcgctcaacaaggatgatgaggaactgattgccaacttcccagtggaaggcacgcagccacggccacagtggaatgccatcaccggcgtctacttgtaccgtgagaaccagggcctcccactctacagccgcctgcacaagtgggcccagggtctggcaggcaacggcgcggcccctgacaacgtggagatggccctgctcccctcctaaggaggtgcttcccatgctctttgtaaatggcactacttggtcccaaactgaaccccactgcttgctcacatccatatcagaaggggatttttaaaaaactgttatcttcttggccaggggaaaggaccacaaggcaatctggggtgtggacagacccagtagacaatggaagccccagccagcagggccaggtgacagtgaagctcaccagtgggctcctttatggtactctatgcagttaacatgtatctagctgcatagggacacccagcgcagcagtgcaccactgggaagtggcctccagtgcagcctctggccttattttatatatttaaatttttgataaagtttttcttactaaaagga

SEQ ID NO: 9631 - DNA, 1749 bp, Homo sapiens
  misc_feature (6)..(6): n is a, c, g, or t
gccctnctctgcctggtggcgccgggaggctgtttttccactcactggcgcgcagactccatcccactgttttcttctctcttttctggagttagattagtctgaagccgccaccagccccaggcccccgtgcagaagaaaagcgggagggaacggcggaggccgccgctgccctgcaccgccctcctggaggccacttggagagtccggccccgaggaggccatggccacaagtgcccacagctggccccaggaaacaccaggccaaccacagctggggataaaatagcacaaccacaccctgccgtccagcgcctcccagcctgtgccccttcctagtaccaccagcaaccatcaatcccgtctcctcctgcctcctctcctgcaatccaccccgccacgactatcgccatggcagccctgatcgcagagaacttccgcttcctgtcacttttcttcaagagcaaggatgtgatgattttcaacggcctggtggcactgggcacggtgggcagccaggagctgttctctgtggtggccttccactgcccctgctcgccggcccggaactacctgtacgggctggcggccatcggcgtgcccgccctggtgctcttcatcattggcatcatcctcaacaaccacacctggaacctcgtggccgagtgccagcaccggaggaccaagaactgctccgccgcccccaccttcctccttctaagctccatcctgggacgtgcggctgtggcccctgtcacctggtctgtcatctccctgctgcgtggtgaggcttatgtctgtgctctcagtgagttcgtggacccttcctcactcacggccagggaagagcacttcccatcagcccacgccactgaaatcctggccaggttcccctgcaaggagaaccctgacaacctgtcagacttccgggaggaggtcagccgcaggctcaggtatgagtcccagctctttggatggctgctcatcggcgtggtggccatcctggtgttcctgaccaagtgcctcaagcattactgctcaccactcagctaccgccaggaggcctactgggcgcagtaccgcgccaatgaggaccagctgttccagcgcacggccgaggtgcactctcgggtgctcgctgccaacaatgtgcgccgcttctttggctttgtggcgctcaacaaggatgatgaggaactgattgccaacttcccagtggaaggcacgcagccacggccacagtggaatgccatcaccggcgtctacttgtaccgtgagaaccagggcctcccactctacagccgcctgcacaagtgggcccagggtctggcaggcaacggcgcggcccctgacaacgtggagatggccctgctcccctcctaaggaggtgcttcccatgctctttgtaaatggcactacttggtcccaaactgaaccccactgcttgctcacatccatatcagaaggggatttttaaaaaactgttatcttcttggccaggggaaaggaccacaaggcaatctggggtgtggacagacccagtagacaatggaagccccagccagcagggccaggtgacagtgaagctcaccagtgggctcctttatggtactctatgcagttaacatgtatctagctgcatagggacacccagcgcagcagtgcaccactgggaagtggcctccagtgcagcctctggccttattttatatatttaaatttttgataaagtttttcttactaaaagga

SEQ ID NO: 9632 - DNA, 1853 bp, Homo sapiens
  misc_feature (11)..(11): n is a, c, g, or t
  misc_feature (14)..(14): n is a, c, g, or t
  misc_feature (28)..(28): n is a, c, g, or t
ctctgtttgcnggntacacggccaaccnggtgcgagtctggcaggtgaccattggcatttgaggcaggtcacccaagcttgaatctcagtctgcctctcatctgtgaccctggcgagccactcgtcctcaggaagccttcactttccctagtgcacggcgggcacacagctcaacgtgggactgtgaggatgggaaatgaggggtgccatgcaccctggaggaactcagtgaacagtggcaactgtcacttccctggggccctatggtccttcctttctccccagcctgtccacactagcatcttcctcaactcctggttttcagagggaaacacttatcggtcatctgctccacaggaaacaccaggccaaccacagctggggataaaatagcacaaccacaccctgccgtccagcgcctcccagcctgtgccccttcctagtaccaccagcaaccatcaatcccgtctcctcctgcctcctctcctgcaatccaccccgccacgactatcgccatggcagccctgatcgcagagaacttccgcttcctgtcacttttcttcaagagcaaggatgtgatgattttcaacggcctggtggcactgggcacggtgggcagccaggagctgttctctgtggtggccttccactgcccctgctcgccggcccggaactacctgtacgggctggcggccatcggcgtgcccgccctggtgctcttcatcattggcatcatcctcaacaaccacacctggaacctcgtggccgagtgccagcaccggaggaccaagaactgctccgccgcccccaccttcctccttctaagctccatcctgggacgtgcggctgtggcccctgtcacctggtctgtcatctccctgctgcgtggtgaggcttatgtctgtgctctcagtgagttcgtggacccttcctcactcacggccagggaagagcacttcccatcagcccacgccactgaaatcctggccaggttcccctgcaaggagaaccctgacaacctgtcagacttccgggaggaggtcagccgcaggctcaggtatgagtcccagctctttggatggctgctcatcggcgtggtggccatcctggtgttcctgaccaagtgcctcaagcattactgctcaccactcagctaccgccaggaggcctactgggcgcagtaccgcgccaatgaggaccagctgttccagcgcacggccgaggtgcactctcgggtgctcgctgccaacaatgtgcgccgcttctttggctttgtggcgctcaacaaggatgatgaggaactgattgccaacttcccagtggaaggcacgcagccacggccacagtggaatgccatcaccggcgtctacttgtaccgtgagaaccagggcctcccactctacagccgcctgcacaagtgggcccagggtctggcaggcaacggcgcggcccctgacaacgtggagatggccctgctcccctcctaaggaggtgcttcccatgctctttgtaaatggcactacttggtcccaaactgaaccccactgcttgctcacatccatatcagaaggggatttttaaaaaactgttatcttcttggccaggggaaaggaccacaaggcaatctggggtgtggacagacccagtagacaatggaagccccagccagcagggccaggtgacagtgaagctcaccagtgggctcctttatggtactctatgcagttaacatgtatctagctgcatagggacacccagcgcagcagtgcaccactgggaagtggcctccagtgcagcctctggccttattttatatatttaaatttttgataaagtttttcttactaaaagga

SEQ ID NO: 9633 - DNA, 2005 bp, Homo sapiens
atggccacatggctctgcctgagcccatctggcagccttccttggcagggacagaaggggtgatctagaaggggtgatccctccatgaagcatggaagggaacagggctaggtctgtgtttggcgctcaccccatccctccactccctggcttcctctggcctggggagttttgtttttcaccctccagagggggaggacatggggccacaccctggcctgtctctcaggcttgtgtgggtggaggctgggaagggagttgggctaaacttcgctgttgcccgaggccatggccacttcccggcaggttgccagcgtcgctacagcccagaccaaggcagaataatctccggatgagctggtggcaccgctgagcctttggtctcaccagggcttcctgttgctggcaggcggggtggagcggagctgctgggaggctgctggataggagaggggtcacggctgcggaagaggaggttcttcgggacacccgtggatggacacggcaaggaaacaccaggccaaccacagctggggataaaatagcacaaccacaccctgccgtccagcgcctcccagcctgtgccccttcctagtaccaccagcaaccatcaatcccgtctcctcctgcctcctctcctgcaatccaccccgccacgactatcgccatggcagccctgatcgcagagaacttccgcttcctgtcacttttcttcaagagcaaggatgtgatgattttcaacggcctggtggcactgggcacggtgggcagccaggagctgttctctgtggtggccttccactgcccctgctcgccggcccggaactacctgtacgggctggcggccatcggcgtgcccgccctggtgctcttcatcattggcatcatcctcaacaaccacacctggaacctcgtggccgagtgccagcaccggaggaccaagaactgctccgccgcccccaccttcctccttctaagctccatcctgggacgtgcggctgtggcccctgtcacctggtctgtcatctccctgctgcgtggtgaggcttatgtctgtgctctcagtgagttcgtggacccttcctcactcacggccagggaagagcacttcccatcagcccacgccactgaaatcctggccaggttcccctgcaaggagaaccctgacaacctgtcagacttccgggaggaggtcagccgcaggctcaggtatgagtcccagctctttggatggctgctcatcggcgtggtggccatcctggtgttcctgaccaagtgcctcaagcattactgctcaccactcagctaccgccaggaggcctactgggcgcagtaccgcgccaatgaggaccagctgttccagcgcacggccgaggtgcactctcgggtgctcgctgccaacaatgtgcgccgcttctttggctttgtggcgctcaacaaggatgatgaggaactgattgccaacttcccagtggaaggcacgcagccacggccacagtggaatgccatcaccggcgtctacttgtaccgtgagaaccagggcctcccactctacagccgcctgcacaagtgggcccagggtctggcaggcaacggcgcggcccctgacaacgtggagatggccctgctcccctcctaaggaggtgcttcccatgctctttgtaaatggcactacttggtcccaaactgaaccccactgcttgctcacatccatatcagaaggggatttttaaaaaactgttatcttcttggccaggggaaaggaccacaaggcaatctggggtgtggacagacccagtagacaatggaagccccagccagcagggccaggtgacagtgaagctcaccagtgggctcctttatggtactctatgcagttaacatgtatctagctgcatagggacacccagcgcagcagtgcaccactgggaagtggcctccagtgcagcctctggccttattttatatatttaaatttttgataaagtttttcttactaaaagga

SEQ ID NO: 9634 - DNA, 1978 bp, Homo sapiens
cacaatcaggcatcttttattcttttctttccctccaacatccctaggaaagagcaaggctcaggatgatttatcctcttttcactgatgaggaatctgaggcccagagaacagtcatgaagtgtgatcagaccctgaggtctccaaaaagataatgtccttgcgaactccagggattctggcatcttgctgtacccaccccagcccacacggcaggatcctatccaagtcccttatccacccggacactcactttagcttttacaccctcaaggctgagaccctaaggacacgccctggatccaaggagtccctggcccctctgctaatatgcgccacctggactcccagagggaaagccggtcagcaccccacatgcattagcaccatgggccacccccaagccctaccccaggagaagctcgtggtggcaaaaagaacctaagcatttgaggcaggtcacccaagcttgaatctcagtctgcctctcatctgtgaccctggcgagccactcgtcctcaggaagccttcactttccctagtgcacggcgggcacacagctcaacgtgggactgtgaggatgggaaatgaggggtgccatgcaccctggaggaactcagtgaacagtggcaactgtcacttccctggggccctatggtccttcctttctccccagcctgtccacactagcatcttcctcaactcctggttttcagagggaaacacttatcggtcatctgctccacaggaaacaccaggccaaccacagctggggataaaatagcacaaccacaccctgccgtccagcgcctcccagcctgtgccccttcctagtaccaccagcaaccatcaatcccgtctcctcctgcctcctctcctgcaatccaccccgccacgactatcgccatggcggccatcggcgtgcccgccctggtgctcttcatcattggcatcatcctcaacaaccacacctggaacctcgtggccgagtgccagcaccggaggaccaagaactgctccgccgcccccaccttcctccttctaagctccatcctgggacgtgcggctgtggcccctgtcacctggtctgtcatctcccactgaaatcctggccaggttcccctgcaaggagaaccctgacaacctgtcagacttccgggaggaggtcagccgcaggctcaggtatgagtcccagctctttggatggctgctcatcggcgtggtggccatcctggtgttcctgaccaagtgcctcaagcattactgctcaccactcagctaccgccaggaggcctactgggcgcagtaccgcgccaatgaggaccagctgttccagcgcacggccgaggtgcactctcgggtgctcgctgccaacaatgtgcgccgcttctttggctttgtggcgctcaacaaggatgatgaggaactgattgccaacttcccagtggaaggcacgcagccacggccacagtggaatgccatcaccggcgtctacttgtaccgtgagaaccagggcctcccactctacagccgcctgcacaagtgggcccagggtctggcaggcaacggcgcggcccctgacaacgtggagatggccctgctcccctcctaaggaggtgcttcccatgctctttgtaaatggcactacttggtcccaaactgaaccccactgcttgctcacatccatatcagaaggggatttttaaaaaactgttatcttcttggccaggggaaaggaccacaaggcaatctggggtgtggacagacccagtagacaatggaagccccagccagcagggccaggtgacagtgaagctcaccagtgggctcctttatggtactctatgcagttaacatgtatctagctgcatagggacacccagcgcagcagtgcaccactgggaagtggcctccagtgcagcctctggccttattttatatatttaaatttttgataaagtttttcttactaaaagga

SEQ ID NO: 9635 - DNA, 912 bp, Homo sapiens
atggaatcacagccacaagggcctgcttctcttacccaagcagaacttgctcctttttccattcgctctggggggtagggcttaggcagttccttcgcccctcctgaactgtgcccattctctggccagctctttggatggctgctcatcggcgtggtggccatcctggtgttcctgaccaagtgcctcaagcattactgctcaccactcagctaccgccaggaggcctactgggcgcagtaccgcgccaatgaggaccagctgttccagcgcacggccgaggtgcactctcgggtgctcgctgccaacaatgtgcgccgcttctttggctttgtggcgctcaacaaggatgatgaggaactgattgccaacttcccagtggaaggcacgcagccacggccacagtggaatgccatcaccggcgtctacttgtaccgtgagaaccagggcctcccactctacagccgcctgcacaagtgggcccagggtctggcaggcaacggcgcggcccctgacaacgtggagatggccctgctcccctcctaaggaggtgcttcccatgctctttgtaaatggcactacttggtcccaaactgaaccccactgcttgctcacatccatatcagaaggggatttttaaaaaactgttatcttcttggccaggggaaaggaccacaaggcaatctggggtgtggacagacccagtagacaatggaagccccagccagcagggccaggtgacagtgaagctcaccagtgggctcctttatggtactctatgcagttaacatgtatctagctgcatagggacacccagcgcagcagtgcaccactgggaagtggcctccagtgcagcctctggccttattttatatatttaaatttttgataaagtttttcttactaaaagga

SEQ ID NO: 9636 - DNA, 2060 bp, Homo sapiens
cacaatcaggcatcttttattcttttctttccctccaacatccctaggaaagagcaaggctcaggatgatttatcctcttttcactgatgaggaatctgaggcccagagaacagtcatgaagtgtgatcagaccctgaggtctccaaaaagataatgtccttgcgaactccagggattctggcatcttgctgtacccaccccagcccacacggcaggatcctatccaagtcccttatccacccggacactcactttagcttttacaccctcaaggctgagaccctaaggacacgccctggatccaaggagtccctggcccctctgctaatatgcgccacctggactcccagagggaaagccggtcagcaccccacatgcattagcaccatgggccacccccaagccctaccccaggagaagctcgtggtggcaaaaagaacctaagcatttgaggcaggtcacccaagcttgaatctcagtctgcctctcatctgtgaccctggcgagccactcgtcctcaggaagccttcactttccctagtgcacggcgggcacacagctcaacgtgggactgtgaggatgggaaatgaggggtgccatgcaccctggaggaactcagtgaacagtggcaactgtcacttccctggggccctatggtccttcctttctccccagcctgtccacactagcatcttcctcaactcctggttttcagagggaaacacttatcggtcatctgctccacaggaaacaccaggccaaccacagctggggataaaatagcacaaccacaccctgccgtccagcgcctcccagcctgtgccccttcctagtaccaccagcaaccatcaatcccgtctcctcctgcctcctctcctgcaatccaccccgccacgactatcgccatggcagccctgatcgcagagaacttccgcttcctgtcacttttcttcaagagcaaggatgtgatgattttcaacggcctggtggcactgggcacggtgggcagccaggagctgttctctgtggtggccttccactgcccctgctcgccggcccggaactacctgtacgggctggcggccatcggcgtgcccgccctggtgctcttcatcattggcatcatcctcaacaaccacacctggaacctcgtggccgagtgccagcaccggaggaccaagaactgctccgccgcccccaccttcctccttctaagctccatcctgggacgtgcggctgtggcccctgtcacctggtctgtcatctccctgctgcgtggtgaggcttatgtctgtgctctcagtgagttcgtggacccttcctcactcacggccagggaagagcacttcccatcagcccacgccactgaaatcctggccaggttcccctgcaaggagaaccctgacaacctgtcagacttccgggaggaggtcagccgcaggctcaggtatgagtcccagctctttggatggctgctcatcggcgtggtggccatcctggtgttcctgaccaagtgcctcaagcattactgctcaccactcagctaccgccaggaggcctactgggcgcagtaccgcgccaatgaggaccagctgttccagcgcacggccgaggtgcactctcgggtgctcgctgccaacaatgtgcgccgcttctttggctttgtggcgctcaacaaggatgatgaggaactgattgccaacttcccagtggaaggcacgcagccacggccacagtggaatgccatcaccggcgtctacttgtaccgtgagaaccagggcctcccactctacagccgcctgcacaagtgggcccagggtctggcaggcaacggcgcggcccctgacaacgtggagatggccctgctcccctcctaaggaggtgcttcccatgctctttgtaaatggcactacttggtcccaaactgaaccccactgcttgctcacatccatatcagaaggggatttttaaaaaactgttatcttcttggcctccagtgcagcctctggccttattttatatatttaaatttttgataaagtttttcttactaaaagga

SEQ ID NO: 9637 - DNA, 2063 bp, Homo sapiens
cacaatcaggcatcttttattcttttctttccctccaacatccctaggaaagagcaaggctcaggatgatttatcctcttttcactgatgaggaatctgaggcccagagaacagtcatgaagtgtgatcagaccctgaggtctccaaaaagataatgtccttgcgaactccagggattctggcatcttgctgtacccaccccagcccacacggcaggatcctatccaagtcccttatccacccggacactcactttagcttttacaccctcaaggctgagaccctaaggacacgccctggatccaaggagtccctggcccctctgctaatatgcgccacctggactcccagagggaaagccggtcagcaccccacatgcattagcaccatgggccacccccaagccctaccccaggagaagctcgtggtggcaaaaagaacctaagcatttgaggcaggtcacccaagcttgaatctcagtctgcctctcatctgtgaccctggcgagccactcgtcctcaggaagccttcactttccctagtgcacggcgggcacacagctcaacgtgggactgtgaggatgggaaatgaggggtgccatgcaccctggaggaactcagtgaacagtggcaactgtcacttccctggggccctatggtccttcctttctccccagcctgtccacactagcatcttcctcaactcctggttttcagagggaaacacttatcggtcatctgctccacaggaaacaccaggccaaccacagctggggataaaatagcacaaccacaccctgccgtccagcgcctcccagcctgtgccccttcctagtaccaccagcaaccatcaatcccgtctcctcctgcctcctctcctgcaatccaccccgccacgactatcgccatggcagccctgatcgcagagaacttccgcttcctgtcacttttcttcaagagcaaggatgtgatgattttcaacggcctggtggcactgggcacggtgggcagccaggagctgttctctgtggtggccttccactgcccctgctcgccggcccggaactacctgtacgggctggcggccatcggcgtgcccgccctggtgctcttcatcattggcatcatcctcaacaaccacacctggaacctcgtggccgagtgccagcaccggaggaccaagaactgctccgccgcccccaccttcctccttctaagctccatcctgggacgtgcggctgtggcccctgtcacctggtctgtcatctccctgctgcgtggtgaggcttatgtctgtgctctcagtgagttcgtggacccttcctcactcacggccagggaagagcacttcccatcagcccacgccactgaaatcctggccaggttcccctgcaaggagaaccctgacaacctgtcagacttccgggaggaggtcagccgcaggctcaggtatgagtcccagctctttggatggctgctcatcggcgtggtggccatcctggtgttcctgaccaagtgcctcaagcattactgctcaccactcagctaccgccaggaggcctactgggcgcagtaccgcgccaatgaggaccagctgttccagcgcacggccgaggtgcactctcgggtgctcgctgccaacaatgtgcgccgcttctttggctttgtggcgctcaacaaggatgatgaggaactgattgccaacttcccaatgctctttgtaaatggcactacttggtcccaaactgaaccccactgcttgctcacatccatatcagaaggggatttttaaaaaactgttatcttcttggccaggggaaaggaccacaaggcaatctggggtgtggacagacccagtagacaatggaagccccagccagcagggccaggtgacagtgaagctcaccagtgggctcctttatggtactctatgcagttaacatgtatctagctgcatagggacacccagcgcagcagtgcaccactgggaagtggcctccagtgcagcctctggccttattttatatatttaaatttttgataaagtttttcttactaaaagga

SEQ ID NO: 9638 - DNA, 1882 bp, Homo sapiens
cacaatcaggcatcttttattcttttctttccctccaacatccctaggaaagagcaaggctcaggatgatttatcctcttttcactgatgaggaatctgaggcccagagaacagtcatgaagtgtgatcagaccctgaggtctccaaaaagataatgtccttgcgaactccagggattctggcatcttgctgtacccaccccagcccacacggcaggatcctatccaagtcccttatccacccggacactcactttagcttttacaccctcaaggctgagaccctaaggacacgccctggatccaaggagtccctggcccctctgctaatatgcgccacctggactcccagagggaaagccggtcagcaccccacatgcattagcaccatgggccacccccaagccctaccccaggagaagctcgtggtggcaaaaagaacctaagcatttgaggcaggtcacccaagcttgaatctcagtctgcctctcatctgtgaccctggcgagccactcgtcctcaggaagccttcactttccctagtgcacggcgggcacacagctcaacgtgggactgtgaggatgggaaatgaggggtgccatgcaccctggaggaactcagtgaacagtggcaactgtcacttccctggggccctatggtccttcctttctccccagcctgtccacactagcatcttcctcaactcctggttttcagagggaaacacttatcggtcatctgctccacaggaaacaccaggccaaccacagctggggataaaatagcacaaccacaccctgccgtccagcgcctcccagcctgtgccccttcctagtaccaccagcaaccatcaatcccgtctcctcctgcctcctctcctgcaatccaccccgccacgactatcgccatggcagccctgatcgcagagaacttccgcttcctgtcacttttcttcaagagcaaggatgtgatgattttcaacggcctggtggcactgggcacggtgggcagccaggagctgttctctgtggtggccttccactgcccctgctcgccggcccggaactacctgtacgggctggcggccatcggcgtgcccgccctggtgctcttcatcattggcatcatcctcaacaaccacacctggaacctcgtggccgagtgccagcaccggaggaccaagaactgctccgccgcccccaccttcctccttctaagctccatcctgggacgtgcggctgtggcccctgtcacctggtctgtcatctccctgctgcgtggtgaggcttatgtctgtgctctcagtgagttcgtggacccttcctcactcacggccagggaagagcacttcccatcagcccacgccactgaaatcctggccaggttcccctgcaaggagaaccctgacaacctgtcagacttccgggaggaggtcagccgcaggctcaggtatgagtcccagctctttggatggctgctcatcggcgtggtggccatcctggtgttcctgaccaagtgcctcaagcattaatgctctttgtaaatggcactacttggtcccaaactgaaccccactgcttgctcacatccatatcagaaggggatttttaaaaaactgttatcttcttggccaggggaaaggaccacaaggcaatctggggtgtggacagacccagtagacaatggaagccccagccagcagggccaggtgacagtgaagctcaccagtgggctcctttatggtactctatgcagttaacatgtatctagctgcatagggacacccagcgcagcagtgcaccactgggaagtggcctccagtgcagcctctggccttattttatatatttaaatttttgataaagtttttcttactaaaagga

SEQ ID NO: 9639 - DNA, 343 bp, Homo sapiens
tatcaagaattctagctttagttatctgctctgtgaggaaaacacctgagtccattccagttacacctctggcttctgttcagatccccatctttctggtggacaggggctggtaggggctcttacctccctgtgtttgtccatttgggctgctaaaacaagacaccttaaaccaggtggctcataaacaacagaaatgtctgtctcacaatgctggaggctgtgaagtccagatccggtgtctaatgagtgcccattttctggttaatagaggatgccttcttgctgtgtcctcacatggtgaaggggtagaattctggtcttttcagccccttataagggc

SEQ ID NO: 9640 - DNA, 361 bp, Homo sapiens
cttttaagtctagctcagatgctacctcctatatgaaaccttttctgggctcttcagttggaagcaatctctttctttcctatatttccagaacaattttctttgtacagcccttataacatccccgtatattgccatgtgctgtcatcatttacatgtgactatcttaatgggactaccgtaagagaaattacctgaaacacacctactattcagtccaatgttcagtcagtggggatggtattatttctgtatgttttgctgtttaaatcaaaggttctctgggaggtggaggtttcaatgagccaagatcacgccactgcactccagcctgggtgacaaagcgagactccatctcaaa

SEQ ID NO: 9641 - DNA, 1612 bp, Homo sapiens
cttagacgctccccagatgattctaatgagcagcctggttgagaactacttcacgtggtagcgcctcctgcccagaaccgtgggatatagccctgggcaaaccctcaccaggatcaggcctgtcttccctatgaggtgtaacctatgctccaggctctgtaatgttcccccaggcaagagcttcctcctccagatttaagggtgcccaggctgggagactgtcccctgtctttcccaggtggtcctgtgcttcttgggctcatcacaggaaagacctgtcccaggtgcaaggtctctctgatgtagaaggcctcccctgagatggacagtctgggggatcttcccacgtgaacctgtctcttgctccgcaggtgtaaggtatgcccactgacctttttcaccaagtcagagatgcagatccactccaagtcgcacacagaggccaagccccacaagtgcccgcactgctccaagtcctttgccaacgcctcctacctggcccagcacctgcgcatccacctgggcgtcaagccctaccactgctcctactgtgataagtccttccggcagctctcccacctccagcagcacaccaggtgagtggcctgcctgctgccctgctgcagcccgactcagctcagcacccgtggcctggcacatggagccagtgcaaggaggggcaaggaccttctccaggtgcccattgccctcggggtcacggcccttgtggacctcactggcctcagctgttgttactgcaccccgtccccactgtttctcatctctaggtctttgcacatgctgtgtcctttaccagagagacacccctctcccgcttttccctgtttctctggccatccccttgtcctctctcagtctagcttcctccaggaagccctccctgattgctctagctgggtgagggacccgacctctgtgtccccacagggctctgtgcatgtccatcatagcagtggtaggctgtcacgcccgtgtctctttatctgcccacctcactcaatctactgggagttcttgaaggcaagagctcagtctcctccatttccatatccccagtttgtggcacaaaataagcaattattaaatattttggaataaatataactggtttttacagagcatatgattcatccatttaacaaatacttatagaaacttttactctatgccagacactattctagatgttgaggatacagcaaggaagaaaacagacgaaaatctctgccttcgtggggcatacagtctagttgagtgtgtgaaagggagactcaaagctataaatgctttaagaaaaatttgtggctgggtgcggtggctcacacctgtaatcccagcactttaggaggctgaggcgggtggatcacctgaggtcaggagttcatgaccagcctggccaacgtggcgaaaccccatctctactaaaaatacaaaaattagctgggtgtggtggtgggcgtctgtaatcccagctacttgggaggcttaggcaggagactcgcttgaacccaggagatggaggctgcagtgggccgagattgcgccattgcactccagcctggatgacaagagtgaaactctgtctcaagag

SEQ ID NO: 9642 - DNA, 246 bp, Homo sapiens
tccgctcacccctgcccccacccacctgtcttcgcaggtctggggctgtccacccggaccccgtctgtgagcacttctgagtcaagcgcgggcgcgggcacgggcacgggtaccagcaccccgtccacacccaccaccaccagccagagccgcctcatcgcctcgtcccccaacccagttcgtccctttccagttttacagtgaattgctgcgggtgcgttgggccaccacggtgcgttggcccaa

SEQ ID NO: 9643 - DNA, 3518 bp, Homo sapiens
gagagccggagcccgagcccggagcctggccggagccccagcccggccctgctcgggccgccgggcgcggggctgcggccgcgtcccggaggcgccgccagcacagccaggtgctgttgggaacacagaggaagtgactggctgggggttcagggaaagctccgtagaagagggaacacttgagctgggtcttgaaggatgagtagaagttcaccaagtgggaaaggacactctaggatggccgagcctcgatttaacaacccctacttctggccccctcctcccaccatgcccagccagctggacaacctggttctgattaacaagatcaaggagcagctgatggccgagaagatcaggccgcctcacctgccgcccacgtcggcctcgtcgcagcagccgttgctagtgccgccggcacccgccgagagcagccaggccgtcatgtcgctgcccaagctgcagcaggtgccggggctgcatccacaggcggtgccgcagcccgacgtggcgctgcacgcacggccggccaccagcaccgtcacaggtctggggctgtccacccggaccccgtctgtgagcacttctgagtcaagcgcgggcgcgggcacgggcacgggtaccagcaccccgtccacacccaccaccaccagccagagccgcctcatcgcctcgtcccccaccctcatctcagggatcaccagcccccctctcctggactccatcaagacaatccagggccacggcctgcttggcccccccaagtccgaacgcggccgcaaaaagatcaaggcggagaacccggggggtccgcctgtccttgtagtcccctatcccatcctggcctcgggcgagactgccaaggagggcaagacgtacaggtgtaaggtatgcccactgacctttttcaccaagtcagagatgcagatccactccaagtcgcacacagaggccaagccccacaagtgcccgcactgctccaagtcctttgccaacgcctcctacctggcccagcacctgcgcatccacctgggcgtcaagccctaccactgctcctactgtgataagtccttccggcagctctcccacctccagcagcacaccagaatccacacaggcgacagaccctacaagtgcccacatcctggctgcgagaaggctttcactcagctctccaacctccagtctcaccagcgccagcacaacaaggacaagccctacaagtgtcccaactgctaccgggcctattcggactccgcttctttgcagatccacctctcggcccacgccatcaagcacgccaaggcctactgctgcagcatgtgtgggcgggcctacacctcggagacctacctgatgaagcacatgtccaaacacacggtggtggagcacctggtgagccatcactcgccccagaggacggagtcccccggcatcccggtgcgaatctctctcatctgagcccactggaggcgccgccccacccggcccactggcagacacagacccaggcagcaccaggccccagctccctccgggggccctccaggaaccaccaagctctctcacgaccttcccaatcttccagaaagcttggtccgcagaagccctgcctggtccagtccgggggcggccaggccaactgcaagattctggactgttttggtggcatccaaagacgatctcagagcactttgaacctctctgttgagttttcttttgttccccacccttcacttgcttcactgtttttttttttttccgttttttttttttaagttggttttggaaataacagaaaagatatttattggccaggaagttggtgctgctaagaccgagaaatttaaagaatcggacagatggacgcagagaaccagagggcaatgtgggaccttctcttgccatggcctcaggtcttgagggaaggctcgggcctaggtttctggactgcaaaggggacccccaggtgggaggggcaggaagcagccggagtgagcccttcgcccctgagtgcctggctcgcacctctcgagctgtgccctgggcatcactgagcagaggggtgcggcagcttcaggaggcggaaacgagaggggtgggagatccacaggaccaaagggtgcagtgatgggctgggtggcgggcccagggaaatggggtggggatgggctgggtaagacctggccctcccctgctgccctgaagaccaccccagtctacctcggtgctggccaggaaacctttcggctacctctcccaccatcccagactgtgggcagggggatggggagggagtgggcctggatctgggacctccctccagaatttcctccagatgggggcagtgcccagggaggggttatttgtcttccctgccatggagtgggaatccccagccgaggccctaggcccctcagcagggaagggatccccggggaggcaggtcccaggagcagaccctgcccccagcccccacagacacaccccaatctgaaagccatgcgtgtcggtgtatataggaaccatgtacagagcccagagaagccccctacatccccccgggaaaaaaaagaaaactagacagaaactcatctatatattctgtatctggagttccgttttgaatattaactgtgttatttttatacactttttaagccttaactcgccattgatttaccagtttaacgtttcctggggtttctttgcccatggggttctctgcccccacccccggccctttgtttgacttgcgtcgtctgatactcagtattgtagctttttgtccgcatgttactccctgtaaatacgctgttatacatactgttaacacccctttgctttttctatgggacctccaggccaccatatttagaactagttaccttattaaaaaagaaaaaacagtctgttggcttctcagtctgcatcttggaggcagggaggtgagggcaggtgcccctcagacacttcaggaaggtagtttgcattctatttaaaaaagggagtggggagcaaatgaaaatcaaatgtggggggaaaacactaaagggggcaagaaacaaaggaattacaaaccctctgctctttgtatttctctgttgtgaagaataaactgtacctgcacccggaaaaaaaaaaagaaaaaaaaaaacaaaaaaaaaaaaaaaaaaaaaaaataaaaaaaaaaagaggggcgggccggcgcccaacaaaatattccccccggaggggcccccacggttcttccgcgcctgcccccccagtttcttcggtgcccaaagaggcggcccccaaagggagagcgacgcctgttatcatgatcacgacggcagcgcgcccgcccgttttaaacaaaccagccggtcggcagggcgggcgacaaacctcccttgctctggcggcaactccttggcgaaaagagaccacctcatcccctccgggggggggcgacgacaccatcagggggccacacctccccccagcagcattttaaccccctccgggggacaata

SEQ ID NO: 9644 - DNA, 3392 bp, Homo sapiens
gagagccggagcccgagcccggagcctggccggagccccagcccggccctgctcgggccgccgggcgcggggctgcggccgcgtcccggaggcgccgccagcacagccaggatggccgagcctcgatttaacaacccctacttctggccccctcctcccaccatgcccagccagctggacaacctggttctgattaacaagatcaaggagcagctgatggccgagaagatcaggccgcctcacctgccgcccacgtcggcctcgtcgcagcagccgttgctagtgccgccggcacccgccgagagcagccaggccgtcatgtcgctgcccaagctgcagcaggtgccggggctgcatccacaggcggtgccgcagcccgacgtggcgctgcacgcacggccggccaccagcaccgtcacaggtctggggctgtccacccggaccccgtctgtgagcacttctgagtcaagcgcgggcgcgggcacgggcacgggtaccagcaccccgtccacacccaccaccaccagccagagccgcctcatcgcctcgtcccccaccctcatctcagggatcaccagcccccctctcctggactccatcaagacaatccagggccacggcctgcttggcccccccaagtccgaacgcggccgcaaaaagatcaaggcggagaacccggggggtccgcctgtccttgtagtcccctatcccatcctggcctcgggcgagactgccaaggagggcaagacgtacaggtgtaaggtatgcccactgacctttttcaccaagtcagagatgcagatccactccaagtcgcacacagaggccaagccccacaagtgcccgcactgctccaagtcctttgccaacgcctcctacctggcccagcacctgcgcatccacctgggcgtcaagccctaccactgctcctactgtgataagtccttccggcagctctcccacctccagcagcacaccagaatccacacaggcgacagaccctacaagtgcccacatcctggctgcgagaaggctttcactcagctctccaacctccagtctcaccagcgccagcacaacaaggacaagccctacaagtgtcccaactgctaccgggcctattcggactccgcttctttgcagatccacctctcggcccacgccatcaagcacgccaaggcctactgctgcagcatgtgtgggcgggcctacacctcggagacctacctgatgaagcacatgtccaaacacacggtggtggagcacctggtgagccatcactcgccccagaggacggagtcccccggcatcccggtgcgaatctctctcatctgagcccactggaggcgccgccccacccggcccactggcagacacagacccaggcagcaccaggccccagctccctccgggggccctccaggaaccaccaagctctctcacgaccttcccaatcttccagaaagcttggtccgcagaagccctgcctggtccagtccgggggcggccaggccaactgcaagattctggactgttttggtggcatccaaagacgatctcagagcactttgaacctctctgttgagttttcttttgttccccacccttcacttgcttcactgtttttttttttttccgttttttttttttaagttggttttggaaataacagaaaagatatttattggccaggaagttggtgctgctaagaccgagaaatttaaagaatcggacagatggacgcagagaaccagagggcaatgtgggaccttctcttgccatggcctcaggtcttgagggaaggctcgggcctaggtttctggactgcaaaggggacccccaggtgggaggggcaggaagcagccggagtgagcccttcgcccctgagtgcctggctcgcacctctcgagctgtgccctgggcatcactgagcagaggggtgcggcagcttcaggaggcggaaacgagaggggtgggagatccacaggaccaaagggtgcagtgatgggctgggtggcgggcccagggaaatggggtggggatgggctgggtaagacctggccctcccctgctgccctgaagaccaccccagtctacctcggtgctggccaggaaacctttcggctacctctcccaccatcccagactgtgggcagggggatggggagggagtgggcctggatctgggacctccctccagaatttcctccagatgggggcagtgcccagggaggggttatttgtcttccctgccatggagtgggaatccccagccgaggccctaggcccctcagcagggaagggatccccggggaggcaggtcccaggagcagaccctgcccccagcccccacagacacaccccaatctgaaagccatgcgtgtcggtgtatataggaaccatgtacagagcccagagaagccccctacatccccccgggaaaaaaaagaaaactagacagaaactcatctatatattctgtatctggagttccgttttgaatattaactgtgttatttttatacactttttaagccttaactcgccattgatttaccagtttaacgtttcctggggtttctttgcccatggggttctctgcccccacccccggccctttgtttgacttgcgtcgtctgatactcagtattgtagctttttgtccgcatgttactccctgtaaatacgctgttatacatactgttaacacccctttgctttttctatgggacctccaggccaccatatttagaactagttaccttattaaaaaagaaaaaacagtctgttggcttctcagtctgcatcttggaggcagggaggtgagggcaggtgcccctcagacacttcaggaaggtagtttgcattctatttaaaaaagggagtggggagcaaatgaaaatcaaatgtggggggaaaacactaaagggggcaagaaacaaaggaattacaaaccctctgctctttgtatttctctgttgtgaagaataaactgtacctgcacccggaaaaaaaaaaagaaaaaaaaaaacaaaaaaaaaaaaaaaaaaaaaaaataaaaaaaaaaagaggggcgggccggcgcccaacaaaatattccccccggaggggcccccacggttcttccgcgcctgcccccccagtttcttcggtgcccaaagaggcggcccccaaagggagagcgacgcctgttatcatgatcacgacggcagcgcgcccgcccgttttaaacaaaccagccggtcggcagggcgggcgacaaacctcccttgctctggcggcaactccttggcgaaaagagaccacctcatcccctccgggggggggcgacgacaccatcagggggccacacctccccccagcagcattttaaccccctccgggggacaata

SEQ ID NO: 9645 - DNA, 3280 bp, Homo sapiens
gagagccggagcccgagcccggagcctggccggagccccagcccggccctgctcgggccgccgggcgcggggctgcggccgcgtcccggaggcgccgccagcacagccaggtgctgttgggaacacagaggaagtgactggctgggggttcagggaaagctccgtagaagagggaacacttgagctgggtcttgaaggatgagtagaagttcaccaagtgggaaaggacactctaggatggccgagcctcgatttaacaacccctacttctggccccctcctcccaccatgcccagccagctggacaacctggttctgattaacaagatcaaggagcagctgatggccgagaagatcaggccgcctcacctgccgcccacgtcggcctcgtcgcagcagccgttgctagtgccgccggcacccgccgagagcagccaggccgtcatgtcgctgcccaagctgcagcaggtgccggggctgcatccacaggcggtgccgcagcccgacgtggcgctgcacgcacggccggccaccagcaccgtcacaggtctggggctgtccacccggaccccgtctgtgagcacttctgagtcaagcgcgggcgcgggcacgggcacgggtaccagcaccccgtccacacccaccaccaccagccagagccgcctcatcgcctcgtcccccaccctcatctcagggatcaccagcccccctctcctggactccatcaagacaatccagggccacggcctgcttggcccccccaagtccgaacgcggccgcaaaaagatcaaggcggagaacccggggggtccgcctgtccttgtagtcccctatcccatcctggcctcgggcgagactgccaaggagggcaagacgtacaggtgtaaggtatgcccactgacctttttcaccaagtcagagatgcagatccactccaagtcgcacacagaggccaagccccacaagtgcccgcactgctccaagtcctttgccaacgcctcctacctggcccagcacctgcgcatccacctgggcgtcaagccctaccactgctcctactgtgataagtccttccggcagctctcccacctccagcagcacaccaggagacctacctgatgaagcacatgtccaaacacacggtggtggagcacctggtgagccatcactcgccccagaggacggagtcccccggcatcccggtgcgaatctctctcatctgagcccactggaggcgccgccccacccggcccactggcagacacagacccaggcagcaccaggccccagctccctccgggggccctccaggaaccaccaagctctctcacgaccttcccaatcttccagaaagcttggtccgcagaagccctgcctggtccagtccgggggcggccaggccaactgcaagattctggactgttttggtggcatccaaagacgatctcagagcactttgaacctctctgttgagttttcttttgttccccacccttcacttgcttcactgtttttttttttttccgttttttttttttaagttggttttggaaataacagaaaagatatttattggccaggaagttggtgctgctaagaccgagaaatttaaagaatcggacagatggacgcagagaaccagagggcaatgtgggaccttctcttgccatggcctcaggtcttgagggaaggctcgggcctaggtttctggactgcaaaggggacccccaggtgggaggggcaggaagcagccggagtgagcccttcgcccctgagtgcctggctcgcacctctcgagctgtgccctgggcatcactgagcagaggggtgcggcagcttcaggaggcggaaacgagaggggtgggagatccacaggaccaaagggtgcagtgatgggctgggtggcgggcccagggaaatggggtggggatgggctgggtaagacctggccctcccctgctgccctgaagaccaccccagtctacctcggtgctggccaggaaacctttcggctacctctcccaccatcccagactgtgggcagggggatggggagggagtgggcctggatctgggacctccctccagaatttcctccagatgggggcagtgcccagggaggggttatttgtcttccctgccatggagtgggaatccccagccgaggccctaggcccctcagcagggaagggatccccggggaggcaggtcccaggagcagaccctgcccccagcccccacagacacaccccaatctgaaagccatgcgtgtcggtgtatataggaaccatgtacagagcccagagaagccccctacatccccccgggaaaaaaaagaaaactagacagaaactcatctatatattctgtatctggagttccgttttgaatattaactgtgttatttttatacactttttaagccttaactcgccattgatttaccagtttaacgtttcctggggtttctttgcccatggggttctctgcccccacccccggccctttgtttgacttgcgtcgtctgatactcagtattgtagctttttgtccgcatgttactccctgtaaatacgctgttatacatactgttaacacccctttgctttttctatgggacctccaggccaccatatttagaactagttaccttattaaaaaagaaaaaacagtctgttggcttctcagtctgcatcttggaggcagggaggtgagggcaggtgcccctcagacacttcaggaaggtagtttgcattctatttaaaaaagggagtggggagcaaatgaaaatcaaatgtggggggaaaacactaaagggggcaagaaacaaaggaattacaaaccctctgctctttgtatttctctgttgtgaagaataaactgtacctgcacccggaaaaaaaaaaagaaaaaaaaaaacaaaaaaaaaaaaaaaaaaaaaaaataaaaaaaaaaagaggggcgggccggcgcccaacaaaatattccccccggaggggcccccacggttcttccgcgcctgcccccccagtttcttcggtgcccaaagaggcggcccccaaagggagagcgacgcctgttatcatgatcacgacggcagcgcgcccgcccgttttaaacaaaccagccggtcggcagggcgggcgacaaacctcccttgctctggcggcaactccttggcgaaaagagaccacctcatcccctccgggggggggcgacgacaccatcagggggccacacctccccccagcagcattttaaccccctccgggggacaata

SEQ ID NO: 9646 - DNA, 2689 bp, Homo sapiens
gagagccggagcccgagcccggagcctggccggagccccagcccggccctgctcgggccgccgggcgcggggctgcggccgcgtcccggaggcgccgccagcacagccaggtgctgttgggaacacagaggaagtgactggctgggggttcagggaaagctccgtagaagagggaacacttgagctgggtcttgaaggatgagtagaagttcaccaagtgggaaaggacactctaggatggccgagcctcgatttaacaacccctacttctggccccctcctcccaccatgcccagccagctggacaacctggttctgattaacaagatcaaggagcagctgatggccgagaagatcaggccgcctcacctgccgcccacgtcggcctcgtcgcagcagccgttgctagtgccgccggcacccgccgagagcagccaggccgtcatgtcgctgcccaagctgcagcaggtgccggggctgcatccacaggcggtgccgcagcccgacgtggcgctgcacgcacggccggccaccagcaccgtcacaggtctggggctgtccacccggaccccgtctgtgagcacttctgagtcaagcgcgggcgcgggcacgggcacgggtaccagcaccccgtccacacccaccaccaccagccagagccgcctcatcgcctcgtcccccaccctcatctcagggatcaccagcccccctctcctggactccatcaagacaatccagggccacggcctgcttggcccccccaagtccgaacgcggccgcaaaaagatcaaggcggagaacccggggggtccgcctgtccttgtagtcccctatcccatcctggcctcgggcgagactgccaaggagggcaagacgtacaggtgtaaggtatgcccactgacctttttcaccaagtcagagatgcagatccactccaagtcgcacacagaggccaagccccacaagtgcccgcactgctccaagtcctttgccaacgcctcctacctggcccagcacctgcgcatccacctgggcgtcaagccctaccactgctcctactgtgataagtccttccggcagctctcccacctccagcagcacaccagaatccacacaggcgacagaccctacaagtgcccacatcctggctgcgagaaggctttcactcagctctccaacctccagtgcctggctcgcacctctcgagctgtgccctgggcatcactgagcagaggggtgcggcagcttcaggaggcggaaacgagaggggtgggagatccacaggaccaaagggtgcagtgatgggctgggtggcgggcccagggaaatggggtggggatgggctgggtaagacctggccctcccctgctgccctgaagaccaccccagtctacctcggtgctggccaggaaacctttcggctacctctcccaccatcccagactgtgggcagggggatggggagggagtgggcctggatctgggacctccctccagaatttcctccagatgggggcagtgcccagggaggggttatttgtcttccctgccatggagtgggaatccccagccgaggccctaggcccctcagcagggaagggatccccggggaggcaggtcccaggagcagaccctgcccccagcccccacagacacaccccaatctgaaagccatgcgtgtcggtgtatataggaaccatgtacagagcccagagaagccccctacatccccccgggaaaaaaaagaaaactagacagaaactcatctatatattctgtatctggagttccgttttgaatattaactgtgttatttttatacactttttaagccttaactcgccattgatttaccagtttaacgtttcctggggtttctttgcccatggggttctctgcccccacccccggccctttgtttgacttgcgtcgtctgatactcagtattgtagctttttgtccgcatgttactccctgtaaatacgctgttatacatactgttaacacccctttgctttttctatgggacctccaggccaccatatttagaactagttaccttattaaaaaagaaaaaacagtctgttggcttctcagtctgcatcttggaggcagggaggtgagggcaggtgcccctcagacacttcaggaaggtagtttgcattctatttaaaaaagggagtggggagcaaatgaaaatcaaatgtggggggaaaacactaaagggggcaagaaacaaaggaattacaaaccctctgctctttgtatttctctgttgtgaagaataaactgtacctgcacccggaaaaaaaaaaagaaaaaaaaaaacaaaaaaaaaaaaaaaaaaaaaaaataaaaaaaaaaagaggggcgggccggcgcccaacaaaatattccccccggaggggcccccacggttcttccgcgcctgcccccccagtttcttcggtgcccaaagaggcggcccccaaagggagagcgacgcctgttatcatgatcacgacggcagcgcgcccgcccgttttaaacaaaccagccggtcggcagggcgggcgacaaacctcccttgctctggcggcaactccttggcgaaaagagaccacctcatcccctccgggggggggcgacgacaccatcagggggccacacctccccccagcagcattttaaccccctccgggggacaata

SEQ ID NO: 9647 - DNA, 1491 bp, Homo sapiens
gagagccggagcccgagcccggagcctggccggagccccagcccggccctgctcgggccgccgggcgcggggctgcggccgcgtcccggaggcgccgccagcacagccaggtgctgttgggaacacagaggaagtgactggctgggggttcagggaaagctccgtagaagagggaacacttgagctgggtcttgaaggatgagtagaagttcaccaagtgggaaaggacactctagggtagcaggaagacaaaccttctggaagactgagatagccctggatctgggacctccctccagaatttcctccagatgggggcagtgcccagggaggggttatttgtcttccctgccatggagtgggaatccccagccgaggccctaggcccctcagcagggaagggatccccggggaggcaggtcccaggagcagaccctgcccccagcccccacagacacaccccaatctgaaagccatgcgtgtcggtgtatataggaaccatgtacagagcccagagaagccccctacatccccccgggaaaaaaaagaaaactagacagaaactcatctatatattctgtatctggagttccgttttgaatattaactgtgttatttttatacactttttaagccttaactcgccattgatttaccagtttaacgtttcctggggtttctttgcccatggggttctctgcccccacccccggccctttgtttgacttgcgtcgtctgatactcagtattgtagctttttgtccgcatgttactccctgtaaatacgctgttatacatactgttaacacccctttgctttttctatgggacctccaggccaccatatttagaactagttaccttattaaaaaagaaaaaacagtctgttggcttctcagtctgcatcttggaggcagggaggtgagggcaggtgcccctcagacacttcaggaaggtagtttgcattctatttaaaaaagggagtggggagcaaatgaaaatcaaatgtggggggaaaacactaaagggggcaagaaacaaaggaattacaaaccctctgctctttgtatttctctgttgtgaagaataaactgtacctgcacccggaaaaaaaaaaagaaaaaaaaaaacaaaaaaaaaaaaaaaaaaaaaaaataaaaaaaaaaagaggggcgggccggcgcccaacaaaatattccccccggaggggcccccacggttcttccgcgcctgcccccccagtttcttcggtgcccaaagaggcggcccccaaagggagagcgacgcctgttatcatgatcacgacggcagcgcgcccgcccgttttaaacaaaccagccggtcggcagggcgggcgacaaacctcccttgctctggcggcaactccttggcgaaaagagaccacctcatcccctccgggggggggcgacgacaccatcagggggccacacctccccccagcagcattttaaccccctccgggggacaata

SEQ ID NO: 9648 - DNA, 1370 bp, Homo sapiens
ggtcagactctcagaggatccccctcgggctcttacccttgtccttccaaggatttcccaggatatccagcgaagacatagcgtccaaagcggttcccctgagattccccgcggtttccccggtgcaatgcgagagaaaggtgcaccggggagtagctggcaaaccaggcccccgggctccgcgtggtccaacgcgtcctcgagcttcaaggggttatttgtcttccctgccatggagtgggaatccccagccgaggccctaggcccctcagcagggaagggatccccggggaggcaggtcccaggagcagaccctgcccccagcccccacagacacaccccaatctgaaagccatgcgtgtcggtgtatataggaaccatgtacagagcccagagaagccccctacatccccccgggaaaaaaaagaaaactagacagaaactcatctatatattctgtatctggagttccgttttgaatattaactgtgttatttttatacactttttaagccttaactcgccattgatttaccagtttaacgtttcctggggtttctttgcccatggggttctctgcccccacccccggccctttgtttgacttgcgtcgtctgatactcagtattgtagctttttgtccgcatgttactccctgtaaatacgctgttatacatactgttaacacccctttgctttttctatgggacctccaggccaccatatttagaactagttaccttattaaaaaagaaaaaacagtctgttggcttctcagtctgcatcttggaggcagggaggtgagggcaggtgcccctcagacacttcaggaaggtagtttgcattctatttaaaaaagggagtggggagcaaatgaaaatcaaatgtggggggaaaacactaaagggggcaagaaacaaaggaattacaaaccctctgctctttgtatttctctgttgtgaagaataaactgtacctgcacccggaaaaaaaaaaagaaaaaaaaaaacaaaaaaaaaaaaaaaaaaaaaaaataaaaaaaaaaagaggggcgggccggcgcccaacaaaatattccccccggaggggcccccacggttcttccgcgcctgcccccccagtttcttcggtgcccaaagaggcggcccccaaagggagagcgacgcctgttatcatgatcacgacggcagcgcgcccgcccgttttaaacaaaccagccggtcggcagggcgggcgacaaacctcccttgctctggcggcaactccttggcgaaaagagaccacctcatcccctccgggggggggcgacgacaccatcagggggccacacctccccccagcagcattttaaccccctccgggggacaata

SEQ ID NO: 9649 - DNA, 1094 bp, Homo sapiens
actctctaatttccaccgctacagaatccacacagaccctgcccccagcccccacagacacaccccaatctgaaagccatgcgtgtcggtgtatataggaaccatgtacagagcccagagaagccccctacatccccccgggaaaaaaaagaaaactagacagaaactcatctatatattctgtatctggagttccgttttgaatattaactgtgttatttttatacactttttaagccttaactcgccattgatttaccagtttaacgtttcctggggtttctttgcccatggggttctctgcccccacccccggccctttgtttgacttgcgtcgtctgatactcagtattgtagctttttgtccgcatgttactccctgtaaatacgctgttatacatactgttaacacccctttgctttttctatgggacctccaggccaccatatttagaactagttaccttattaaaaaagaaaaaacagtctgttggcttctcagtctgcatcttggaggcagggaggtgagggcaggtgcccctcagacacttcaggaaggtagtttgcattctatttaaaaaagggagtggggagcaaatgaaaatcaaatgtggggggaaaacactaaagggggcaagaaacaaaggaattacaaaccctctgctctttgtatttctctgttgtgaagaataaactgtacctgcacccggaaaaaaaaaaagaaaaaaaaaaacaaaaaaaaaaaaaaaaaaaaaaaataaaaaaaaaaagaggggcgggccggcgcccaacaaaatattccccccggaggggcccccacggttcttccgcgcctgcccccccagtttcttcggtgcccaaagaggcggcccccaaagggagagcgacgcctgttatcatgatcacgacggcagcgcgcccgcccgttttaaacaaaccagccggtcggcagggcgggcgacaaacctcccttgctctggcggcaactccttggcgaaaagagaccacctcatcccctccgggggggggcgacgacaccatcagggggccacacctccccccagcagcattttaaccccctccgggggacaata

SEQ ID NO: 9650 - DNA, 2254 bp, Homo sapiens
gagagccggagcccgagcccggagcctggccggagccccagcccggccctgctcgggccgccgggcgcggggctgcggccgcgtcccggaggcgccgccagcacagccaggtgctgttgggaacacagaggaagtgactggctgggggttcagggaaagctccgtagaagagggaacacttgagctgggtcttgaaggatgagtagaagttcaccaagtgggaaaggacactctaggatggccgagcctcgatttaacaacccctacttctggccccctcctcccaccatgcccagccagctggacaacctggttctgattaacaagatcaaggagcagctgatggccgagaagatcaggccgcctcacctgccgcccacgtcggcctcgtcgcagcagccgttgctagtgccgccggcacccgccgagagcagccaggccgtcatgtcgctgcccaagctgcagcaggtgccggggctgcatccacaggcggtgccgcagcccgacgtggcgctgcacgcacggccggccaccagcaccgtcacaggtctggggctgtccacccggaccccgtctgtgagcacttctgagtcaagcgcgggcgcgggcacgggcacgggtaccagcaccccgtccacacccaccaccaccagccagagccgcctcatcgcctcgtcccccaccctcatctcagggatcaccagcccccctctcctggactccatcaagacaatccagggccacggcctgcttggcccccccaagtccgaacgcggccgcaaaaagatcaaggcggagaacccggggggtccgcctgtccttgtagtcccctatcccatcctggcctcgggcgagactgccaaggagggcaagacgtacaggtgtaaggtatgcccactgacctttttcaccaagtcagagatgcagatccactccaagtcgcacacagaggccaagccccacaagtgcccgcactgctccaagtcctttgccaacgcctcctacctggcccagcacctgcgcatccacctgggcgtcaagccctaccactgctcctactgtgataagtccttccggcagctctcccacctccagcagcacaccagaatccacacaggcgacagaccctacaagtgcccacatcctggctgcgagaaggctttcactcagctctccaacctccagtctcaccagcgccagcacaacaaggacaagccctacaagtgtcccaactgctaccgggcctattcggactccgcttctttgcagatccacctctcggcccacgccatcaagcacgccaaggcctactgctgcagcatgtgtgggcgggcctacacctcggagacctacctgatgaagcacatgtccaaacacacggtggtggagcacctggtgagccatcactcgccccagaggacggagtcccccggcatcccggtgcgaatctctctcatctgagcccactggaggcgccgccccacccggcccactggcagacacagacccaggcagcaccaggccccagctccctccgggggccctccaggaaccaccaagctctctcacgaccttcccaatcttccagaaagcttggtccgcagaagccctgcctggtccagtccgggggcggccaggccaactgcaagattctggactgttttggtggcatccaaagacgatctcagagcactttgaacctctctgttgagttttcttttgttccccacccttcacttgcttcactgtttttttttttttccgttttttttttttaagttggttttggaaataacagaaaagatatttattggccaggaagttggtgctgctaagaccgagaaatttaaagaatcggacagatggacgcagagaaccagagggcaatgtgggaccttctcttgccatggcctcaggtcttgagggaaggctcgggcctaggtttctggactgcaaaggggacccccaggtgggaggggcaggaagcagccggagtgagcccttcgcccctgagtgcctggctcgcacctctcgagctgtgccctgggcatcactgagcagaggggtgcggcagcttcaggaggcggaaacgagaggggtgggagatccacaggaccaaagggtgcagtgatgggctgggtggcgggcccagggaaatggttttgtttattttttatttttatatttttttttatttttttattgattattttttctttttttttattatttttttattttattatttttttgt

SEQ ID NO: 9651 - DNA, 1481 bp, Homo sapiens
  misc_feature (1314)..(1314): n is a, c, g, or t
  misc_feature (1377)..(1377): n is a, c, g, or t
  misc_feature (1390)..(1390): n is a, c, g, or t
  misc_feature (1407)..(1407): n is a, c, g, or t
  misc_feature (1425)..(1425): n is a, c, g, or t
gagagccggagcccgagcccggagcctggccggagccccagcccggccctgctcgggccgccgggcgcggggctgcggccgcgtcccggaggcgccgccagcacagccaggtgctgttgggaacacagaggaagtgactggctgggggttcagggaaagctccgtagaagagggaacacttgagctgggtcttgaaggatgagtagaagttcaccaagtgggaaaggacactctaggatggccgagcctcgatttaacaacccctacttctggccccctcctcccaccatgcccagccagctggacaacctggttctgattaacaagatcaaggagcagctgatggccgagaagatcaggccgcctcacctgccgcccacgtcggcctcgtcgcagcagccgttgctagtgccgccggcacccgccgagagcagccaggccgtcatgtcgctgcccaagctgcagcaggtgccggggctgcatccacaggcggtgccgcagcccgacgtggcgctgcacgcacggccggccaccagcaccgtcacaggtctggggctgtccacccggaccccgtctgtgagcacttctgagtcaagcgcgggcgcgggcacgggcacgggtaccagcaccccgtccacacccaccaccaccagccagagccgcctcatcgcctcgtcccccaccctcatctcagggatcaccagcccccctctcctggactccatcaagacaatccagggccacggcctgcttggcccccccaagtccgaacgcggccgcaaaaagatcaaggcggagaacccggggggtccgcctgtccttgtagtcccctatcccatcctggcctcgggcgagactgccaaggagggcaagacgtacaggtgtaaggtatgcccactgacctttttcaccaagtcagagatgcagatccactccaagtcgcacacagaggccaagccccacaagtgcccgcactgctccaagtcctttgccaacgcctcctacctggcccagcacctgcgcatccacctgggcgtcaagccctaccactgctcctactgtgataagtccttccggcagctctcccacctccagcagcacaccagaatccacacaggcgacagaccctacaagtgcccacatcctggctgcgagaaggctttcactcagctctccaacctccagtctcaccagcgccagcacaacaaggacaagccctacaagtgtcccaactgctaccgggcctattcggactccgcttctttgcagatccgctatccgtcgacggatagcggatctgcacgtggaatacanggctggttgcatgcaacggcaaagggcatgctcttctgcctgggggagggcctcttgtccctnccagcaggtcccngggacagggctggcagncaccccagtcccaaatangatgacaacaagaggaaacaaaccaaaatggaggagagccatccggctggaggagg

SEQ ID NO: 9652 - DNA, 1415 bp, Homo sapiens
  misc_feature (1341)..(1341): n is a, c, g, or t
  misc_feature (1350)..(1350): n is a, c, g, or t
gagagccggagcccgagcccggagcctggccggagccccagcccggccctgctcgggccgccgggcgcggggctgcggccgcgtcccggaggcgccgccagcacagccaggtgctgttgggaacacagaggaagtgactggctgggggttcagggaaagctccgtagaagagggaacacttgagctgggtcttgaaggatgagtagaagttcaccaagtgggaaaggacactctaggatggccgagcctcgatttaacaacccctacttctggccccctcctcccaccatgcccagccagctggacaacctggttctgattaacaagatcaaggagcagctgatggccgagaagatcaggccgcctcacctgccgcccacgtcggcctcgtcgcagcagccgttgctagtgccgccggcacccgccgagagcagccaggccgtcatgtcgctgcccaagctgcagcaggtgccggggctgcatccacaggcggtgccgcagcccgacgtggcgctgcacgcacggccggccaccagcaccgtcacaggtctggggctgtccacccggaccccgtctgtgagcacttctgagtcaagcgcgggcgcgggcacgggcacgggtaccagcaccccgtccacacccaccaccaccagccagagccgcctcatcgcctcgtcccccaccctcatctcagggatcaccagcccccctctcctggactccatcaagacaatccagggccacggcctgcttggcccccccaagtccgaacgcggccgcaaaaagatcaaggcggagaacccggggggtccgcctgtccttgtagtcccctatcccatcctggcctcgggcgagactgccaaggagggcaagacgtacaggtgtaaggtatgcccactgacctttttcaccaagtcagagatgcagatccactccaagtcgcacacagaggccaagccccacaagtgcccgcactgctccaagtcctttgccaacgcctcctacctggcccagcacctgcgcatccacctgggcgtcaagccctaccactgctcctactgtgataagtccttccggcagctctcccacctccagcagcacaccagaatccacacaggcgacagaccctacaagtgcccacatcctggctgcgagaaggctttcactcagctctccaacctccagtctcaccagcgccagcacaacaaggacaagccctacaagtgtcccaactgctaccgggcctattcggactccgcttctttgcagatccgctatccgtcgacggatagcggatctgcagagctgctgaaccagtagcaaccaggtccggagaaaggnctctcttgnggaagaatgagagccaagccggggaagggttcatcctgcaaagctggggcagaaggtcttccttg

SEQ ID NO: 9653 - DNA, 1793 bp, Homo sapiens
gagagccggagcccgagcccggagcctggccggagccccagcccggccctgctcgggccgccgggcgcggggctgcggccgcgtcccggaggcgccgccagcacagccaggtgctgttgggaacacagaggaagtgactggctgggggttcagggaaagctccgtagaagagggaacacttgagctgggtcttgaaggatgagtagaagttcaccaagtgggaaaggacactctaggatggccgagcctcgatttaacaacccctacttctggccccctcctcccaccatgcccagccagctggacaacctggttctgattaacaagatcaaggagcagctgatggccgagaagatcaggccgcctcacctgccgcccacgtcggcctcgtcgcagcagccgttgctagtgccgccggcacccgccgagagcagccaggccgtcatgtcgctgcccaagctgcagcaggtgccggggctgcatccacaggcggtgccgcagcccgacgtggcgctgcacgcacggccggccaccagcaccgtcacaggtctggggctgtccacccggaccccgtctgtgagcacttctgagtcaagcgcgggcgcgggcacgggcacgggtaccagcaccccgtccacacccaccaccaccagccagagccgcctcatcgcctcgtcccccaccctcatctcagggatcaccagcccccctctcctggactccatcaagacaatccagggccacggcctgcttggcccccccaagtccgaacgcggccgcaaaaagatcaaggcggagaacccggggggtccgcctgtccttgtagtcccctatcccatcctggcctcgggcgagactgccaaggagggcaagacgtacaggtgtaaggtatgcccactgacctttttcaccaagtcagagatgcagatccactccaagtcgcacacagaggccaagccccacaagtgcccgcactgctccaagtcctttgccaacgcctcctacctggcccagcacctgcgcatccacctgggcgtcaagccctaccactgctcctactgtgataagtccttccggcagctctcccacctccagcagcacaccagaatccacacaggcgacagaccctacaagtgcccacatcctggctgcgagaaggctttcactcagctctccaacctccagtctcaccagcgccagcacaacaaggacaagccctacaagtgtcccaactgctaccgggcctattcggactccgcttctttgcagatccacctctcggcccacgccatcaagcacgccaaggcctactgctgcagcatgtgtgggcgggcctacacctcggagacctacctgatgaagcacatgtccaaacacacggtggtggagcacctggtgagccatcactcgccccagaggacggagtcccccggcatcccggtgcgaatctctctcatctgagcccacttgacctttttcaccaagtcagagatgcagatccactccaagtcgcacacagaggcaaagccccacaagtgcccgcactgctccaagtcctttgccaacgcctcctacctggcccagcacctgcgcatccacctgggcgtcaagccctaccactgctcctactgtgataagtccttccggcagctctcccacctccagcagcacaccagaatccacacaggcgacagaccctacaagtgcccacatcctgcctgcgagaaggctttcactcagctctccaacctccagacccggcatctatcgcaataccatatttaacacgttca

SEQ ID NO: 9654 - DNA, 2122 bp, Homo sapiens
gagagccggagcccgagcccggagcctggccggagccccagcccggccctgctcgggccgccgggcgcggggctgcggccgcgtcccggaggcgccgccagcacagccaggtgctgttgggaacacagaggaagtgactggctgggggttcagggaaagctccgtagaagagggaacacttgagctgggtcttgaaggatgagtagaagttcaccaagtgggaaaggacactctaggatggccgagcctcgatttaacaacccctacttctggccccctcctcccaccatgcccagccagctggacaacctggttctgattaacaagatcaaggagcagctgatggccgagaagatcaggccgcctcacctgccgcccacgtcggcctcgtcgcagcagccgttgctagtgccgccggcacccgccgagagcagccaggccgtcatgtcgctgcccaagctgcagcaggtgccggggctgcatccacaggcggtgccgcagcccgacgtggcgctgcacgcacggccggccaccagcaccgtcacaggtctggggctgtccacccggaccccgtctgtgagcacttctgagtcaagcgcgggcgcgggcacgggcacgggtaccagcaccccgtccacacccaccaccaccagccagagccgcctcatcgcctcgtcccccaccctcatctcagggatcaccagcccccctctcctggactccatcaagacaatccagggccacggcctgcttggcccccccaagtccgaacgcggccgcaaaaagatcaaggcggagaacccggggggtccgcctgtccttgtagtcccctatcccatcctggcctcgggcgagactgccaaggagggcaagacgtacaggtgtaaggtatgcccactgacctttttcaccaagtcagagatgcagatccactccaagtcgcacacagaggccaagccccacaagtgcccgcactgctccaagtcctttgccaacgcctcctacctggcccagcacctgcgcatccacctgggcgtcaagccctaccactgctcctactgtgataagtccttccggcagctctcccacctccagcagcacaccaggtgagtggcctgcctgctgccctgctgcagcccgactcagctcagcacccgtggcctggcacatggagccagtgcaaggaggggcaaggaccttctccaggtgcccattgccctcggggtcacggcccttgtggacctcactggcctcagctgttgttactgcaccccgtccccactgtttctcatctctaggtctttgcacatgctgtgtcctttaccagagagacacccctctcccgcttttccctgtttctctggccatccccttgtcctctctcagtctagcttcctccaggaagccctccctgattgctctagctgggtgagggacccgacctctgtgtccccacagggctctgtgcatgtccatcatagcagtggtaggctgtcacgcccgtgtctctttatctgcccacctcactcaatctactgggagttcttgaaggcaagagctcagtctcctccatttccatatccccagtttgtggcacaaaataagcaattattaaatattttggaataaatataactggtttttacagagcatatgattcatccatttaacaaatacttatagaaacttttactctatgccagacactattctagatgttgaggatacagcaaggaagaaaacagacgaaaatctctgccttcgtggggcatacagtctagttgagtgtgtgaaagggagactcaaagctataaatgctttaagaaaaatttgtggctgggtgcggtggctcacacctgtaatcccagcactttaggaggctgaggcgggtggatcacctgaggtcaggagttcatgaccagcctggccaacgtggcgaaaccccatctctactaaaaatacaaaaattagctgggtgtggtggtgggcgtctgtaatcccagctacttgggaggcttaggcaggagactcgcttgaacccaggagatggaggctgcagtgggccgagattgcgccattgcactccagcctggatgacaagagtgaaactctgtctcaagag

SEQ ID NO: 9655 - DNA, 1273 bp, Homo sapiens
gagagccggagcccgagcccggagcctggccggagccccagcccggccctgctcgggccgccgggcgcggggctgcggccgcgtcccggaggcgccgccagcacagccaggtgctgttgggaacacagaggaagtgactggctgggggttcagggaaagctccgtagaagagggaacacttgagctgggtcttgaaggatgagtagaagttcaccaagtgggaaaggacactctaggatggccgagcctcgatttaacaacccctacttctggccccctcctcccaccatgcccagccagctggacaacctggttctgattaacaagatcaaggagcagctgatggccgagaagatcaggccgcctcacctgccgcccacgtcggcctcgtcgcagcagccgttgctagtgccgccggcacccgccgagagcagccaggccgtcatgtcgctgcccaagctgcagcaggtgccggggctgcatccacaggcggtgccgcagcccgacgtggcgctgcacgcacggccggccaccagcaccgtcacaggtctggggctgtccacccggaccccgtctgtgagcacttctgagtcaagcgcgggcgcgggcacgggcacgggtaccagcaccccgtccacacccaccaccaccagccagagccgcctcatcgcctcgtcccccaccctcatctcagggatcaccagcccccctctcctggactccatcaagacaatccagggccacggcctgcttggcccccccaagtccgaacgcggccgcaaaaagatcaaggcggagaacccggggggtccgcctgtccttgtagtcccctatcccatcctggcctcgggcgagactgccaaggagggcaagacgtacaggtgggggtcttggcgggatggggtccgagtgggcttggggctggggcttgagccagggctgctccaggagcccagcagcggggctgaaacaggacccttagggctgaggggcagggctagggtccagaggggcggggccttctggagagccccacccacatcccaagtcccagttcggggagggctgctggggaggggaatagaggcttggacccttaggtgtggtctgtggctggcagccacccccacagcctggggttgtgagagtcggtttcctcctccctttaagcagtgttctcaaccctggccaccttagaatcacctgaagaggccgtgcacaatggctcatccctgtaatcccagcgctttgggaggccaaggcgggtggatca

SEQ ID NO: 9656 - DNA, 261 bp, Homo sapiens
tagctggcactttactattattattattgttattattgttattgttattcccatatacaaggtgctgttgggaacacagaggaagtgactggctgggggttcagggaaagctccgtagaagagggaacacttgagctgggtcttgaaggatgagtagaagttcaccaagtgggaaaggacactctaggtaaggagcctgtgattccaggttgcactctgtcaatgagggtttgttctttgggggattaaagcattgtgttc

SEQ ID NO: 9657 - DNA, 292 bp, Homo sapiens
taaatttggcatgtaggtaagagctgaatggctttcttcctcttaattttctaaacttcaaagtgcaagggaatctaattacagggtagagaagtactgtttcatcttctgactaattggaggctaaatctagaagtaatgtctgctgctacatccatatgacgctgtagaacatactttacaccttaatgatatgtgcacatttgttgcctctccagtaagcttgcttaggctcttcctttctccaggttctcttttactccaaagggagatgtagtaggacagaatatct

SEQ ID NO: 9658 - DNA, 4643 bp, Homo sapiens
tgcagcgctggtcgcagccctcagctgcgccgggcggttccggctcctccctctccttgtgcctcagcgccaccatggtgctggagtcggtggtcgcggacttgctgaaccgcttcctgggggactatgtggagaacctgaacaagtcccagctgaagctgggcatctggggcggaaatgtggctttagataatctacagataaaagaaaatgccctgagtgaattggatgttccttttaaagtcaaggctggccaaattgataaattaactttgaagattccttggaagaacctttatggagaagcagttgttgcgaccctggaaggattatacctgcttgttgtccctggagcaagtattaagtatgatgctgtaaaagaagaaaaatccttgcaggatgttaaacagaaagagctatcccgaattgaagaagcccttcaaaaagcagcagaaaaaggcacacattcaggggagttcatatatggcttggagaactttgtttacaaggacatcaagcctggacgtaaacgtaaaaagcacaaaaaacattttaagaaaccttttaaaggtcttgatcgttcaaaagataagccaaaagaagccaaaaaggatacatttgtggaaaaattggcaactcaagtaataaaaaatgtacaagtaaaaatcacagatattcacattaaatatgaagatgatgtcactgatccaaagcggcctctttcatttggtgtcacactgggagagcttagtctactgactgcaaatgaacactggactccatgcatattaaatgaagcagacaaaattatatacaagcttatacgacttgatagtcttagcgcctactggaatgtaaattgcagcatgtcttaccagagatcaagggaacagattttggatcagctgaaaaatgaaattcttacaagtggaaatatacccccaaattatcaatacattttccagccaatatcagcctctgcaaaactctacatgaatccttatgcagaatcagagctcaaaacgcccaaactggattgcaacatagaaatacaaaatattgccattgaactgaccaaacctcagtacttaagtatgattgaccttttggagtcagtggattatatggttaggaatgcgccttataggaaatacaagccttatttaccacttcataccaatggtcgacgatggtggaaatatgcaattgattctgttcttgaagttcatataagaaggtatacacagatgtggtcatggagtaacataaaaaagcacaggcagttactcaagagttataaaattgcctacaaaaacaagttaacacagtctaaagtctcagaagaaatacagaaagaaattcaggacttggagaagactctagatgtttttaacataattttagcaaggcaacaagcacaagttgaggtgattcggtctgggcaaaaattaaggaaaaagtctgctgacacaggcgagaaacgtggaggctggtttagtgggttgtggggtaagaaagagtctaagaaaaaggacgaagaatcattgattcctgaaactattgatgaccttatgactccagaggaaaaagataaactcttcactgccattggttatagtgagagtacccacaacctaactttacctaagcagtatgttgcccatattatgaccctgaagttagtaagcacctctgttacgataagagaaaacaagaatattccagaaatactaaaaattcagataattggcctgggcactcaagtatctcagcgaccaggagcacaagcacttaaggtagaagcgaaattagaacactggtatataacaggtttgagacagcaggatattgtgccatcacttgtggcttcaattggtgacactacatcatccttgcttaaaattaaatttgaaaccaatccggaggatagtcctgctgaccagactctgattgttcagtcccagcctgtggaggtcatctatgatgctaaaactgtcaatgcagtggttgaattctttcaatcaaataagggattggatcttgagcaaataacatcagcaacattgatgaagctggaagaaattaaggagagaacagctacaggacttacacatattattgaaactcgaaaagtccttgatttaaggataaatctgaagccttcttatctagtagttccacagacgggtttccaccatgaaaagtcagatcttctgattttagattttggtacatttcagctcaacagtaaagatcaaggtttacagaagactactaattcatctctggaagaaataatggataaggcatatgacaagtttgatgttgaaataaaaaatgtacaactactttttgcaagagcagaggaaacctggaaaaagtgtcgatttcagcatccatcaactatgcatatattgcaacccatggatattcatgttgagttggctaaggccatggtagaaaaagacattagaatggccagatttaaagtgtcaggaggacttcctttgatgcatgtgagaatttctgaccagaagatgaaagatgtgctatatttgatgaacagtatacctttgccacagaaatcatcagcccagtctccagagagacaggtatcctcaattcctattatttcaggtggtacaaaaggtctacttggtacttcactattgctagacactgtggaatcagagtctgatgatgagtattttgatgctgaagatggagaaccacagacttgtaaaagtatgaaaggatcagaacttaaaaaagctgcagaggtcccaaatgaggagctcatcaatcttctactcaagtttgaaattaaagaagtgattttggaatttactaaacagcagaaagaagaagatacaattctagtatttaatgttactcagttaggaacagaggccacaatgagaacatttgacttaactgtggtatcttatttaaagaaaatcagcttggattatcatgaaattgaaggatccaaaaagaagccccttcacttgattagctcttctgacaaacctggattagatcttttgaaagtggagtatattaaggctgataagaatggacctagttttcaaactgcttttggaaaaactgaacaaacagttaaggtggccttttcatctttaaatctgttgctgcaaacacaagctcttgtcgcttctattaattacctcacaaccattattccatctgatgatcaaagcataagtgttgctaaggaggtacaaatttcaactgaaaaacaacaaaaaaattcaactctgccaaaagcgattgtatcctccagagatagtgacattattgatttcaggctatttgccaagttgaatgctttctgtgtcattgtttgcaacgaaaagaacaatatcgccgaaatcaagattcaaggactggattcctccctttctctccagtcaagaaagcagtcactttttgcccgactagaaaatattattgtcacagatgttgatccaaagacagttcataagaaagctgtgtcaataatgggaaatgaagttttccgttttaatttggatttgtatccagatgctactgagggggatttgtatactgacatgtccaaagtggatggtgtgctgtctctgaatgttggctgtattcagattgtctatcttcataaattccttatgtcacttctgaacttcctgaataatttccagacagccaaagagtctctgagtgctgccactgcccaggctgcagaaagggctgccacaagtgtgaaagatcttgcccagaggagttttcgtgtttccatcaatattgatttgaaagcaccggttatagtcatcccacagtcttctatttccaccaatgcagtagtggtagatcttgggttaatcagagttcataatcagttcagtctggtgtctgatgaagactacttaaatcctccagtaattgatagaatggatgtgcagctaacaaagcttacactttataggacagtgatccagccaggcatctaccatcctgatattcagctgttgcacccaattaacttggaatttcttgtaaatcggaatctagctgcatcttggtaccacaaggtgcctgttgtggaaattaaaggacatcttgattcaatgaatgttagtctaaatcaagaagatcttaatcttttatttaggatactaacagaaaatctctgtgagggtactgaagacttggataaagtgaaaccaagagtacaagagacaggtgaaattaaagagccccttgaaatctctatatcacaagatgtacatgattcaaaaaatactttaacaactggagtggaagaaattaggtctgtagacatcattaatatgctgctgaattttgaaattaaagaggttgtggttactttgatgaaaaaatcagaaaagaaaggaaggcctttacatgagctaaatgtcctgcaacttggaatggaagctaaagttaaaacctatgacatgactgctaaagcttatctaaaaaaaattagtatgcagtgctttgatttcactgactctaaaggggaacctcttcacattattaactcttctaatgtgactgacgaaccccttctgaaaatgttactgacaaaggtaactagtttcatttctaggattctttaatat

SEQ ID NO: 9659 - DNA, 4597 bp, Homo sapiens
tgcagcgctggtcgcagccctcagctgcgccgggcggttccggctcctccctctccttgtgcctcagcgccaccatggtgctggagtcggtggtcgcggacttgctgaaccgcttcctgggggactatgtggagaacctgaacaagtcccagctgaagctgggcatctggggcggaaatgtggctttagataatctacagataaaagaaaatgccctgagtgaattggatgttccttttaaagtcaaggctggccaaattgataaattaactttgaagattccttggaagaacctttatggagaagcagttgttgcgaccctggaaggattatacctgcttgttgtccctggagcaagtattaagtatgatgctgtaaaagaagaaaaatccttgcaggatgttaaacagaaagagctatcccgaattgaagaagcccttcaaaaagcagcagaaaaaggcacacattcaggggagttcatatatggcttggagaactttgtttacaaggacatcaagcctggacgtaaacgtaaaaagcacaaaaaacattttaagaaaccttttaaaggtcttgatcgttcaaaagataagccaaaagaagccaaaaaggatacatttgtggaaaaattggcaactcaagtaataaaaaatgtacaagtaaaaatcacagatattcacattaaatatgaagatgatgtcactgatccaaagcggcctctttcatttggtgtcacactgggagagcttagtctactgactgcaaatgaacactggactccatgcatattaaatgaagcagacaaaattatatacaagcttatacgacttgatagtcttagcgcctactggaatgtaaattgcagcatgtcttaccagagatcaagggaacagattttggatcagctgaaaaatgaaattcttacaagtggaaatatacccccaaattatcaatacattttccagccaatatcagcctctgcaaaactctacatgaatccttatgcagaatcagagctcaaaacgcccaaactggattgcaacatagaaatacaaaatattgccattgaactgaccaaacctcagtacttaagtatgattgaccttttggagtcagtggattatatggttaggaatgcgccttataggaaatacaagccttatttaccacttcataccaatggtcgacgatggtggaaatatgcaattgattctgttcttgaagttcatataagaaggtatacacagatgtggtcatggagtaacataaaaaagcacaggcagttactcaagagttataaaattgcctacaaaaacaagttaacacagtctaaagtctcagaagaaatacagaaagaaattcaggacttggagaagactctagatgtttttaacataattttagcaaggcaacaagcacaagttgaggtgattcggtctgggcaaaaattaaggaaaaagtctgctgacacaggcgagaaacgtggaggctggtttagtgggttgtggggtaagaaagagtctaagaaaaaggacgaagaatcattgattcctgaaactattgatgaccttatgactccagaggaaaaagataaactcttcactgccattggttatagtgagagtacccacaacctaactttacctaagcagtatgttgcccatattatgaccctgaagttagtaagcacctctgttacgataagagaaaacaagaatattccagaaatactaaaaattcagataattggcctgggcactcaagtatctcagcgaccaggagcacaagcacttaaggtagaagcgaaattagaacactggtatataacaggtttgagacagcaggatattgtgccatcacttgtggcttcaattggtgacactacatcatccttgcttaaaattaaatttgaaaccaatccggaggatagtcctgctgaccagactctgattgttcagtcccagcctgtggaggtcatctatgatgctaaaactgtcaatgcagtggttgaattctttcaatcaaataagggattggatcttgagcaaataacatcagcaacattgatgaagctggaagaaattaaggagagaacagctacaggacttacacatattattgaaactcgaaaagtccttgatttaaggataaatctgaagccttcttatctagtagttccacagacgggtttccaccatgaaaagtcagatcttctgattttagattttggtacatttcagctcaacagtaaagatcaaggtttacagaagactactaattcatctctggaagaaataatggataaggcatatgacaagtttgatgttgaaataaaaaatgtacaactactttttgcaagagcagaggaaacctggaaaaagtgtcgatttcagcatccatcaactatgcatatattgcaacccatggatattcatgttgagttggctaaggccatggtagaaaaagacattagaatggccagatttaaagtgtcaggaggacttcctttgatgcatgtgagaatttctgaccagaagatgaaagatgtgctatatttgatgaacagtatacctttgccacagaaatcatcagcccagtctccagagagacaggtatcctcaattcctattatttcaggtggtacaaaaggtctacttggtacttcactattgctagacactgtggaatcagagtctgatgatgagtattttgatgctgaagatggagaaccacagacttgtaaaagtatgaaaggatcagaacttaaaaaagctgcagaggtcccaaatgaggagctcatcaatcttctactcaagtttgaaattaaagaagtgattttggaatttactaaacagcagaaagaagaagatacaattctagtatttaatgttactcagttaggaacagaggccacaatgagaacatttgacttaactgtggtatcttatttaaagaaaatcagcttggattatcatgaaattgaaggatccaaaaagaagccccttcacttgattagctcttctgacaaacctggattagatcttttgaaagtggagtatattaaggctgataagaatggacctagttttcaaactgcttttggaaaaactgaacaaacagttaaggtggccttttcatctttaaatctgttgctgcaaacacaagctcttgtcgcttctattaattacctcacaaccattattccatctgatgatcaaagcataagtgttgctaaggaggtacaaatttcaactgaaaaacaacaaaaaaattcaactctgccaaaagcgattgtatcctccagagatagtgacattattgatttcaggctatttgccaagttgaatgctttctgtgtcattgtttgcaacgaaaagaacaatatcgccgaaatcaagattcaaggactggattcctccctttctctccagtcaagaaagcagtcactttttgcccgactagaaaatattattgtcacagatgttgatccaaagacagttcataagaaagctgtgtcaataatgggaaatgaagttttccgttttaatttggatttgtatccagatgctactgagggggatttgtatactgacatgtccaaagtggatggtgtgctgtctctgaatgttggctgtattcagattgtctatcttcataaattccttatgtcacttctgaacttcctgaataatttccagacagccaaagagtctctgagtgctgccactgcccaggctgcagaaagggctgccacaagtgtgaaagatcttgcccagaggagttttcgtgtttccatcaatattgatttgaaagcaccggttatagtcatcccacagtcttctatttccaccaatgcagtagtggtagatcttgggttaatcagagttcataatcagttcagtctggtgtctgatgaagactacttaaatcctccagtaattgatagaatggatgtgcagctaacaaagcttacactttataggacagtgatccagccaggcatctaccatcctgatattcagctgttgcacccaattaacttggaatttcttgtaaatcggaatctagctgcatcttggtaccacaaggtgcctgttgtggaaattaaaggacatcttgattcaatgaatgttagtctaaatcaagaagatcttaatcttttatttaggatactaacagaaaatctctgtgagggtactgaagacttggataaagtgaaaccaagagtacaagagacaggtgaaattaaagagccccttgaaatctctatatcacaagatgtacatgattcaaaaaatactttaacaactggagtggaagaaattaggttgtggttactttgatgaaaaaatcagaaaagaaaggaaggcctttacatgagctaaatgtcctgcaacttggaatggaagctaaagttaaaacctatgacatgactgctaaagcttatctaaaaaaaattagtatgcagtgctttgatttcactgactctaaaggggaacctcttcacattattaactcttctaatgtgactgacgaaccccttctgaaaatgttactgacaaaggtaactagtttcatttctaggattctttaatat

SEQ ID NO: 9660 - DNA, 491 bp, Homo sapiens
agtgcaagggaatctaattacagggtagagaagtactgtttcatcttctgactaattggaggctaaatctagaagtaatgtctgctgctacatccatatgacgctgtagaacatactttacaccttaatgatatgtgcacatttgttgcctctccagtaagcttgcttaggctcttcctttctccaggttctcttttactccaaagggagatgtagtaggacagaatatcttaggagttccacagttcaaagctacagctgtttagaattgaggtgaaactttgaagtttacaatatggaaagaaccatgtgtaacttggttatgttaaaaaaattttcttatagaaaactgtcaatgcagtggttgaattctttcaatcaaataagggattggatcttgagcaaataacatcagcaacattgatgaagctggaagaaattaaggagagaacagctacaggtgaagaatttgagtgtctacataagcatca

SEQ ID NO: 9661 - DNA, 4514 bp, Homo sapiens
tgcagcgctggtcgcagccctcagctgcgccgggcggttccggctcctccctctccttgtgcctcagcgccaccatggtgctggagtcggtggtcgcggacttgctgaaccgcttcctgggggactatgtggagaacctgaacaagtcccagctgaagctgggcatctggggcggaaatgtggctttagataatctacagataaaagaaaatgccctgagtgaattggatgttccttttaaagtcaaggctggccaaattgataaattaactttgaagattccttggaagaacctttatggagaagcagttgttgcgaccctggaaggattatacctgcttgttgtccctggagcaagtattaagtatgatgctgtaaaagaagaaaaatccttgcaggatgttaaacagaaagagctatcccgaattgaagaagcccttcaaaaagcagcagaaaaagataagccaaaagaagccaaaaaggatacatttgtggaaaaattggcaactcaagtaataaaaaatgtacaagtaaaaatcacagatattcacattaaatatgaagatgatgtcactgatccaaagcggcctctttcatttggtgtcacactgggagagcttagtctactgactgcaaatgaacactggactccatgcatattaaatgaagcagacaaaattatatacaagcttatacgacttgatagtcttagcgcctactggaatgtaaattgcagcatgtcttaccagagatcaagggaacagattttggatcagctgaaaaatgaaattcttacaagtggaaatatacccccaaattatcaatacattttccagccaatatcagcctctgcaaaactctacatgaatccttatgcagaatcagagctcaaaacgcccaaactggattgcaacatagaaatacaaaatattgccattgaactgaccaaacctcagtacttaagtatgattgaccttttggagtcagtggattatatggttaggaatgcgccttataggaaatacaagccttatttaccacttcataccaatggtcgacgatggtggaaatatgcaattgattctgttcttgaagttcatataagaaggtatacacagatgtggtcatggagtaacataaaaaagcacaggcagttactcaagagttataaaattgcctacaaaaacaagttaacacagtctaaagtctcagaagaaatacagaaagaaattcaggacttggagaagactctagatgtttttaacataattttagcaaggcaacaagcacaagttgaggtgattcggtctgggcaaaaattaaggaaaaagtctgctgacacaggcgagaaacgtggaggctggtttagtgggttgtggggtaagaaagagtctaagaaaaaggacgaagaatcattgattcctgaaactattgatgaccttatgactccagaggaaaaagataaactcttcactgccattggttatagtgagagtacccacaacctaactttacctaagcagtatgttgcccatattatgaccctgaagttagtaagcacctctgttacgataagagaaaacaagaatattccagaaatactaaaaattcagataattggcctgggcactcaagtatctcagcgaccaggagcacaagcacttaaggtagaagcgaaattagaacactggtatataacaggtttgagacagcaggatattgtgccatcacttgtggcttcaattggtgacactacatcatccttgcttaaaattaaatttgaaaccaatccggaggatagtcctgctgaccagactctgattgttcagtcccagcctgtggaggtcatctatgatgctaaaactgtcaatgcagtggttgaattctttcaatcaaataagggattggatcttgagcaaataacatcagcaacattgatgaagctggaagaaattaaggagagaacagctacaggacttacacatattattgaaactcgaaaagtccttgatttaaggataaatctgaagccttcttatctagtagttccacagacgggtttccaccatgaaaagtcagatcttctgattttagattttggtacatttcagctcaacagtaaagatcaaggtttacagaagactactaattcatctctggaagaaataatggataaggcatatgacaagtttgatgttgaaataaaaaatgtacaactactttttgcaagagcagaggaaacctggaaaaagtgtcgatttcagcatccatcaactatgcatatattgcaacccatggatattcatgttgagttggctaaggccatggtagaaaaagacattagaatggccagatttaaagtgtcaggaggacttcctttgatgcatgtgagaatttctgaccagaagatgaaagatgtgctatatttgatgaacagtatacctttgccacagaaatcatcagcccagtctccagagagacaggtatcctcaattcctattatttcaggtggtacaaaaggtctacttggtacttcactattgctagacactgtggaatcagagtctgatgatgagtattttgatgctgaagatggagaaccacagacttgtaaaagtatgaaaggatcagaacttaaaaaagctgcagaggtcccaaatgaggagctcatcaatcttctactcaagtttgaaattaaagaagtgattttggaatttactaaacagcagaaagaagaagatacaattctagtatttaatgttactcagttaggaacagaggccacaatgagaacatttgacttaactgtggtatcttatttaaagaaaatcagcttggattatcatgaaattgaaggatccaaaaagaagccccttcacttgattagctcttctgacaaacctggattagatcttttgaaagtggagtatattaaggctgataagaatggacctagttttcaaactgcttttggaaaaactgaacaaacagttaaggtggccttttcatctttaaatctgttgctgcaaacacaagctcttgtcgcttctattaattacctcacaaccattattccatctgatgatcaaagcataagtgttgctaaggaggtacaaatttcaactgaaaaacaacaaaaaaattcaactctgccaaaagcgattgtatcctccagagatagtgacattattgatttcaggctatttgccaagttgaatgctttctgtgtcattgtttgcaacgaaaagaacaatatcgccgaaatcaagattcaaggactggattcctccctttctctccagtcaagaaagcagtcactttttgcccgactagaaaatattattgtcacagatgttgatccaaagacagttcataagaaagctgtgtcaataatgggaaatgaagttttccgttttaatttggatttgtatccagatgctactgagggggatttgtatactgacatgtccaaagtggatggtgtgctgtctctgaatgttggctgtattcagattgtctatcttcataaattccttatgtcacttctgaacttcctgaataatttccagacagccaaagagtctctgagtgctgccactgcccaggctgcagaaagggctgccacaagtgtgaaagatcttgcccagaggagttttcgtgtttccatcaatattgatttgaaagcaccggttatagtcatcccacagtcttctatttccaccaatgcagtagtggtagatcttgggttaatcagagttcataatcagttcagtctggtgtctgatgaagactacttaaatcctccagtaattgatagaatggatgtgcagctaacaaagcttacactttataggacagtgatccagccaggcatctaccatcctgatattcagctgttgcacccaattaacttggaatttcttgtaaatcggaatctagctgcatcttggtaccacaaggtgcctgttgtggaaattaaaggacatcttgattcaatgaatgttagtctaaatcaagaagatcttaatcttttatttaggatactaacagaaaatctctgtgagggtactgaagacttggataaagtgaaaccaagagtacaagagacaggtgaaattaaagagccccttgaaatctctatatcacaagatgtacatgattcaaaaaatactttaacaactggagtggaagaaattaggtctgtagacatcattaatatgctgctgaattttgaaattaaagaggttgtggttactttgatgaaaaaatcagaaaagaaaggaaggcctttacatgagctaaatgtcctgcaacttggaatggaagctaaagttaaaacctatgacatgactgctaaagcttatctaaaaaaaattagtatgcagtgctttgatttcactgactctaaaggggaacctcttcacattattaactcttctaatgtgactgacgaaccccttctgaaaatgttactgacaaaggtaactagtttcatttctaggattctttaatat

SEQ ID NO: 9662 - DNA, 479 bp, Homo sapiens
gcttgtttgaggtgagggcttaaaactcagtaatgaaaaagagggagaactataggctaaaagggtgtgtgttcttaattgattaattgcaagcagctatgtagggcaccctgtgtttaaatcagtgctagctgtattatcttgagcaagtcattgtacctctttgtttttttaatttatttttattttttacatttttaagagacagggtctcactatgttgctcagtttggtcttgaactcctgggctcaagtgatcctcctgccttggcctcccaaagcgctggtattacaggtatgggccatcacgcctggcaaatcgttgtacctctttgagcctcagtttcctcatttgtaaactagtaggatgcctggaagttcataagcattaataaatgttagcaatagttattatttcttgagacggagtcttgctctgttgcccaggctggagtgcagtggcgcgatctaggctcact

SEQ ID NO: 9663 - DNA, 418 bp, Homo sapiens
aatattttacttagattatctttaagtaaatataaagcaaaaaggctgtgttctcataaaatgcatctccctttgttctttttaaaagaccataatagctagattgtgttcacagatctatcccaggaggccataaaagtccaagatccaaatccaagatccaaatccagtatggttgcccaaaaggacaagactacacactgtctcttattcttcacccccaggcaaaaaggcaagaactcttcattgaaagcaccaagggaattagaaactcatcttttctctttaggacactgctgtcttttttttttttttaaagttaaaaatggtaaacactttctttaaaattcgatgtcaattcccactaataacaatactttttttttttagctaataaaacagttgctcctatattttt

SEQ ID NO: 9664 - DNA, 410 bp, Homo sapiens
taaaaatgcagattctcaggctttctctagaccaactggatcagaagctctgggggtgaggcccagtattctgtgttttaacaagcccgtcagaaatttctgatgcacagtaaaatccgagaaacactggtttaagaaaaaccttgtaatgatcgaatacccactctgatgttttgccagcaaagggatatctaatatttcagaagcctctgagccagtctttgaaaaaatacaactatggcatctgcagcacaaatatttaaggacatcagaagcatgtcaaagctatttttaaagagagaaactgtataagatgtttacttcatagaggtttatgttttatggcaggctgaatgtttatctcaaaagttaaattatccattctccaaagttaaattatatatatatat

SEQ ID NO: 9665 - DNA, 1427 bp, Homo sapiens
tttttttttttgtattctaatacagttcaaatcagtgtggctggttcatttcaactccttcactaccaaactaggaggcagggactggcttcagtttttctgccttctctttttcactgatgaccagggtataaagatatctgctgcatcgaactttaaacttcacattgtccttatttttcttgatcttgacagattcagcatcctttcattgggctgtgaacagaaagtccttgatttcctcaattttcggaggcatggcgacaaggcacgcagggagcaggcgcggaccgggacagcgtgcggcgaccgggaaaaacagatttggcatctgctctttggtgatggacccagaagaaacttcagtttatttggattattactatgctacgagcccaaactctgacatcagggagacccactcccatgttccttacacctctgtcttccttccagtcttttacacagctgtgttcctgactggagtgctggggaaccttgttctcatgggagcgttgcatttcaaacccggcagccgaagactgatcgacatctttatcatcaatctggctgcctctgacttcatttttcttgtcacattgcctctctgggtggataaagaagcatctctaggactgtggaggacgggctccttcctgtgcaaagggagctcctacatgatctccgtcaatatgcactgcagtgtcctcctgctcacttgcatgagtgttgaccgctacctggccattgtgtggccagtcgtatccaggaaattcagaaggacagactgtgcatatgtagtctgtgccagcatctggtttatctcctgcctgctggggttgcctactcttctgtccagggagctcacgctgattgatgataagccatactgtgcagagaaaaaggcaactccaattaaactcatatggtccctggtggccttaattttcaccttttttgtccctttgttgagcattgtgacctgctactgttgcattgcaaggaagctgtgtgcccattaccagcaatcaggaaagcacaacaaaaagctgaagaaatctataaagatcatctttattgtcgtggcagcctttcttgtctcctggctgcccttcaatactttcaagttcctggccattgtctctgggttgcggcaagaacactatttaccctcagctattcttcagcttggtatggaggtgagtggacccttggcatttgccaacagctgtgtcaaccctttcatttactatatcttcgacagctacatccgccgggccattgtccactgcttgtgcccttgcctgaaaaactatgactttgggagtagcactgagacatcagatagtcacctcactaaggctctctccaccttcattcatgcagaagattttgccaggaggaggaagaggtctgtgtcactctaa

SEQ ID NO: 9666 - DNA, 680 bp, Homo sapiens
  misc_feature (21)..(21): n is a, c, g, or t
  misc_feature (27)..(27): n is a, c, g, or t
gcgataacccgctaacagctncctttncattgggctgtgaaacacaagtcctcaattttcggaggcatggcgacaaggcacgcagggagcaggcgcggaccgggacagcgtgcggcgaccgggaaaaacaggacagaaaaagacagacagcttttaaagctcctggattaaccctagaggctacccctaaatggagataagccatttatacagagaggtgttcctgctcgcttcagcaggtttgagaagctctggactaaccaccaaatgactaggaaaaatttgccagggctagtattttgggcatccctgtttaacccttctcaggagattcccaggcctgggatcgtatcatacacaagtcgccatgactcaggaggtggatgtttctgggaagacctgcaaaggaggatgacacttgcacccttcaagtcttcagaatgcctagaaaacactcaggacgcatttcactgaccaacctagtgtgaacctggaggtgtctctacgtgtttgtggttttgatcatcctgagagaggacctgaacggcctcttcacacccagtttcaccaaccacacaaccgtatttctggtttatctctgcatctttggtgtttcctaatttctatttatgcttgcttgttgtatgagtaggtaaaataaatccttaattaattaatgg

SEQ ID NO: 9667 - DNA, 871 bp, Homo sapiens
tttttttttttgtattctaatacagttcaaatcagtgtggctggttcatttcaactccttcactaccaaactaggaggcagggactggcttcagtttttctgccttctctttttcactgatgaccagggtataaagatatctgctgcatcgaactttaaacttcacattgtccttatttttcttgatcttgacagattcagcatcctttcattgggctgtgaacagaaagtccttgatttcctcaattttcggaggcatggcgacaaggcacgcagggagcaggcgcggaccgggacagcgtgcggcgaccgggaaaaacaggacagaaaaagacagacagcttttaaagctcctggattaaccctagaggctacccctaaatggagataagccatttatacagagaggtgttcctgctcgcttcagcaggtttgagaagctctggactaaccaccaaatgactaggaaaaatttgccagggctagtattttgggcatccctgtttaacccttctcaggagattcccaggcctgggatcgtatcatacacaagtcgccatgactcaggaggtggatgtttctgggaagacctgcaaaggaggatgacacttgcacccttcaagtcttcagaatgcctagaaaacactcaggacgcatttcactgaccaacctagtgtgaacctggaggtgtctctacgtgtttgtggttttgatcatcctgagagaggacctgaacggcctcttcacacccagtttcaccaaccacacaaccgtatttctggtttatctctgcatctttggtgtttcctaatttctatttatgcttgcttgttgtatgagtaggtaaaataaatccttaattaattaatgg

SEQ ID NO: 9668 - DNA, 1023 bp, Homo sapiens
  misc_feature (28)..(28): n is a, c, g, or t
  misc_feature (940)..(940): n is a, c, g, or t
  misc_feature (948)..(949): n is a, c, g, or t
  misc_feature (953)..(954): n is a, c, g, or t
cgcgaaacatagagctaggtacgaggcngcgtgctacctgcagaggggtccatacggcgttgttctggattcccgtcgtaacttaaagggaaattttcacaatgtccggagcccttgatgtcctgcaaatgaaggaggaggatgtccttaagttccttgcagcaggaacccacttaggtggcaccaatcttgacttccagatggaacagtacatctataaaaggaaaagtgatggcatctatatcataaatctcaagaggacctgggagaagcttctgctggcagctcgtgcaattgttgccattgaaaaccctgctgatgtcagtgttatatcctccaggaatactggccagagggctgtgctgaagtttgctgctgccactggagccactccaattgctggccgcttcactcctggaaccttcactaaccagatccaggcagccttccgggagccacggcttcttgtggttactgaccccagggctgaccaccagcctctcacggaggcatcttatgttaacctacctaccattgcgctgtgtaacacagattctcctctgcgctatgtggacattgccatcccatgcaacaacaagggagctcactcagtgggtttgatgtggtggatgctggctcgggaagttctgcgcatgcgtggcaccatttcccgtgaacacccatgggaggtcatgcctgatctgtacttctacagagatcctgaagagattgaaaaagaagagcaggctgctgctgagaaggcagtgaccaaggaggaattcagggtgaatggactggtcccgctcctgagttcactgctactcagcctgaggttgcagactggtctgaaggtgtacactggctattagaatcctatgaaatggggcactgccgaaaaggttggcccgctgcgccgttggttgggcccccggtttcgttntttcttcnnggannggggggaaactcttctaaaaaccggcttggggagaggggggtcgctcgtgctattgcatatcatacggg

SEQ ID NO: 9669 - DNA, 1062 bp, Homo sapiens
  misc_feature (28)..(28): n is a, c, g, or t
cgcgaaacatagagctaggtacgaggcngcgtgctacctgcagaggggtccatacggcgttgttctggattcccgtcgtaacttaaagggaaattttcacaatgtccggagcccttgatgtcctgcaaatgaaggaggaggatgtccttaagttccttgcagcaggaacccacttaggtggcaccaatcttgacttccagatggaacagtacatctataaaaggaaaagtgatggcatctatatcataaatctcaagaggacctgggagaagcttctgctggcagctcgtgcaattgttgccattgaaaaccctgctgatgtcagtgttatatcctccaggaatactggccagagggctgtgctgaagtttgctgctgccactggagccactccaattgctggccgcttcactcctggaaccttcactaaccagatccaggcagccttccgggagccacggcttcttgtggttactgaccccagggctgaccaccagcctctcacggaggcatcttatgttaacctacctaccattgcgctgtgtaacacagattctcctctgcgctatgtggacattgccatcccatgcaacaacaagggagctcactcagtgggtttgatgtggtggatgctggctcgggaagttctgcgcatgcgtggcaccatttcccgtgaacacccatgggaggtcatgcctgatctgtacttctacagagatcctgaagagattgaaaaagaagagcaggctgctgctgagaaggcagtgaccaaggaggaattcagggtgaatggactggtcccgctcctgagttcactgctactcagcctgaggttgcagactggtctgaaggtgtacaggtgccctctgtgcctattcagcaattccctactgaagactggagcgctcagcctgccacggaagactggtctgcagctcccactgctcaggccactgaatgggtaggagcaaccactgactggtcttaagctgttcttgcataggctcttaagcagcatggaaaaatggttgatggaaaataaacatcagtttctaaaaaaaa

SEQ ID NO: 9670 - DNA, 1072 bp, Homo sapiens
aagcagtggtatcaacgcagagtggccattacggccgggggtgctacctgcagaggggtccatacggcgttgttctggattcccgtcgtaacttaaagggaaattttcacaatgtccggagcccttgatgtcctgcaaatgaaggaggaggatgtccttaagttccttgcagcaggaacccacttaggtggcaccaatcttgacttccagatggaacagtacatctataaaaggaaaagtgatggcatctatatcataaatctcaagaggacctgggagaagcttctgctggcagctcgtgcaattgttgccattgaaaaccctgctgatgtcagtgttatatcctccaggaatactggccagagggctgtgctgaagtttgctgctgccactggagccactccaattgctggccgcttcactcctggaaccttcactaaccagatccaggcagccttccgggagccacggcttcttgtggttactgaccccagggctgaccaccagcctctcacggaggcatcttatgttaacctacctaccattgcgctgtgtaacacagattctcctctgcgctatgtggacattgccatcccatgcaacaacaagggagctcactcagtgggtttgatgtggtggatgctggctcgggaagttctgcgcatgcgtggcaccatttcccgtgaacacccatgggaggtcatgcctgatctgtacttctacagagatcctgaagagattgaaaaagaagagcaggctgctgctgagaaggcagtgaccaaggaggaattcagggtgaatggactggtcccgctcctgagttcactgctactcagcctgaggttgcagactggtctgaaggtgtacaggtgccctctgtgcctattcagcaattccctactgaagactggagcgctcagcctgccacggaagactggtctgcagctcccactgctcaggccactgaatgggtaggagcaaccactgactggtcttaagctgttcttgcataggctcttaagcagcatggaaaaatggttgatggaaaataaacatcagtttctaaaaaaaa

SEQ ID NO: 9671 - DNA, 993 bp, Homo sapiens
  misc_feature (28)..(28): n is a, c, g, or t
  misc_feature (952)..(952): n is a, c, g, or t
cgcgaaacatagagctaggtacgaggcngcgtgctacctgcagaggggtccatacggcgttgttctggattcccgtcgtaacttaaagggaaattttcacaatgtccggagcccttgatgtcctgcaaatgaaggaggaggatgtccttaagttccttgcagcaggaacccacttaggtggcaccaatcttgacttccagatggaacagtacatctataaaaggaaaagtgatggcatctatatcataaatctcaagaggacctgggagaagcttctgctggcagctcgtgcaattgttgccattgaaaaccctgctgatgtcagtgttatatcctccaggaatactggccagagggctgtgctgaagtttgctgctgccactggagccactccaattgctggccgcttcactcctggaaccttcactaaccagatccaggcagccttccgggagccacggcttcttgtggttactgaccccagggctgaccaccagcctctcacggaggcatcttatgttaacctacctaccattgcgctgtgtaacacagattctcctctgcgctatgtggacattgccatcccatgcaacaacaagggagctcactcagtgggtttgatgtggtggatgctggctcgggaagttctgcgcatgcgtggcaccatttcccgtgaacacccatgggaggtcatgcctgatctgtacttctacagagatcctgaagagattgaaaaagaagagcaggctgctgctgagaaggcagtgaccaaggaggaattcagggtgaatggactggtcccgctcctgagttcactgctactcagcctgaggttgcagactggtctgaaggtgtacaggtgccctctgtgcctattcagcaattccctactgaagactggagcgctcagcctgccacggaagactggtctgtgatgggtggggcccctggntggggtaggcgggttggctggccttagcccatggaccgctt

SEQ ID NO: 9672 - DNA, 1021 bp, Homo sapiens
  misc_feature (938)..(938): n is a, c, g, or t
  misc_feature (946)..(947): n is a, c, g, or t
  misc_feature (951)..(952): n is a, c, g, or t
cggctagtggatacggtgtgatcggccgatgctacctgcagaggggtccatacggcgttgttctggattcccgtcgtaacttaaagggaaattttcacaatgtccggagcccttgatgtcctgcaaatgaaggaggaggatgtccttaagttccttgcagcaggaacccacttaggtggcaccaatcttgacttccagatggaacagtacatctataaaaggaaaagtgatggcatctatatcataaatctcaagaggacctgggagaagcttctgctggcagctcgtgcaattgttgccattgaaaaccctgctgatgtcagtgttatatcctccaggaatactggccagagggctgtgctgaagtttgctgctgccactggagccactccaattgctggccgcttcactcctggaaccttcactaaccagatccaggcagccttccgggagccacggcttcttgtggttactgaccccagggctgaccaccagcctctcacggaggcatcttatgttaacctacctaccattgcgctgtgtaacacagattctcctctgcgctatgtggacattgccatcccatgcaacaacaagggagctcactcagtgggtttgatgtggtggatgctggctcgggaagttctgcgcatgcgtggcaccatttcccgtgaacacccatgggaggtcatgcctgatctgtacttctacagagatcctgaagagattgaaaaagaagagcaggctgctgctgagaaggcagtgaccaaggaggaattcagggtgaatggactggtcccgctcctgagttcactgctactcagcctgaggttgcagactggtctgaaggtgtacactggctattagaatcctatgaaatggggcactgccgaaaaggttggcccgctgcgccgttggttgggcccccggtttcgttntttcttcnnggannggggggaaactcttctaaaaaccggcttggggagaggggggtcgctcgtgctattgcatatcatacggg

SEQ ID NO: 9673 - DNA, 1035 bp, Homo sapiens
  misc_feature (952)..(952): n is a, c, g, or t
  misc_feature (960)..(961): n is a, c, g, or t
  misc_feature (965)..(966): n is a, c, g, or t
ccccgcccccccccccccaccaaaagcgctaggtagcgaggcctgctacctgcagaggggtccatacggcgttgttctggattcccgtcgtaacttaaagggaaattttcacaatgtccggagcccttgatgtcctgcaaatgaaggaggaggatgtccttaagttccttgcagcaggaacccacttaggtggcaccaatcttgacttccagatggaacagtacatctataaaaggaaaagtgatggcatctatatcataaatctcaagaggacctgggagaagcttctgctggcagctcgtgcaattgttgccattgaaaaccctgctgatgtcagtgttatatcctccaggaatactggccagagggctgtgctgaagtttgctgctgccactggagccactccaattgctggccgcttcactcctggaaccttcactaaccagatccaggcagccttccgggagccacggcttcttgtggttactgaccccagggctgaccaccagcctctcacggaggcatcttatgttaacctacctaccattgcgctgtgtaacacagattctcctctgcgctatgtggacattgccatcccatgcaacaacaagggagctcactcagtgggtttgatgtggtggatgctggctcgggaagttctgcgcatgcgtggcaccatttcccgtgaacacccatgggaggtcatgcctgatctgtacttctacagagatcctgaagagattgaaaaagaagagcaggctgctgctgagaaggcagtgaccaaggaggaattcagggtgaatggactggtcccgctcctgagttcactgctactcagcctgaggttgcagactggtctgaaggtgtacactggctattagaatcctatgaaatggggcactgccgaaaaggttggcccgctgcgccgttggttgggcccccggtttcgttntttcttcnnggannggggggaaactcttctaaaaaccggcttggggagaggggggtcgctcgtgctattgcatatcatacggg

SEQ ID NO: 9674 - DNA, 1065 bp, Homo sapiens
  misc_feature (982)..(982): n is a, c, g, or t
  misc_feature (990)..(991): n is a, c, g, or t
  misc_feature (995)..(996): n is a, c, g, or t
aaacctatacgggcataaagagatagcatgatggcccctcggtgagtggtttttaaaatcaggccgagggctatgctacctgcagaggggtccatacggcgttgttctggattcccgtcgtaacttaaagggaaattttcacaatgtccggagcccttgatgtcctgcaaatgaaggaggaggatgtccttaagttccttgcagcaggaacccacttaggtggcaccaatcttgacttccagatggaacagtacatctataaaaggaaaagtgatggcatctatatcataaatctcaagaggacctgggagaagcttctgctggcagctcgtgcaattgttgccattgaaaaccctgctgatgtcagtgttatatcctccaggaatactggccagagggctgtgctgaagtttgctgctgccactggagccactccaattgctggccgcttcactcctggaaccttcactaaccagatccaggcagccttccgggagccacggcttcttgtggttactgaccccagggctgaccaccagcctctcacggaggcatcttatgttaacctacctaccattgcgctgtgtaacacagattctcctctgcgctatgtggacattgccatcccatgcaacaacaagggagctcactcagtgggtttgatgtggtggatgctggctcgggaagttctgcgcatgcgtggcaccatttcccgtgaacacccatgggaggtcatgcctgatctgtacttctacagagatcctgaagagattgaaaaagaagagcaggctgctgctgagaaggcagtgaccaaggaggaattcagggtgaatggactggtcccgctcctgagttcactgctactcagcctgaggttgcagactggtctgaaggtgtacactggctattagaatcctatgaaatggggcactgccgaaaaggttggcccgctgcgccgttggttgggcccccggtttcgttntttcttcnnggannggggggaaactcttctaaaaaccggcttggggagaggggggtcgctcgtgctattgcatatcatacggg

SEQ ID NO: 9675 - DNA, 1472 bp, Homo sapiens
  misc_feature (1389)..(1389): n is a, c, g, or t
  misc_feature (1397)..(1398): n is a, c, g, or t
  misc_feature (1402)..(1403): n is a, c, g, or t
ttcaccatcttgggcaggctggtctcaaactcccgacctcgtgatcccggcctcccaaattgctgagattacaggcgtgagccaccacgcctgaccaataaaagtattttctaaatatttaaacatttctgttataaattagtatattgggataaatttattagaatattctattatatcctctttactgaacacattactaagttggtaattggagaatatgagcaagattcatgttagttatttttaataaaacaggtattactgtctctaagccagacctgatcacctatctggagcaagaaaaagagccctggaatatgaagtgacatgagatggtggatgaacccccagtaaagacagggttcaccatgttggtctggttgatctcgaactccttaccttgtgatctgcctgccttggcctcccaaagtgctgggattacagtaacaatgctgcagcttttccatgctacctgcatgctacctgcagaggggtccatacggcgttgttctggattcccgtcgtaacttaaagggaaattttcacaatgtccggagcccttgatgtcctgcaaatgaaggaggaggatgtccttaagttccttgcagcaggaacccacttaggtggcaccaatcttgacttccagatggaacagtacatctataaaaggaaaagtgatggcatctatatcataaatctcaagaggacctgggagaagcttctgctggcagctcgtgcaattgttgccattgaaaaccctgctgatgtcagtgttatatcctccaggaatactggccagagggctgtgctgaagtttgctgctgccactggagccactccaattgctggccgcttcactcctggaaccttcactaaccagatccaggcagccttccgggagccacggcttcttgtggttactgaccccagggctgaccaccagcctctcacggaggcatcttatgttaacctacctaccattgcgctgtgtaacacagattctcctctgcgctatgtggacattgccatcccatgcaacaacaagggagctcactcagtgggtttgatgtggtggatgctggctcgggaagttctgcgcatgcgtggcaccatttcccgtgaacacccatgggaggtcatgcctgatctgtacttctacagagatcctgaagagattgaaaaagaagagcaggctgctgctgagaaggcagtgaccaaggaggaattcagggtgaatggactggtcccgctcctgagttcactgctactcagcctgaggttgcagactggtctgaaggtgtacactggctattagaatcctatgaaatggggcactgccgaaaaggttggcccgctgcgccgttggttgggcccccggtttcgttntttcttcnnggannggggggaaactcttctaaaaaccggcttggggagaggggggtcgctcgtgctattgcatatcatacggg

SEQ ID NO: 9676 - DNA, 1006 bp, Homo sapiens
  misc_feature (28)..(28): n is a, c, g, or t
cgcgaaacatagagctaggtacgaggcngcgtgctacctgcagaggggtccatacggcgttgttctggattcccgtcgtaacttaaagggaaattttcacaatgtccggagcccttgatgtcctgcaaatgaaggaggaggatgtccttaagttccttgcagcaggaacccacttaggtggcaccaatcttgacttccagatggaacagtacatctataaaaggaaaagtgatggcatctatatcataaatctcaagaggacctgggagaagcttctgctggcagctcgtgcaattgttgccattgaaaaccctgctgatgtcagtgttatatcctccaggaatactggccagagggctgtgctgaagtttgctgctgccactggagccactccaattgctggccgcttcactcctggaaccttcactaaccagatccaggcagccttccgggagccacggcttcttgtggttactgaccccagggctgaccaccagcctctcacggaggcatcttatgttaacctacctaccattgcgctgtgtaacacagattctcctctgcgctatgtggacattgccatcccatgcaacaacaagggagctcactcagtgggtttgatgtggtggatgctggctcgggaagttctgcgcatgcgtggcaccatttcccgtgaacacccatgggaggtcatgcctgatctgtacttctacagagatcctgaagagggtgaatggactggtcccgctcctgagttcactgctactcagcctgaggttgcagactggtctgaaggtgtacaggtgccctctgtgcctattcagcaattccctactgaagactggagcgctcagcctgccacggaagactggtctgcagctcccactgctcaggccactgaatgggtaggagcaaccactgactggtcttaagctgttcttgcataggctcttaagcagcatggaaaaatggttgatggaaaataaacatcagtttctaaaaaaaa

SEQ ID NO: 9677 - DNA, 1031 bp, Homo sapiens
cccacgcagtcgtaacatgctccgtcatgttggtaggtgagtgggcctgcactggccgagattgacctggctaggagctgcagtggctacctgcagaataaggtgcgggaccagcagctcgtctactcggccggggtctaccgcctgcccaagaactgcagctgacccatcggccgagtacatctataaaaggaaaagtgatggcatctatatcataaatctcaagaggacctgggagaagcttctgctggcagctcgtgcaattgttgccattgaaaaccctgctgatgtcagtgttatatcctccaggaatactggccagagggctgtgctgaagtttgctgctgccactggagccactccaattgctggccgcttcactcctggaaccttcactaaccagatccaggcagccttccgggagccacggcttcttgtggttactgaccccagggctgaccaccagcctctcacggaggcatcttatgttaacctacctaccattgcgctgtgtaacacagattctcctctgcgctatgtggacattgccatcccatgcaacaacaagggagctcactcagtgggtttgatgtggtggatgctggctcgggaagttctgcgcatgcgtggcaccatttcccgtgaacacccatgggaggtcatgcctgatctgtacttctacagagatcctgaagagattgaaaaagaagagcaggctgctgctgagaaggcagtgaccaaggaggaattcagggtgaatggactggtcccgctcctgagttcactgctactcagcctgaggttgcagactggtctgaaggtgtacaggtgccctctgtgcctattcagcaattccctactgaagactggagcgctcagcctgccacggaagactggtctgcagctcccactgctcaggccactgaatgggtaggagcaaccactgactggtcttaagctgttcttgcataggctcttaagcagcatggaaaaatggttgatggaaaataaacatcagtttctaaaaaaaa

SEQ ID NO: 9678 - DNA, 897 bp, Homo sapiens
  misc_feature (28)..(28): n is a, c, g, or t
cgcgaaacatagagctaggtacgaggcngcgtgctacctgcagaggggtccatacggcgttgttctggattcccgtcgtaacttaaagggaaattttcacaatgtccggagcccttgatgtcctgcaaatgaaggaggaggatgtccttaagttccttgcagcaggaacccacttaggtggcaccaatcttgacttccagatggaacagtacatctataaaaggaaaagtgatggcatctatatcataaatctcaagaggacctgggagaagcttctgctggcagctcgtgcaattgttgccattgaaaaccctgctgatgtcagtgttatatcctccaggaatactggccagagggctgtgctgaagtttgctgctgccactggagccactccaattgctggccgcttcactcctggaaccttcactaaccagatccaggcagccttccgggagccacggcttcttgtggttactgaccccagggctgaccaccagcctctcacggaggcatcttatgttaacctacctaccattgcgctgtgtaacacagattctcctctgcgctatgtggacattgccatcccatgcaacaacaagggagctcactcagtgggtttgatgtggtggatgctggctcgggaagttctgcgcatgcgtggcaccatttcccgtgaacacccatgggaggtcatgcctgatctgtacttctacagagatcctgaagagggtgccctctgtgcctattcagcaattccctactgaagacagctcccactgctcaggccactgaatgggtaggagcaaccactgactggtcttaagctgttcttgcataggctcttaagcagcatggaaaaatggttgatggaaaataaacatcagtttctaaaaaaaa

SEQ ID NO: 9679 - DNA, 1405 bp, Homo sapiens
ttcaccatcttgggcaggctggtctcaaactcccgacctcgtgatcccggcctcccaaattgctgagattacaggcgtgagccaccacgcctgaccaataaaagtattttctaaatatttaaacatttctgttataaattagtatattgggataaatttattagaatattctattatatcctctttactgaacacattactaagttggtaattggagaatatgagcaagattcatgttagttatttttaataaaacaggtattactgtctctaagccagacctgatcacctatctggagcaagaaaaagagccctggaatatgaagtgacatgagatggtggatgaacccccagtaaagacagggttcaccatgttggtctggttgatctcgaactccttaccttgtgatctgcctgccttggcctcccaaagtgctgggattacagtaacaatgctgcagcttttccatgctacctgcatgctacctgcagaggggtccatacggcgttgttctggattcccgtcgtaacttaaagggaaattttcacaatgtccggagcccttgatgtcctgcaaatgaaggaggaggatgtccttaagttccttgcagcaggaacccacttaggtggcaccaatcttgacttccagatggaacagtacatctataaaaggaaaagtgatggaatactggccagagggctgtgctgaagtttgctgctgccactggagccactccaattgctggccgcttcactcctggaaccttcactaaccagatccaggcagccttccgggagccacggcttcttgtggttactgaccccagggctgaccaccagcctctcacggaggcatcttatgttaacctacctaccattgcgctgtgtaacacagattctcctctgcgctatgtggacattgccatcccatgcaacaacaagggagctcactcagtgggtttgatgtggtggatgctggctcgggaagttctgcgcatgcgtggcaccatttcccgtgaacacccatgggaggtcatgcctgatctgtacttctacagagatcctgaagagattgaaaaagaagagcaggctgctgctgagaaggcagtgaccaaggaggaattcagggtgaatggactggtcccgctcctgagttcactgctactcagcctgaggttgcagactggtctgaaggtgtacaggtgccctctgtgcctattcagcaattccctactgaagactggagcgctcagcctgccacggaagactggtctgcagctcccactgctcaggccactgaatgggtaggagcaaccactgactggtcttaagctgttcttgcataggctcttaagcagcatggaaaaatggttgatggaaaataaacatcagtttctaaaaaaaa

SEQ ID NO: 9680 - DNA, 1144 bp, Homo sapiens
ttcaccatcttgggcaggctggtctcaaactcccgacctcgtgatcccggcctcccaaattgctgagattacaggcgtgagccaccacgcctgaccaataaaagtattttctaaatatttaaacatttctgttataaattagtatattgggataaatttattagaatattctattatatcctctttactgaacacattactaagttggtaattggagaatatgagcaagattcatgttagttatttttaataaaacaggtattactgtctctaagccagacctgatcacctatctggagcaagaaaaagagccctggaatatgaagtgacatgagatggtggatgaacccccagtaaagacagggttcaccatgttggtctggttgatctcgaactccttaccttgtgatctgcctgccttggcctcccaaagtgctgggattacagtaacaatgctgcagcttttccatgctacctgcatgctacctgcagaggggtccatacggcgttgttctggattcccgtcgtaacttaaagggaaattttcacaatgtccggagcccttgatgtcctgcaaatgaaggaggaggatgtccttaagttccttgcagcaggaacccacttaggtggcaccaatcttgacttccagatggaacagtacatctataaaaggaaaagtgatggcatctatatcataaatctcaagaggacctgggagaagcttctgctggcagctcgtgcaattgttgccattgaaaaccctgctgatgtcagtgttatatcctccaggaatactggccagagggctgtgctgaagtttgctgctgccactggagccactccaattgctggccgcttcactcctggaaccttcactaaccagatccaggcagccttccgggagccacggcttcttgtggttactgaccccagggctgaccaccagcctctcacggaggcatcttatgttaacctacctaccattgcgctgtgtaacacagattctcctctgcgcagctcccactgctcaggccactgaatgggtaggagcaaccactgactggtcttaagctgttcttgcataggctcttaagcagcatggaaaaatggttgatggaaaataaacatcagtttctaaaaaaaa

SEQ ID NO: 9681 - DNA, 435 bp, Homo sapiens
ggtcagataccaaaggtgggtgattttccctaaactgacttaggattcttgctctaattggattctacaaaagcagagagggaaacccaatgtctgcttactcagaaaggactcagaggaggctggctcaagtttaggtcaatgaagagagtctatcaccagctctgctgtaaaaccaaagttagctgttttataaatgtgttgtactgactgcatatgtgttctgttttaaaaacagaagaaaatgaatgagttatttcattaaaaaatgtaaataatttatgaaaaaaaattatgttgatttatgtgtgtgaccttggttgtgttgtgttttgtttacccctgctctctgtatcagtgcctttccgcggcgggggtggtggtgggggaatcctggtctattgtttttttaaaaaacattgtgtatagtttaag

SEQ ID NO: 9682 - DNA, 505 bp, Homo sapiens
gaagctcctgccctcctaaagccgaagccaaagcgaaggctttaaaggccaagaaggcagtgttgaaaggtgtccacagccacaaaaaaaatgatccacacgtcacccaccttccagtggcccaagacactgcgactctggaggcagcccaaatatccttggaagagtgcccccagaagaaacaagcttgaccactatgctatcatcaagtttccgctgaccactgagtcggccatgaagaagataggagacagcaacacacttgtgttcatagtggatgttaaagccaacaagcaccagatcaaacaggctgtgaagaagctctatgatattgacatggccaaggtcaacaccctgattcggcctgatggagagaagaaggcatatgttccactggctcctgattatgatgctttggatgttgccaacaaaattgggatcatctaaactgagtccagctggctaattctaaatatatgtatatcttttcacataaaaaaattaa

SEQ ID NO: 9683 - DNA, 425 bp, Homo sapiens
aggtgcatctgctcgggtgtatataatctctgtgaactgatggtcatgtggtgtcaataactctgatttattgaggggctgctaatgattgacattcatatattgctttactgtttatcaagcacattactgtaagttacattaattaatattcacattgaccctttctggaagatgctattaaccttctttggatgagagatttttattgtaggagagataagagggagatgagctgattccacctatctctactaaaaacacaaaaatgagatgggcatgttggtgcatgcctgtaatcccatacttgggagcctgaggcaggagaatcatttcaacctgggaggcggaggttgcagtgagccaacattgcgccactgaactctatcctgggcaacagaagtgagactccatctcaaaaaaaa

SEQ ID NO: 9684 - DNA, 411 bp, Homo sapiens
ttttttcatcttctgggagcacagaataggcttctgctcctttaaataactttaacaggcaccaaaggaacactgctagctctttcttaattctgtaggtccacatttaggaaaaagaaattgtcagcctctgacttatttccagcttacaaaaaggctgtgatgttggcagcccggggaaagcagttcccgtgagtcatgctttcacctttcagccagtgaagaacaggaaatagtcacatcactattgccaacaagcacagcgaatcgcttccaccaccgggctttcccagatgacgtcagtgagccaagtgcagggcatcacccttgccagatggccccggaagagtctcagctgccctgtcaagtttagcttctcaagctccccagaaccagcatggcaaggatcac

SEQ ID NO: 9685 - DNA, 1774 bp, Homo sapiens
cagcggcttcgcgcagaggtggaagaaacccgagacgttccgaagtcaacgcaagcaaaggggagtgcgggtcggggaggaatattcttttggaaacgtaatattggccttggggctctccagccctttgggacttccaatgggatcttagaagcagccgaagcagcgtgagggcggcagcccagggccagccacgatttgaacgctctgccttgcagctcttctggaccgaggagcccaaagccctaccctcaccattcaccaggttacagttcttatccgcgtgaatacacatggctctgttacgaaaaattaatcaggtgctgctgttccttctgatcgtgaccctctgtgtgattctgtataagaaagttcataaggggactgtgcccaagaatgacgcagatgatgaatccgagactcctgaagaactggaagaagagattcctgtggtgatttgtgctgcagcagggaggatgggtgccactatggctgccatcaatagcatctacagcaacactgacgccaacatcttgttctatgtagtgggactccggaatactctgactcgaatacgaaaatggattgaacattccaaactgagagaaataaactttaaaatcgtggaattcaacccgatggtcctcaaagggaagatcagaccagactcatcgaggcctgaattgctccagcctctgaactttgttcgattttatctccctctacttatccaccaacacgagaaagtcatctatttggacgatgatgtaattgtacaaggtgatatccaagaactgtatgacaccaccttggccctgggccacgcggcggctttctcagatgactgcgatttgccctctgctcaggacataaacagactcgtgggacttcagaacacatatatgggctatctggactaccggaagaaggccatcaaggaccttggcatcagccccagcacctgctctttcaatcctggtgtgattgttgccaacatgacagaatggaagcaccagcgcatcaccaagcaattggagaaatggatgcaaaagaatgtggaggaaaacctctatagcagctccctgggaggaggggtggccacctccccaatgctgattgtgtttcatgggaaatattccacaattaaccccctgtggcacataaggcacctgggctggaatccagatgccagatattcggagcattttctgcaggaagctaaattactccactggaatggaagacataaaccttgggacttccctagtgttcacaacgacttatgggaaagctggtttgttcctgaccctgcagggatatttaaactcaatcaccatagctgatataactctacccttaaaatattccctgtatagaaatgtggaattgtccctttgtagccaactataacattgttctttatgaatattacctttgatacatatgatccacaatataaaaaccaaaaactactgtgtgcaaattataccttggaccatataggcattgattaacttctttaagtacatgtgataactatggaaatcaagattatgtgactgaaaaacataaaggaagagacccatctagataacagcaatcaacctgcttaattctgaatgacaattatatccacaaatttttaaaacttctacatgtatttttcacatgaagatctccttaacaggttgccaaccttttcttttataaaactattacatttaaaatatggacgtctgaaaaataaaatattcatcatttttatgatttttat

SEQ ID NO: 9686 - DNA, 1909 bp, Homo sapiens
cagcggcttcgcgcagaggtggaagaaacccgagacgttccgaagtcaacgcaagcaaaggggagtgcgggtcggggaggaatattcttttggaaacgtaatattggccttggggctctccagccctttgggacttccaatgggatcttagaagcagccgaagcagcgtgagggcggcagcccagggccagccacgatttgaacgctctgccttgcagctcttctggaccgaggagcccaaagccctaccctcaccattcaccaggtcctgtgggaagagcagcgtggaggtgggctgaggttagaaggtgcagagcgtggaagaagattgtgagctgagtattggacatctgttcttgaatagtccctgggcctgccataggaaaggaagttctccagggttacagttcttatccgcgtgaatacacatggctctgttacgaaaaattaatcaggtgctgctgttccttctgatcgtgaccctctgtgtgattctgtataagaaagttcataaggggactgtgcccaagaatgacgcagatgatgaatccgagactcctgaagaactggaagaagagattcctgtggtgatttgtgctgcagcagggaggatgggtgccactatggctgccatcaatagcatctacagcaacactgacgccaacatcttgttctatgtagtgggactccggaatactctgactcgaatacgaaaatggattgaacattccaaactgagagaaataaactttaaaatcgtggaattcaacccgatggtcctcaaagggaagatcagaccagactcatcgaggcctgaattgctccagcctctgaactttgttcgattttatctccctctacttatccaccaacacgagaaagtcatctatttggacgatgatgtaattgtacaaggtgatatccaagaactgtatgacaccaccttggccctgggccacgcggcggctttctcagatgactgcgatttgccctctgctcaggacataaacagactcgtgggacttcagaacacatatatgggctatctggactaccggaagaaggccatcaaggaccttggcatcagccccagcacctgctctttcaatcctggtgtgattgttgccaacatgacagaatggaagcaccagcgcatcaccaagcaattggagaaatggatgcaaaagaatgtggaggaaaacctctatagcagctccctgggaggaggggtggccacctccccaatgctgattgtgtttcatgggaaatattccacaattaaccccctgtggcacataaggcacctgggctggaatccagatgccagatattcggagcattttctgcaggaagctaaattactccactggaatggaagacataaaccttgggacttccctagtgttcacaacgacttatgggaaagctggtttgttcctgaccctgcagggatatttaaactcaatcaccatagctgatataactctacccttaaaatattccctgtatagaaatgtggaattgtccctttgtagccaactataacattgttctttatgaatattacctttgatacatatgatccacaatataaaaaccaaaaactactgtgtgcaaattataccttggaccatataggcattgattaacttctttaagtacatgtgataactatggaaatcaagattatgtgactgaaaaacataaaggaagagacccatctagataacagcaatcaacctgcttaattctgaatgacaattatatccacaaatttttaaaacttctacatgtatttttcacatgaagatctccttaacaggttgccaaccttttcttttataaaactattacatttaaaatatggacgtctgaaaaataaaatattcatcatttttatgatttttat

SEQ ID NO: 9687 - DNA, 1224 bp, Homo sapiens
cagcggcttcgcgcagaggtggaagaaacccgagacgttccgaagtcaacgcaagcaaaggggagtgcgggtcggggaggaatattcttttggaaacgtaatattggccttggggctctccagccctttgggacttccaatgggatcttagaagcagccgaagcagcgtgagggcggcagcccagggccagccacgatttgaacgctctgccttgcagctcttctggaccgaggagcccaaagccctaccctcaccattcaccaggttacagttcttatccgcgtgaatacacatggctctgttacgaaaaatcaggacataaacagactcgtgggacttcagaacacatatatgggctatctggactaccggaagaaggccatcaaggaccttggcatcagccccagcacctgctctttcaatcctggtgtgattgttgccaacatgacagaatggaagcaccagcgcatcaccaagcaattggagaaatggatgcaaaagaatgtggaggaaaacctctatagcagctccctgggaggaggggtggccacctccccaatgctgattgtgtttcatgggaaatattccacaattaaccccctgtggcacataaggcacctgggctggaatccagatgccagatattcggagcattttctgcaggaagctaaattactccactggaatggaagacataaaccttgggacttccctagtgttcacaacgacttatgggaaagctggtttgttcctgaccctgcagggatatttaaactcaatcaccatagctgatataactctacccttaaaatattccctgtatagaaatgtggaattgtccctttgtagccaactataacattgttctttatgaatattacctttgatacatatgatccacaatataaaaaccaaaaactactgtgtgcaaattataccttggaccatataggcattgattaacttctttaagtacatgtgataactatggaaatcaagattatgtgactgaaaaacataaaggaagagacccatctagataacagcaatcaacctgcttaattctgaatgacaattatatccacaaatttttaaaacttctacatgtatttttcacatgaagatctccttaacaggttgccaaccttttcttttataaaactattacatttaaaatatggacgtctgaaaaataaaatattcatcatttttatgatttttat

SEQ ID NO: 9688 - DNA, 659 bp, Homo sapiens
ctttttccccctccccccccgccccgctttctctccccccccccgccccccccaccccctcggttgacaacacagccatattcggagcattttctgcaggaagctaaattactccactggaatggaagacataaaccttgggacttccctagtgttcacaacgacttatgggaaagctggtttgttcctgaccctgcagggatatttaaactcaatcaccatagctgatataactctacccttaaaatattccctgtatagaaatgtggaattgtccctttgtagccaactataacattgttctttatgaatattacctttgatacatatgatccacaatataaaaaccaaaaactactgtgtgcaaattataccttggaccatataggcattgattaacttctttaagtacatgtgataactatggaaatcaagattatgtgactgaaaaacataaaggaagagacccatctagataacagcaatcaacctgcttaattctgaatgacaattatatccacaaatttttaaaacttctacatgtatttttcacatgaagatctccttaacaggttgccaaccttttcttttataaaactattacatttaaaatatggacgtctgaaaaataaaatattcatcatttttatgatttttat

SEQ ID NO: 9689 - DNA, 496 bp, Homo sapiens
aaagtggcaacagcctcggcactagggggtttgtatctaggagaacggccgatccgtcagcgctggcttcagccccaggcctcagataagttgggcactgggaagctcagatgagacatcttgctagctcctgttttattccgctccaaacctggagctgagctgaggccatggtcaaagccgactctccagtacccccagaagacactaagccatatgcctctcccccaccatcatttcttttgtcgttttaacagctgaactttgttcgattttatctccctctacttatccaccaacacgagaaagtcatctatttggacgatgatgtaattgtacaaggtactctcgctaactgccaagaacacttggaaaagaagcagctgataagtagaataactgtctctcttcatttttcaaataactaattgtgcagcaagttttgactgcttatttaagttgtgagtacagtattgttgtaaatgtggaagtattt

SEQ ID NO: 9690 - DNA, 525 bp, Homo sapiens
tgtgtcttttcctccagaacagcgttgttttttgcatgttttgcacttagccagaggaagtctggcgcatccgagccggccagccgagcacatctggaagtggtttctggggccgcccctctctgccagcgcaactcctgggttcccagcggcttcgcgcagaggtggaagaaacccgagacgttccgaagtcaacgcaagcaaaggggagtgcgggtcggggaggaatattcttttggaaacgtaatattggccttggggctctccagccctttgggacttccaatgggatcttagaagcagccgaagcagcgtgagggcggcagcccagggccagccacgatttgaacgctctgccttgcagctcttctggaccgaggagcccaaagccctaccctcaccattcaccaggtaaatagagaaatttacgagcagtgtgcagtcgttccgttttatcctggccggtctgcagcagttctttattctgctacagacccaagaaagtaaatcagaggtgtcagattg

SEQ ID NO: 9691 - DNA, 1968 bp, Homo sapiens
cagcggcttcgcgcagaggtggaagaaacccgagacgttccgaagtcaacgcaagcaaaggggagtgcgggtcggggaggaatattcttttggaaacgtaatattggccttggggctctccagccctttgggacttccaatgggatcttagaagcagccgaagcagcgtgagggcggcagcccagggccagccacgatttgaacgctctgccttgcagctcttctggaccgaggagcccaaagccctaccctcaccattcaccaggtcctgtgggaagagcagcgtggaggtgggctgaggttagaaggtgcagagcgtggaagaagattgtgagctgagtattggacatctgttcttgaatagtccctgggcctgccataggaaaggaagttctccagggttacagttcttatccgcgtgaatacacatggctctgttacgaaaaattaatcaggtgctgctgttccttctgatcgtgaccctctgtgtgattctgtataagaaagttcataaggggactgtgcccaagaatgacgcagatgatgaatccgagactcctgaagaactggaagaagagattcctgtggtgatttgtgctgcagcagggaggatgggtgccactatggctgccatcaatagcatctacagcaacactgacgccaacatcttgttctatgtagtgggactccggaatactctgactcgaatacgaaaatggattgaacattccaaactgagagaaataaactttaaaatcgtggaattcaacccgatggtcctcaaagggaagatcagaccagactcatcgaggcctgaattgctccagcctctgaactttgttcgattttatctccctctacttatccaccaacacgagaaagtcatctatttggacgatgatgtaattgtacaaggtgatatccaagaactgtatgacaccaccttggccctgggccacgcggcggctttctcagatgactgcgatttgccctctgctcaggacataaacagactcgtgggacttcagaacacatatatgggctatctggactaccggaagaaggccatcaaggaccttggcatcagccccagcacctgctctttcaatcctggtgtgattgttgccaacatgacagaatggaagcaccagcgcatcaccaagcaattggagaaatggatgcaaaagaatgtggaggaaaacctctatagcagctccctgggaggaggggtggccacctccccaatgctgattgtgtttcatgggaaatattccacaattaaccccctgtggcacataaggcacctgggctggaatccagatgccagatattcggagcattttctgcaggaagctaaattactccactggaatggaagacataaaccttgggacttccctagtgttcacaacgacttatgggaaagctggtttgttcctgaccctgcagggatatttaaactcaatcaccatagctgatataactctacccttaaaatattccctgtatagaaatgtggaattgtccctttgtagccaactataacattgttctttatgaatattacctttgatacatatgatccacaatataaaaaccaaaaactactgtgtgcaaattataccttggaccatataggcattgattaacttctttaagtacatgtgataactatggaaatcaagattatgtgactgaaaaacataaaggaagagacccatctagataacagcaatcaacctgcttaattctgaatgacaattatatccacaaatttttaaaacttctacatgtatttttcacatgaagatctccttaacagtgattactaaaggaaggagatctacatgtatttttcacatgaagatctccttaacagtgattactaaaggagatcttcatgtgaaaaatacatgtagatctcctttagtgaatcacatgaagatctccttaacagtgatgtcgacc

SEQ ID NO: 9692 - DNA, 1913 bp, Homo sapiens
cagcggcttcgcgcagaggtggaagaaacccgagacgttccgaagtcaacgcaagcaaaggggagtgcgggtcggggaggaatattcttttggaaacgtaatattggccttggggctctccagccctttgggacttccaatgggatcttagaagcagccgaagcagcgtgagggcggcagcccagggccagccacgatttgaacgctctgccttgcagctcttctggaccgaggagcccaaagccctaccctcaccattcaccaggtcctgtgggaagagcagcgtggaggtgggctgaggttagaaggtgcagagcgtggaagaagattgtgagctgagtattggacatctgttcttgaatagtccctgggcctgccataggaaaggaagttctccagggttacagttcttatccgcgtgaatacacatggctctgttacgaaaaattaatcaggtgctgctgttccttctgatcgtgaccctctgtgtgattctgtataagaaagttcataaggggactgtgcccaagaatgacgcagatgatgaatccgagactcctgaagaactggaagaagagattcctgtggtgatttgtgctgcagcagggaggatgggtgccactatggctgccatcaatagcatctacagcaacactgacgccaacatcttgttctatgtagtgggactccggaatactctgactcgaatacgaaaatggattgaacattccaaactgagagaaataaactttaaaatcgtggaattcaacccgatggtcctcaaagggaagatcagaccagactcatcgaggcctgaattgctccagcctctgaactttgttcgattttatctccctctacttatccaccaacacgagaaagtcatctatttggacgatgatgtaattgtacaaggtgatatccaagaactgtatgacaccaccttggccctgggccacgcggcggctttctcagatgactgcgatttgccctctgctcaggacataaacagactcgtgggacttcagaacacatatatgggctatctggactaccggaagaaggccatcaaggaccttggcatcagccccagcacctgctctttcaatcctggtgtgattgttgccaacatgacagaatggaagcaccagcgcatcaccaagcaattggagaaatggatgcaaaagaatgtggagtacgtgaaggcttctctaccattttttccatgcttggaaacaaaatcattcaattaattttccacacatagttcaagggttagaaatatttcacagtcatctcaggtcagattttcttacagaggcaatgttaagaaagaaaagggggcagtcaattaaaacctttcctcaaaagatataaatcagaggaatcaagatcctgtggagcgaggagtccctgattatacattttcctagtaagctgttgaaaaatgtgacttgaatcttttcccccaaacaatcttcatttatcttagttgagtttcccctcctaacatagatttttttattaaggattattatataaagtcaattttgctttttaaggtttatttttataatttataatttttcgttatcggagttttaaaatagagaagataaaaataagtctaatacaagcactattatcccatcattgtattgcctagcagtcttgtgtatctggatattttaataccatcataaccttgaatttgcaagtaaagttattctaaataatgtaggattcgaatttgatctcctgtgtctactatttaaaaccctgggagttaaaatggcaaaatattaacactgttactctaggtcatgtatataggagttcatggtattcttactataatgtgtatgtttgacaattttcaaaatgaaaatttgaggggaaaaggccctggccat

SEQ ID NO: 9693 - DNA, 476 bp, Homo sapiens
ctcttacttaaaaactgccgttttctctgaaataagttatgggcagtcacctgcgagaaagtgatggaatgaagcttttgaatagtggtagcatttgggccggcatgttgatccacccgccttggcctcccaaagtgctgggattacaggcatgagccactgcgcctggcttcatttagaatatttttaaacagattagataaccatgagttttgagtgtgctgatagaatttttataggtgacacatgtacattgtttttgatagcaaaagaaaaatcacataatgcaaaagtgttcaaacatctatttttagtaggggagtaggtgtcagtttgtatgttaactataagtaaagcttaatatcaattcactttcttgttaagacttattgtaataattttaaacagaatcaagcctctgaattctgaaatttggaatgtattaacacagaaaagactttacatgctttgtgtta

SEQ ID NO: 9694 - DNA, 1610 bp, Homo sapiens
ggaccgtgtctcttaagaggagggaaaaaaaggacagcgagttggtaatggaatgttgctggatggattacatagatgagacatgggagatagaatagagaatccagaaattctcatgtatgtgtgcgtgtttagtataataacagtagctcacatttgctgagcatttgtgtggcaagtactggagtactttttcaggttatcttatttaactctaacatttctgtaaggtaggtgcaattgttatctccatttcacagagttgcccaaaaccattacttttaaacgctggagccagacaactccagaaatctctgtggtagccagtaaactatacatgacaaattattggtcagtaggaaaaagatcattcgggaaatggcggtggctcacgcctgtaatcccagcacgctgggaggccaaggcaggtggatcacctgaggtcaggagttcgagacgaccctggccaacatggtgaaatcccatctattaaaaatacaaaaagccaagaaaaacaaatattcaattaacaaacggaaagttgtcccacttccaaacagttgttttttgtctatcattgttgataggggtgtgggatacaattactgtcaggcatttttggtgtgaaggtgaaattggtacaaccctatttaccaaaatttaacatatgcattagcctttgccccacagctgtctcatttccgaggcatataccctaaggaaaataagggattcataaggatactatttgccaccttttttaaaaataatgcttctagaaacaagtgtccatcactaggacactagttaagaaaattatgattggtacatgcaatggaatactcttgacccattaaaaactgatggaaagttctttatttgcattaaagtatgtccaaaaaatatagtttcccctcaggaaaaaaaaagcagaatgtagtttagcaagtacagtgctgtcctaatgtgaatatatgtgtgtacatatgttaatataagtgtacaaaaatatctggaagaaggtcagtcaaaatacaagtgttttacattttgtcttttggactttttatctggttggtgttttttgtaatttattattttacaaaaacaaagttgtgttttatgttttaattaaagctgtgccagtgaaaagggagccagttgactcttgaccttcacaagtaggtaaccatgatgaagtaactatgtctggggatctgagtctcagcttttttgtgtctataaatttgattatattcatttacctatagttggacaagctaacctaccacctggacatcatagttttgactccccaaattggactgggtatccattctatgtgttctctgtgtgcctgtcatggtatttgtcacactgtactgtaattccctctgtgccagtagattgtttgctcctgccatacatatacacatgcacatacatactttttctgctatatgttacacatttcttttgatttattatttgtcatctacatttgtatacagaagttttaattttcattagccaaaatgctaatgaaatcacatagatattaaagggatacttggaacaactttatgccaataaattcagtaacttaagca

SEQ ID NO: 9695 - DNA, 392 bp, Homo sapiens
ggcaccactttggagaagatacagacagaggagtgcacagtttgttgagcctccagcttgatgtaagaaataatatgctccttcctctgagtggacagagccacacatcagggcgcgacctgtacatctatacacaatggccctacaatgtagtcaacattttattcccctcatttagagctctgttgtctctgagagggtttaggttggatgtaccttttaattaaaaggactttggctcagaagcaccccaaaaaatcctggttggcattcaggagggaagagatagatcttgtgacttggcttaggataaaagttggtagtaagaggaggtccttgaagtttatgtgttatctggtctagattactaggatggaagcccagagcagaag

SEQ ID NO: 9696 - DNA, 458 bp, Homo sapiens
tcaaacacctgacctcaggtgatcgcctgcctcagcctcccaaagtgctggcattacgggagtgagccaccacgcccagcgcaatctgtgttttaaatgtgcactattaagagggatatttgaggtcttactgtggatactcaatactaacattatactattttaaatacagcatctactcatctttctattactattcaacttgaagcaaatattcttgccattattatttattttcaaatattataccaaccttgcccttttgctttctttcttttttcccctgaatagccaatcataagtggaaagtcattgagtttatttacacccttcattttgccttgattcttgtaagctgaaaaacaatatcctttctgggtatacaatagaaagactttaaaaacaattggcttgtgaatattgttgtgaatattgttgaaactagcttgtaacaatgt

SEQ ID NO: 9697 - DNA, 204 bp, Homo sapiens
agaaggatagcttgagatgagactattttgaagatacatggggtggatattcaaagtgccttttacatagttactgtcctccacagtttccccattaaatgtggaatccttgtgattgcattcttggagggccatcgaaaactagtgaagcacagagagactattttttttctatagatattaatctaaagcaataattggcaa

SEQ ID NO: 9698 - DNA, 275 bp, Homo sapiens
tatgtcatgcatggaagctgcttccaaagagaccagatgttgccctgaaactgagacagagggtgcagcagaggtccctcctcttattgtaaagctaggaagacacccccaaatcatttgcatcagtagagtgactaggtttgtgattttctttatatacatatatatatatatatataaaacatacatatatgttatatatataaaacatacatatatgttttatatatatatatataacatacatatatgttatatatatatataacaaaaaa

SEQ ID NO: 9699 - DNA, 586 bp, Homo sapiens
accgcgcctggccagcaatagttatttttaaaagatcctcctacatgtgattatatgccccttttcatttgagggtagtagaccatatggagaactgacagtggttgagagatttgaagggaactaatagtccagccaaagagcgaaaaatggcaggaaattggaaattaggtctgtctcattggctttattaaccaaaatgaattgggaatctcaatgtaattgatcaggaaggagctccagtcattcctggaggattaatttattattattattattattttttagctgcataccatatcactgtggtgcctttgtttttggaatggagctgttgcctgctgaccacgcctgggggcacctaatcacaagtctttcccaacttctttttcctttaaagcaagccactccagttgaaagagaatgattagacatatgaaagtgtggttttgtttgcccaagagtttatgtataagttaacacattgtacacttttttttttttttaaacttcctctttctctcttatctgcctctgatcacgggatcctggttagttttgctcagggcagctcgcttgacctggt

SEQ ID NO: 9700 - DNA, 434 bp, Homo sapiens
taaatcgtgtgcattcctggaatacatcacacaccttggcatcacatatttcctattaatagttctacaatattctctcatgcatccccacatccaccacaccccgagggcaccacactctttcagggcactgctgactcattcttcagtcaacacacagtcaagaatcatcttctcccgaaagctcctgccccctcacctcccacacgccccagggtccttcaggagcaccttctgttgctgcacttgttgccttgttttttaatttctggcttcttttcctatgagttcctgaagggcagggatatattcttctccatattcccagggcccaacacagttccttgtgtgtaagtggtaagccagccgatttcagccctttttcctttggttgtaaccggcttcattccaagataagattgagtcatgctaaa

SEQ ID NO: 9701 - DNA, 329 bp, Homo sapiens
aattctgagcaaatgatggttaggtgattttttaagaaaaacccaaggctagccctactcgggaagctgggatgggaggattgcttgagcccaggaatttgaggctacagtgagtgatggtgttaccactgcacttcagcctgggtaacatagcaagactggtcttgaaaataaaggaaagcggggaaccgggaattatggctcatgcctgtaatgccaatagtttgggaggctgaggcaggaggatccctgagctcaggagttagaggagttaacgattgcgccactacactccagcccaggtgacagagtgagaccccatttcaaaa

SEQ ID NO: 9702 - DNA, 453 bp, Homo sapiens
attagctggatgtggtggtgcatgcctgtagtcccagctacttaggaggctgacgtgtgaggattacttgagcctgggacatcaaagctccaatgagccatgatcacactgtactctagcctggagaatagagagagaccctgtttaaaaaaaaaaaaaaaagggaaaatgggataatgtttacatatcactccacaacctgggcatccttgaattttctggctgaggaagaagagaagaaggaaaaataaaaatacataggaccttcacaagctattccttctacctggaacatgttcccacttctgcccttctctcactcatgcttagggtctcagtttcaaggtcactccctcctggagacatgcctaaacacccccaaacccgaaggtgggctctgtccaattagcagtgctcccctcaggtctgtgagcatgggatggctcagcccac

SEQ ID NO: 9703 - DNA, 503 bp, Homo sapiens
gtttatttcataattttgataaacgtaccacatttcacatttatgtaaatattatataaaatgtaagccttgcaattttcctctaaattttgaagtactcaaaaataaaatgtttatttaaaaacttcaaacacatagcctagtttctttttctttgtgtaaaatgttttgttgttgttgtttttaagagacagtgtctcactatgttgcccaggctggcctcgaactcttgggctaaagagatctctcacttcaccctcccaggtagttgggaatacaagagcacaccaccactgtaaaactttttatactggaaaaatttaaatattcatggaattaagaataaaataatgaatgcccatgtaccatacattttgtttcaatactcagaaacattttgccaatcggttgtttttgaaatagtttaaggcaaaggcatgacataatttcattttacctctagacacttcaatatgcatgtttaattgatacctgacttcaaa

SEQ ID NO: 9704 - DNA, 499 bp, Homo sapiens
tacaagtgtgagccattgtgccctgctaatttatggaaacttgagaagggttcatggatgagatagtgtggtgtttgaaagcattaaatgagaatagctcaattttattaaaatcatgcctctcctttatttatttaattttattttttatttttttagagagtcttactctgtcacccaagctgggctgcagtggttcattcatggctcactgcaaccttgaactactggtctcatgcaatcctcctgcctcactgcctccgcctccggagtagctagggctacaggcatggaaccaccacaaccagctgatttaattttgtgtgtgtgtgtgtgtgtgtgtgtgtgtgtgtgtagagacagggtgtctcactaggttcccaggctggtcttgaattcctggcctcaagcaatcctcccatattgaccccccaaagcactgagattacaggtgtgagccaccttgcttggccaaaatcatgcctctttttataggtaa

SEQ ID NO: 9705 - DNA, 588 bp, Homo sapiens
tgaatgtgagaggaaagggatggggtggtatgttttgttttgggtccaggggagaaaggcaaggttacaagaatgagtggcttgcaccactgactagtgatgacagattacttctatgccccttgactagtaaacattccaagggacatcgcgatggggtgaggttgctgctatcaagaccagtcacattttgaaaattaacacttgcttccttacaagctgccttccagaggtcaacagcttttcacaagtgaggcacccagttgctgacccttgatttctggaatgtagggggtcaggaatccttggtggcccccagagaaggttggggcacagtgtaacctatataaggaaggatcatactcactctttacatcaattagcaaaattttgaggaaaaagaatctcacttttaaaatgtaaatagctcttcattacccctccagacttaatcctaccagtaactcacaccttagtgtgaaattaataaacagcagctttggagatagctggaggtttgacttagaggaaaaagtaatttttgtagcaggacaattctgggaagatttgtatgggaaggagaaggtg

SEQ ID NO: 9706 - DNA, 510 bp, Homo sapiens
ttttgattataatagataataaaatctgaaagtgatcaaatttgctactttggagacattctgttcctttctctttattccttcacacttccatgggtagaatacagattcccagattttatgttcacaatgtcaggttcattaaaaaaagaaaaaaaattccgagattcttttgaagaaaagtttgatgaatattaattaacacatgctgaagagaaactgaggtgtttttctcttatactgcattcctcttctctctacccagctttaccaaagaaacagaattataataatttaaaaaaatgtgaaatatttcttttccaaaaattaaccaaaaccaaaaatcacaagatatttgaggaaaacaatctatgtgtcaaagagcgagatgaacaaaggaattgagctcagataatgcagagtacagcagagagctttaaaaaaaattgttattgtaagttcattgggactgcagagaatgatacatccataaaataagaataggctgct

SEQ ID NO: 9707 - DNA, 117 bp, Homo sapiens
tgcctctttgatcaggtctttattcaaaagaagctgtccaaaatgatttgacctttatggaataatcaaatttaagagtttatgcagcaggcttcttctcctctgtagtaggtttct

SEQ ID NO: 9708 - DNA, 464 bp, Homo sapiens
agaaataaatgtgttgcttattgcctaaaacactttctggcatataatatgtactcaaaaacataaaggatttttaaagaagcattaaaagaacatgtacattagaacataacaagtgatactaacataggtgataatgagtcaaaatttgggttcttgaaaaaaacaagatgaacacatagattgtcttagaaaacaaagctcttacattattagttaaatacattttttttcactgggatcatgtttgaaaactaaagttgtgggataacttgtatcttttgaggagcttaacattcctaggccagggaaataacaagcaaagaaataatttgattttatattttaaagttcatgcctgtaattccagcactttgggaggccaaagctgggggatcacttgagcccaggagttctagaccagcctgggcaacatagtgagactccatctctccaaaaaaaaa

SEQ ID NO: 9709 - DNA, 313 bp, Homo sapiens
cttcccacattctatgcattcataaggcttttgcagggtgaactttctggtgctgagcaaggttagagggacagccaaaggctctctcacattgtccccactcataaaacctttctgtgttgtgaactttctggtgccctgcaaggtggacatttctgctgtaggatttcccacacctgctgtacacataagggcttgctccagagtgaagtctctggtggtgaacaaggctggagctctggctaaaggatttcccacattctttgcactcataaggactttctccaatatgggttctttgatgttgaccaag

SEQ ID NO: 9710 - DNA, 529 bp, Homo sapiens
acagggtttcaccatgttggccaggctggtcttgaacacctgacctcaggtgatccacccgccttggcctcccgtagtgctgtgttacaggcatgagccaccgtgcctggccctgaatccattatttaaagttaagatatttttaaaaagagataactattgtgcctcttctcgtgatttaatgaggtatagactaaccacctatgaaatagtctttccaaaaatttagacagaaatctgatcaagccagtttatagaacatacattcaactgagaaacatgttaaaggactcttcttggatgctgtcagcaaaattcataatgttagaactctgcagaaaaaaaaaattgtttttcccccaacaaataaatctcataaaaaagaatatagattataaagaagcctaagagacatatcaacccttaataaaaggatcctgtttggctctgacacactaatgaaattggaagaataattagatatttgatgctagtaagggtatgctctatcgggtcctcaggtcagccc

SEQ ID NO: 9711 - DNA, 362 bp, Homo sapiens
tgcccttctttgggctttggtatctgccctcactgtcgtagggtatcagcctcccttagcccacttaagaaatggctctgcttttatttattttaagattttatttgaaaggagattcttttgacttttttttttttttttagtttcaaaatgactggactaagtgagccaagcacccctttttgctttatatcttgtctggtccgtgaacacccccttactctgagtgtttcagaccttgggaacaagaaatagtttctcttggctgggcgtggtgggctcacgcctgtaatcccagcactttgggaggctgaggcgggtggatcacctgaggtcaggagtttgagaccagcctggccaac

SEQ ID NO: 9712 - DNA, 766 bp, Homo sapiens
  misc_feature (676)..(676): n is a, c, g, or t
ccaagatggtccctgccctaggtaaagtcttcagaggacctcacacctcagaagtcatctctgctatgggctgtgaatcccaccatacctacaatgatctcagcatcctgcctttttgtgtcactccctcgaggttcaaagcccttggcaagaacatttgcagatgccccagctgtcagagagaaaagattatcttcctcctttagcttccacagtgggatgtgtgaccctgcctcctgcctattttaggactctgcctaaactaagtgttctggtgctaggtgaccaaaaccaaaaatccacgaacatgttctaacaaaataatgctgtgaaggtttcctgatgatccatgttactcccatagtatctcccctcttcctccctactacttaccagcaagagaccgtaccacctatttaggatcaatgtaaagcagagctaatatctgaaatcccagtttcttttcaaatgcttccctttccaaatttgaagccagaagaaacaatgtatcactgctgatgtcaatatgacttcctcggctgggcaccgtggctcacacctgtaatcccagcactttttgagaccgaggtgggcagatcagttgaggtcaggagttcaagaccagcctggccaacatggtgaaaccccaactctactaaaaatacaaaagttagcntcagtgtgggggcacacgcctgtaatcccatctacttgggaggctgaggcaggaggatcgcttgaacctgggaagtggaggttgcaacta

SEQ ID NO: 9713 - DNA, 274 bp, Homo sapiens
atatatacatatatatgtatatcctagtatatatgtatatatatatatacacatatatcctagtatatatatacacacatatcctagtatatatgtatatatatatcctagtgtgtgtgtatatatatatatatatatcctagtgtgtgtgtgtgtgtatatatatatatatatctcctagtatacagtaacacacctagtgtgttacctgcagcatctcacttaattcttaacagcaaccctgggaagtagatgttgtttcatttttacaggt

SEQ ID NO: 9714 - DNA, 6460 bp, Homo sapiens
  misc_feature (1281)..(1281): n is a, c, g, or t
gggtcctggagctctctcggcccggcaggtttcgctcccgcccctccggccttccacagctgtcctggccgcagggtgttcaaggcgggacacaccaggctagagatccgcgatcgggccccgcctcaggctctgtgcacacccctgcctggtgacctccattggtgctccagcgtgaacatggtgcaaagataccagtctcctgtccgagtctacaagtacccgtttgagctggtcatggcggcctacgagaagcgtttccccacgtgcccacagatcccagtcttcctgggcagcgaggtcttgcgcgagtcccgcagcccggacggggctgtgcacgtggtggagcggagctgccggctgcgcgtggacgccccgcggctgctgcggaagatcgcaggtgttgagcacgtggtcttcgtgcagacaaacatcttgaactggaaggagaggacgctcctcatcgaagcgcacaatgagaccttcgccaaccgcgtggtggtgaacgagcactgcagctacacggtccaccctgagaatgaagactggacttgcttcgagcagtctgcctcactggacattcggtctttctttggctttgaaaatgccttggagaagatcgccatgaagcagtacaccgccaacgtcaagagggggaaggaggtgattgagcattacctgaatgagctcatctcccagggtacctcgcacattccgcgctggacgcctgccccagtccgtgaggaggatgcccgcaaccaggctggaccgagggaccccagctccctggaggcccacgggccccgtagcaccctggggcccgctctggaggcggtcagtatggacggggacaagctggatgcggactacattgagaggtgcctgggccacctcacgcccatgcaggagagctgcctgatccagcttcggcactggttacaggagacccacaaaggcaagattcccaaagatgagcacatccttcggttcctgcgggctcatgacttccacctggacaaggcccgggaaatgctgcgccagtccttgagctggcgcaagcagcaccaggtggatctcctccttcagacctggcaaccccctgccctgctggaggagttctatgcagggggctggcattaccaggacatagatggccgccccctctacatcctccgcctgggccagatggacaccaaaggcttgatgaaggccgtgggggaggaggcgctgctgcggcatgttctctccgtcaacgaggaaggacagaagcggtgtgagggnagcacaaggcagctgggccgtcccatcagctcctggacctgcctgctagacctggagggactcaacatgcggcacctgtggcggccgggggtgaaggccctgctgcggatgattgaggtggttgaggacaattacccagagaccctgggtcggctgctcatcgtgcgagccccccgagtcttccccgtgctctggacactgatcagccccttcatcaatgagaacaccaggcggaagttcctcatctacagtggcagcaactaccagggacccggaggccttgtggactatctggatagagaagtgatccctgacttccttgggggagagagtgtgtgtaatgtccccgaaggagggctggtccccaagtccctctacatgacagaagaggagcaggagcacacggaccagctgtggcagtggagtgagacctaccattcagccagcgtgctccgcggagccccccacgaggtggccgtggagatcctggaaggagagtcggtcatcacctgggactttgacatcctgcgaggggacgtggtgttcagcctgtaccacaccaagcaggcgcccaggctgggcgcccgggaaccggggaccagggccagcgggcagctgatcgacaaaggctgggtcctgggcagggattacagccgtgtggaggctccccttgtctgccgggagggggagagcatccagggctcccatgtgacccggtggcccggcgtctacctgctccagtggcaaatgcacagcccccccagcagcgtggcctgcagcctcccgggtgtggacgatgtcctgacggctctgcacagccccgggcccaagtgcaaacttctctactactgtgaggtgctcgcctctgaggacttcaggggctccatgtccagcctggaatcctgcaccagcggcttctcccagctcagcgccgccacctcgtcctcctcctccggccagtctcatagcagctccctggtctccagatagccgggcccagtgtttcagggccgcccgctcgcctccagtgtccagaaatgtccagaatgagaagccagctaactgcagggcctgggaccatgtgggctggagccccaggcctagatgctgcccaagttggggtgtctggagcggatggcaaggatccagaactggcctgtgggtggtgtcagggctcttgaaattgcaaggacagaaccatctccttccggcttcgtgtaaggaagaccaagccaaggccaaggtgtctaccataccacacctttgggacatccgggcttagcgacgtcagccaggcccatctcctctctgtccacctcttgctctgctttcgccatgcaggggaccatcactatcaggtgcccttctcctccccgcagcttgcctgcataagagagcctcttcctcccaaaggctccagcacacttcccagagctgagtcttagcctggaagggggagcgattgccaggtcaattcctgaaccaatcacagttgccaggcacactggagaatgctgattggccagcagggtcatgcccaatctggaccaatcaccgtgatccagggttgcagtgaggtgcagtgattggccagcctggatcacatgcacatctctggaaccaaccacctgctctcaaaagcactagtgggtgcctcgaggagtactggggtcccccctaagaagaaggaggaaggatgctggggaggcagaaatgaagggtgtttaccttggcatctgattgcataacgttctgttatgcagtatcaagatgtgcttggtgagcagttaagtgagttacaggcgctgctctttgtggggaacagcacatcctgaagtgaaaatccatgttccctgcacttggccagcatggcctaagcctgaccatccctgattggagagggtgggagagccctgggtttctgctaagttccaggcagtgatggggtgactgaggctgtctgtataccccactggagatgcctttctctcctagggaactgtttaattatgactgtttttggttgtaagccacagagacccatgcccaggtgcttcaacacaaaagcatgatcattcatgggtgcatagaactggccagtccaggagggcttgcttcaggtaaggctagatccagggtctcaacatggagtctcgattccccccgcgagtggaggctgctgtgtctgccctggggcagatatgactctggaactaggttcaatattgacatgagttcccctagttactacacaggagcgtcttgggtctccttggggcctgaggacatttctcctttcctttcctggactccccaaaaggcagccagtcaggggtcaccaacttgaagcctgatctggcctgcttttagtgttgcttttttgcctttagaatggtttaaaaattgaggcatttcgcatcgaaatcaggatttctggcttcccttaggcatttgggagcaccagcagaatggggtcactattgttgcatgaagacaacacctctgcacccctggatgtggccacgccagtccctaccccattgacttgcgcccagcccacattacacatcctcatgacctgcgtggcaggagtctcactgacatggctctgtcagcagtggctggtacccttgtctcctggccttgcttagagttggggctcatctctgctgcagtaactgagccaaggggtggttttgtggccacaagaatcatctttatgcaggctcagcaatgcagggccaggaaacttatatctacgccagcctcaaccccaaacccaaggaagagagaaagtgtcatcttttcagatacatccttcttcctgctgggagagagccttgcccaccttcctgttggctctctgtccgcttctcaggtatctgaacaaaatagattgctttgcactctgcgtcaaggtgtgtgtgcacatgtgtgcataagagaccgactgattggaaggagacgttctcaaaactaattgctcccatatcaccaggcatttattgctgagagcaacttgcaatattttcaactatctttaagtgaatttctagcttttctcttaaaaactaggtgttatcctacaagtatgctgggataagctgccctggcagtctttatacatttattgtctagccccagagaaggacacagaagccttttacggaaggaagctggaactgcctgttccagaggcgggtggggggaggggagtctgctatcagctgtccacccttaacagtgggggtgaggaacctcaggccctttcagttctgctcttgagagtgctctctccctagggaaaaccagcccaaactggcttaagcaacaaagcaaattccctgggtcctgtactagggatggctgaaggtgggtgctgcttcagatatggctggatccaggagcttaatgtcctcaggcctctcaactgcacccaggcctcttgactctgcatctctttgcatgctgacctcattctttcttccacctggcgggaaagatggctgccagcagccccaagcctataatttcaggattcacactctaagagatgcttttccatctcaaatctcatggaaggctctgattggcccagctcgagtcacatgcttattcctgtgggccacactggcaaggaactagggtcccgtgattgacattccctgcagaagccgcagcaggattggggagggccattcccccaatggacaagagaagctggaccacagaaccagcaggtatccatggtggcatctgctacggccggctctcctcccatgtggaggtctcggggacccacgtggaagcattatcaaggtcattcttcttgccttcgggaggactggaattaaaaataatccaaggaagggattgccaagcttttggcttttgaatttcccctgagccacaaaggctggaagtgccttggcttgggcttcttgcatcattagttcattaatccattgtgaccaggacagaagcaacccacaagcagcattactgttggtgtttgggcacctgggccttgaatttaggccaggactcaaaccccagccttcctttcactagctgtgtaaccttgaccaggtgacttaacctctctgtgcctcagtttcctcatctgtaaagtgaggatagcagtgcctacctcaataggttgtagtgggacgaaatgagggagtagctgtaaagctttcagcacagctcccagaacacagaaagcgctccattaatgtcagtggtcattctgattacttaatgcttcgcatccaaagactcgttttcttcctgaggtcgcctatccctgtttttcgttattgcacccagagaaaagtaggtgtcaagaattattgccctctgagttgggtgtgcagtctttctcttttagaaactgcttgtgtgggcggggcgtggtggctcatgcctataatcccaacactttgggaggctgaggccggctgatcgcttgagtgcaggagttcaagaccagcctgggcaacatagtgagaccctgtctctacaaaaaattaaaaaatgagccaggcgtggtggtgcgtgcctatagtctcagctgctcgggaggctgaggcagaaggattgcttggaggtcaaggctggagtgagccatgatctcacccctgtacttcatcctgggtgacaaagcaagaccctgtctcaaaaaaagaagaaagaagctgcttgtgttttctgggtaagtccacccatctgagggagtgtattctgagtggtatttcccttggcagttagaaaatgttttttcccagaggttgaagtatggagagtttgagactctttttttctaccctgcactctctggaattccccctccctgctgtaaaatttattgtccaatgagaatagtataattgttttcaacaaagtctctttgagccagtgaaacacgatgggtttttttgtttgcctgatcacttgctccaaccagcagcattaaatgttttccatttggataaacttgcatcgtcagcttcctaaaaccctggaggtttcccgtgggctcgttcaagaactttccagctgttgtttaaaagactttagagctagcttgttcagcctgtggcctgcaggctgcacgcggccccggactgctttgaatgtgctccaacacgagttcgtaaactttcttaaaatactgagg

SEQ ID NO: 9715 - DNA, 226 bp, Homo sapiens
tggcctgcagcctcccgggtgtggacgatgtcctgacggctctgcacagccccgggcccaagtgcaaacttctctactactgtgaggtgctcgcctctgaggacttcaggtaggagggctccggagcggggtcctgggcaggaaggaccctggggctgattgacaatgcagatgcctggcctcctgtctcccagctgggtcagcttctcccggggtgggaccccag

SEQ ID NO: 9716 - DNA, 668 bp, Homo sapiens
ggacgcgtgggcgaccacgcgtccgggaaatccttttgcctaaattctgaacttggtctgcagaccatccagaggaataaaaaggttggccttagtagtcaaaaacaaagctgatagccagacacgttctgatttctgcccttgttccagctttgacgtattatctgttgccttatttctcattgcctcttctacttgtaaaatgcttttcactttctgtctaggttaaagctaaactgaatctatggctttaaataaattaagatcctaaactctctagcttaagtgtaaatgaagtacagtagtttccctactgaaccctgcctcttgtgtccctggaaccttctagaacacctgccttctaccctctggttgggagatgcagccaccacatcccttcatatcatactgttttgaataaattttcaaatccttattgttcagagttgtttgggggttctgtttcagagcataaaacctaaaggttatagtagaacaaggcaccttcttaaaagaaatcttgcttcagaccatcagttacagagaatttctaaagtaaaattgaagcaactacaacttctccttagacactttggaatctaaccacttaaggacctttttaaagagatagcttctcttctttctgaagatcaatttctcccaaggcc

SEQ ID NO: 9717 - DNA, 399 bp, Homo sapiens
tcagaaagtataatcctccaaatttcttattttttaacaatttctttttgtgatcttgtcacttggcatttccagatatattttaggagtggttttccaatttctgtgaaaaaagtcttctgggatttggtagggattgcactgaatatatataagttgacttttcacctataaagactctccttgtgctgaatttcagttcagctggtcatcgttgcttgtacaactctgtgatgaattgaaaatataattttggccttttgtttcttttatcctagttgttggagacggatgtcatgcctttcttaaccttgtgtgttctgctcaaaaatggaggttctcagccaggtgtggttgttcatgcctgtatccaagcactttgggaggccaagatgaggg

SEQ ID NO: 9718 - DNA, 747 bp, Homo sapiens
ggattacaggcgcctgccacagtgcccggctaatttttgtatttttagtagagacagggtttcaccatgttggccaggctggtctcaaactcctgacctcaggtgatctacccaccttggcctcccaaagtgctgggattacaggcgtgagccaccgcgcctggccctctgcagttgtttaataaggcacagaatacctgtagcataggtcagccttacgatgtccatgaattacatattcagacgttttagagcctgatacattttggaaaagaaaaacaacttctacacctattctacagtccgcatttaaaacaataaattcctctattaaaaacgtaaagccgggtttgcttgcgtgccacagggaatatatccaggaaggttattatgaagctgtcaaatcaagatgatgggaataaggcagtttgaacgaacagtcttcccacagtcaggccatttttgctgatttggtttagaattttcagaaatacttagtacactccacctgttctttgatgggaatatctaagaaggctaggtaggttcttagggttagcctgagtcatctaggggctcaactccttgtgaggggaaatgacagtgaacaagttagtactttgctccacaaatgcatgaaaggacaaatttgcatcttctatcagtatttaacttccttttgctaatgacaaataaatatatctatatttttacacaacaaacaaccaacaacaaacaaaacaaggg

SEQ ID NO: 9719 - DNA, 418 bp, Homo sapiens
ttcattcagcagatatttgctaaatgtataattaaataccaagatatcccccaactcccctagaagatatgaatgtataggttaataatcctttacccctcccaagaccttatttttaaaaagtaaaaataagcccatcctatctggataactgttatacaggtggtatattatacatgccagaggagaactgtaaacattaggatgatctgtgtaaatgatgctttggcacaacacctattttaagtacatttcatatgtctactgtgttcatcaagaaaattaatgtagttgggtgccttttgaaaatgcaaatatgttttatttcattgttttatatccttagcatatagttacatgtgatgaagacactgaaatgaaaaccctaataaattctttcttgtggaaaaaaaaaaaa

SEQ ID NO: 9720 - DNA, 468 bp, Homo sapiens
agccactctagtcattgtgaccttcacccttccaggatgacttcacctacagaggaaagacaggagggcctgggagcaactggctgctccagaaacacgcaatgggcccctcatgttcaatagaccaatatataagctgtggaagaaaaaagacattgctttttgagaagcttctataaaatctgctgtacaatattgtacttatagttaactatattgtgcacttaaagtttgttaggagggtagatctcttgttaagtgtccctgacacaaaggacatttaacaaaacaaaacagaaaataacaaaaccaaaggggaaagaagaaacttttggaggtgatggatacatttattgctttgattgtggtattttcccaggggtatacatacatatgtcaaaactcattgaactgtatactttaaatgtgcatatttttggtgtatccattatacctcaataaagctgt

SEQ ID NO: 9721 - DNA, 622 bp, Homo sapiens
ggtggggcagccagacaccacaattcacaccagcaactatctgatcagagcgatgacgagaaccgcaaagccaaaaccagtgtgccgtggaagcaccggaagtccagggagggccaagtccacccagcatcaccacaccaaagagcagctctttagaatcctgctaaagctcaaaaacatgaaaccacaacgaggatttcttgcgtgcttgctctggacccaggactgttctaagcactcatggatccttccatttgatcctcacaacagccatgtcttcctctgcctctaactgaggctctgctatgtgccatgtccctgacccaccaatgcacctctactatagtcatcttaggagatgattaatgttatccccattagagaaccccagaagaagattttttgtttgttttttgttttgttttggttttttttgagatagagtcttgttctgctgcccaagctggagtggcagtggcatgatctcagcttaatgcaacctctacctcccaggttcaagtgagtctcatgcctcagcctcccaagtagctggaattacaggtatgcctcaccacacccagctaatgtagaattaatttatgttagttttcgttaaagccac

SEQ ID NO: 9722 - DNA, 391 bp, Homo sapiens
cagagcctttgcacatactattctctctgcacagaaggttctgttccctggtaccggttcaccttgttctcagatcaagcatctgccttcctcattaggtcaattttctctaaactcctataacactcacattttgtcttcaacgtacttattgctattatagttttatattatttgcttgtattattaatgttggttaatctttgattaatatgggctctcacctcccactctcaccctgctcatcagtcttggtgcaagaaacagcatagagtctgtctacagcttttagttttgttaattttattttcattttgttatgtttgttcatcagtgcactcagaccatgtctggtacatggctgaaataaaatacatgtcttttgaatgaa

SEQ ID NO: 9723 - DNA, 459 bp, Homo sapiens
gtcctcacctccttttgggggaggggcctggtgggatggaaggtgtctgtggccggctgcccagaacaacaagaagggccctcttcctccttgaacttgagccagcccctggcgtctttctcggggccagagctttgcctctaaatggtctttgtttgcagacgatctgctgtgcagatcatgaaccgtcgccgcagtgccagacagactcttcatccggaccggccgtcccactgggtcccctcaggaaagcgcagaagccggggaccccaaaccgcgtccagctcctcccacccgcccttctcggagccgcgcacttggtaacttgcgtgtgaagaactcacggccgtgttgccaggaaactgcggggagcagcctttgtggtctcacatatgcgtaacataataataaataacggttaacgtgataataaataaacaaataacaataattataacg

SEQ ID NO: 9724 - DNA, 378 bp, Homo sapiens
gaggcagatggatcacctgaggtcaggagtacgagaccagcctggccaacatggtgaaacccagtctctactaaaaatacaaaaaattagccaggcatgctggcactcgcctgtaggcccagctacttgggaggctgaggcaagagaattgcttaaacctgggagcggaggttgcagtgagccaagatcgcgccactgcactccagcctgggtaacagagcgaaactccatctcaaaaataaaaaaacaatttagattatatttttgtttattagtgtcatgctgtcattttacttaaatatttcaaaacctggatctgttggctttatactctcttctttaaagcattcccttaaatatgggatttcttgaccaaaa

SEQ ID NO: 9725 - DNA, 1508 bp, Homo sapiens
gtgcttttggaaaagatcatatgacagctataaagactctgatgaaaggttactagcaggttattcaaaggtactttttttgaaggcaagattttaaggcatgttagggtaggcattcaagtagggtgattttttaaaaatgtatttgcttgccgcagaagacaagtacaggttctgctctgatgcctgtcctggtcctctttcccttttaatgttagaatgtggcaaatgctcagtaatcactgagctagggatttccaaggctcttgtctttgtctgcatcccaggtccagggattgtacagttggtaaactgtaccaaagcatggagaccaggtgtttacgaggattgaagcatagttggtgctcctttcaccaagccttgtaccacaagcctagtgctgtatccatccagagacaagggtgccgttttccttactccaaatttacataagctaccagtgtttgcacccatgctgggctggccccacccagaggagggtgctttttctaactcacaaccaaacatacaggcagaaatggtcctgcctgtgcctacttctctgttagaaaagaaacactcctcttactcacactcatcggattccagttaagccactgtttgcaggggcattccctgaggaaattcgggctggagaagagagatgaaaatatctttctcaattctacctttgtataggaactccattctttgtctatccatagactattggattcccttagcctatatgtgaagaaggatctgatacagagcctaagtcttactgagagccttagaattgtctttagtgaagtgttaaatagtcgctttcaagcattcacttttgtagatgtcttcgcaggatttaaagaaagaataaaacatgccaggatatttatgaatcatgagatttaatagagaccaaagtagatcttattactgatgtgcttactgcttcattaaattccctttaaggtttgcggcttggatatggatcatttgcaataataattaggcagtgatcgattgattgggtctgacattgcacttgtcaccttgaaatgcaaaatccatctattttcaacagtgaacatttctcgctaatcttgcacaccagcatgtgatagtttattttatggagaaagtacaatttataaagtttggagacttaacattaaccttttactaagaatgaagtatcacttgtcattttacaaagaaatgaaaatcatccaaccagcaatttttttgagattagaaaacacagcctaatttcaaaagaatttttcaaatccaaaacgcatgcacttcaattgagtgctacaagtatattgtgagtattggagtttactaaaccttcacatggagtataaatgataaaattgtgagcttgagactagctctgctgtgtgtacagacacacacacacacatttagacacacacacgtctatttgtctatctatttccacatttaattccctaattctatctttgcctcaaaaaaaa

SEQ ID NO: 9726 - DNA, 244 bp, Homo sapiens
atactgatcttgcttcttgtacacaggaaaagcacaaaaagtcaatggtacaaaactgagtttcccagatgttccaagaagactcagttctatgaccctggagaaaaacttcactgtaccctctgggccctagtttccccatatgggataaaagggagcttagactggaatctctgtttaaacagaagagtaattttgagtaggctctttctcaaagtcgattttacaagttttagcacacttt

SEQ ID NO: 9727 - DNA, 454 bp, Homo sapiens
tttagggcagagatgctgtttaaaaatggcagtgactcaatacatcaaatgatgaacagtattttttttcagtgtctaacacagatttctgcttaaaccattttgttggtaaaagtatccagagctctaatgttctacctgcctggttttaataatttaaaaaaaaaactgacatatggttgtgaatgtgtactggatttaaaaagactcatctattttaaaagctagcactgttgctgctaatgatagagtcaatacagtgtgtctgcagcacccagaggtatggagccactcccctcctctccttccacgccggccccacagtgggtcatgctccagggtcgtgccatcattcagacatgtgctccgaaactaccttgatgacttttgttctgatttgtaagatgccccccacccctgccaattcctctcttgttcaaggttaaaaaacaaa

SEQ ID NO: 9728 - DNA, 1436 bp, Homo sapiens
  misc_feature (4)..(4): n is a, c, g, or t
ccanctgtgctacagcctgggcaacagagcaggaccccatctcttaaaaaaatgccacttctcctgttcaatgatgagactcctaatatatgagaggaggccctcctatgtatttcaaatgtggagaggcatatacttctactcagattgaaagatttatcttggaaatccttttttggtttcctttctacataatatgacttcttatttcattccaacttaattccaaaaatatttatccagcacctactgtgaaccagtactgtgctaggccccaggtattacagtagttatcaagacagacatgacctctgcctctaaggagcttagagcctagcaggggaacaggaacttagacaaatttaagtgctgtcccgtagggtactttgaggtcaaatagtagaggcacttcacgtaacataggaggtcaaggaaggctttctacacatttcatttaaatgaagacctaaagggaagcaagaaaaggcagaagagaatgttactggcaaagggaaaagcatgtgctagaagcaagcagagatgagagattaagcttgatgcttttgagaaattaaaagaggttcaagttcgtaatggctacagctgtgagatcaactcttttaagtctcatgacagtacctgtaactaataatattatcccctccatttttatggttgtggcaaatgaggaaaagatgttaaatattttgccctaggtcatccatctctagtaagtggcacagccagggattgaacccaggtcatctggctgtagcatattggctcctaactaccatactggattgcctctcagctggggcatagtcttccttagtaaatggaatggtctgtgtctggtactacctaccataaaaagagctggagcttataggatctggattagtttagaaatacaggtttgctttagtcttttattcttgattgggaatgaaatgcttcatttgatatgcaactctgaggctattgacacatattttccaaaaaaccatagatgggaaattataactggttacatgtttattacaaaaataaaattggtgtgaaatatgtatttcctgcaaggctagggtttttgtttgattgttaaagttaacttggcaatatccttttctctgatttttaaagttaggctgagtgcagtggctcatgcctgtaatcccaaccctttgggcaaccaaggccggaggatcacttgagcccagaagtttaataccagcctggttaagatagtgagatgcttactctacaaaaataaaaaaataagttagctggatgcagtggtgagtttctaagtcctagttataggaggctaaggcaggaggatcccctgagcccagaagttcaaggcagcagtgagctatgattgtgccactgtactccagcctgggtgacaaagcaagaccccatctctcaac

SEQ ID NO: 9729 - DNA, 812 bp, Homo sapiens
ggtcgttgaacattactgataccctctttgatctaaaccctcctttcgtgatcacgcctggtggctcaaagaattgctcccccagcttactgttcctgttggtgctgaaagaatgctcgtaattgttaccaaacagtggacggagcaaggcaacatgtcccctttgcccagctggctcccagttggcacttcattatggcaaagacagagggggtggggtccccgggccttcggcatttcatttgcacccacatgtaggctcacttcttggcctgggaattgatcggtgccagatgctccatctagccagcatccccaccgcagcagggctgcccgcctcctgtttcgtgaaaaacggcccggattttcatcagaccttaattggcctgggtctggccttcattctaccccagcctcttcacagactgctggccactggctgttccctcctccagccaggacaatgccggtccccgggcactgaccctggcccaggcaggcctgccaactccatagctctcatttctcactctgcacatcagtgctggcttcccacacccacagctcctccagaaggaaggtttgtcagcgggcttcaccatgcactctgacataccactgtgtgtctgtccctgcagggccctggaatcccacagttgtttcctgtacccaggcctggggagccagccagtcacatggaccgtgagtgtatccgcctcacgcttctctgtggccctggcttctcccagtggattccgcaaggtgtttcctgcaaatcctgctgatgtctttgctggcacgtagcaaaatcc

SEQ ID NO: 9730 - DNA, 462 bp, Homo sapiens
gtggttactttgcaccaggcactgtgctaagtacctcaaggggagtatctcccttaatgcctgcaacatcctatgagccttgtatgattgcatctcccttttcaagctgaaaagaagttacatgctttgcccgacagtctatagctaggaggagctggagctgagattcaaccccaggttctctggtgcccaagtgctcatgtctttgccctgtgtgcccctctttcacagaaacagagcttcagccaaatcctggaacggaagctcttgggaagctgcctgtgacctttcttattgtgtcccctcagcacaggtcatgcacaggcagctgggaatagatatgcgagttaaaggaattctcgttggaaaacaccagagggatccacagggccacccccccgcccccgcaataccactgtgtgtctgtccctgcagggccctggaatcccacagttgtttcct

SEQ ID NO: 9731 - DNA, 909 bp, Homo sapiens
tatctaaataggcactaatgtgttttttttcctgctactgatgttttttcagaccttacctttctgaattgaaaatatttgataggctaaaatgccacatttattagctggtttatcctgttcttaaaccacaaaagcttactaattctctttttcatccaaacttaccaaagtgatagtgcttctaatagaaatataattgaattgtgccactctttatatatggagataatacaaattggaccctgatctgcaggatgtagcatttagttatatttttagtggtattaaaagcagggtttattagccaggcctggtggcatatgcctgtaatcccagctactcgggaggctgaggcacaagaattgcttgaacccaggaggcagaggtggcagtgagctgagatcattgccactgcacttcagcctgggtgacacagcaagatagcaagatgccatctcaaaaaaaaaaaagaaagaaagaaagaaaaaaaaaggagggtttgccctttagctaactgtctgcaagtgccagtaacctccgcttggtcagagggtcagctccagtttgaggctgcagcctgggacccagaagagcagtatctcagggcagcataaatggtttgcatctatcctagcgggacctcaccgatgctatgtcctaactactgagctacccatccagatttgacgagagatagtcacaaagaagtgtgcatttaccccacggccctgctgttttcccctgtagttctttaaaacatccatgggcattagaaggttctgtgatagctttacttatctaacaaagctggattttttttttcttttcatctgttgttttacaatttggtgactcctgttgtccttatttgatatgatcattaatacaagtttttaaaaacagaaa

SEQ ID NO: 9732 - DNA, 401 bp, Homo sapiens
gaggctttaggctagttaagggttttagggcatggagtggaaggagaggaatgatgaattccctttttgaaatgaagaaacgtaatttaatgagtgcagttaaagagggaggatgatacgttggatgtatttaaaaccatttttggggacgggcacgtggttcacgcctgtaatcccagcactttgggaggccaagacaggcagatcactggagcccaggagtttgagaccagcttgggcaacatggagagactcccatctccacaaaaagtatagaaattagctgggcgtggtggtacacacctgtagtcccagctcctacggaggctgaggtgggaggatctcttgagcctgggaggcagagattgcagtgagctgagattgcaccactgcactccagc

SEQ ID NO: 9733 - DNA, 367 bp, Homo sapiens
gtactctgaaggagcttacacagcatcaggatgattgtccttagttttccatagaaattaatctgttagattgtttaactttgctatagttttggcaatttacatttttctgtaaatatttccttttatccaggttctcaaattattttgcatataagtaagcaaagtaatgtcacgttatgttttaaatgttatcagtttctatggttactttttcattaaaattatttatttgggttgtttctgttttctgtatttagcttgataaggttacctaatgatttatctattttattagttttaaaaaatagaatcagctttgggattcatatattcttcagttctttaattcattttattttgcttt

SEQ ID NO: 9734 - DNA, 486 bp, Homo sapiens
tttttcttgagatgatggagtgtcgctcttgttgcccaggctggagtgcaatggcgtgatcatggctcactgcaacctctgcctcccgtggtcaagcaattctcctgcctcagccaccctagtagctgggattacaggcgcacaccaccacacccagctaattttttgtatttttagtagagacggggtttcaccactttggccaggctggtcttgaactcctgacctcaagtgatccacccacctcagcctcccaaagtgctgggattacaggcgtgagccaccaagcccatcccattaagctacttctaatatgaccactgctgctttgctgctatcaggtttatgggcgctgttccaggtgccagatgctgaactttcgatatgtttcctcacttagttctcacaacaataaaatgaggtaagggttattattattcccatttcacagagaaagcaactgagccttaaagaagtaacttctgc

SEQ ID NO: 9735 - DNA, 383 bp, Homo sapiens
ttgggggggctgcccaggaggaggtgagctcctcattgccggagatgtgcaaactgtgcctggtaggcgtctgctggagaggatgtacgggcacccagatgcccaaagccactcctggccaggcaggacccagagcaaaatgaagtgtgggaatgtccgctccagaattactaagaatttcaacacaatgacaggagagtattaagccaggggcaggacccttctgagttccagggtctgtgtgaccacacaggtccaatgccctccaagccagatcttttggatcggaggaagaagtgtgaggaatgggtctcagggtcatctcaaggtcagtaccatgctaggggcctgaagggatgggccttgtgaagtcaatgggatgg

SEQ ID NO: 9736 - DNA, 472 bp, Homo sapiens
cctgtttccactctttgtttggtgggcaggaaggctcctgctcttcagttggaagtggctgcagctgttattagcagataagcaggagtggcctggccatttctgtgactcacagtgacttagtgggattcatatcaagaattccttccttttctcttgacagttttcaggtacttcagaaggttaggtagaagggatatgagtgattaagatatattttataggaataattgaaagctgggcatttgatgtgttttgattttagaacagagtactggacagcttcacatttggattctgggcaggtatgaattctaatgagagagttaaaaatagtgctaggtaactagtaaagtaagtgacacagagactttcctttagttcttcgtccatctttgtttctcattcgttgacttgcattgcctcatcctttatctactctatcagtgtgaggttatagaataatagagag

SEQ ID NO: 9737 - DNA, 113 bp, Homo sapiens
aaatgctggacaaccttacagctcatctgctgaagagtgtctttatgagttgaggcttcaatgctttcatggagaaattgcctgatttaagtaaatcatgtcactttcaccct

SEQ ID NO: 9738 - DNA, 600 bp, Homo sapiens
agctctaggactttggcatatctgttgttggaggcgtatagtggggggcatgactcagcttctgcttaagtacaagttgtctgcagcgaaggaagaatttgattgtagtatcaacagaaccagacagaactctttgaatataattatatatcttggaaactgactcatcaaagctattagattacatagcatcatttaagcatcattgggctctgtacttttcattatctgtacttttcattatggagtataataggctttatttggtacagaaattgggtctaagatggaaacaacttgtgatttttgaataaacttttggggattagttactttgatgttgtcaagatagcagcatagtaagtcctctgcctttccttttgatttatttataatttagaatcagtttatgattttaaaaaatgtgacagacacagtggcatgcaccagtagtaccagccacatgggaaactgaggcagaaggatcacttgatcccagaagatagagaccaccctgggcaacatagtgagagccccatctcaaaaaaaaaaaaatcaattcccaataccattccagaacacttttaatataaccagatg

SEQ ID NO: 9739 - DNA, 296 bp, Homo sapiens
tttgggtggggacacaaagcctaaccatatcaacatctttgagatcattaactcaagttcccttattttacatcagaagtaaaggaaacttaggaaaggataaattagatgattttctgtgggttgcagtgttgccagagctaactttgtgatacccaggcctgttcaccacactttctacttcaccatattataaatttaggaaaactccataatacatgactcatgttgaagaaacttctggggcggggccaagatggccaactagaaacagcaacgttcggaggctcccatcg

SEQ ID NO: 9740 - DNA, 563 bp, Homo sapiens
gcttttctgcatctggttagacaaggaaatctgcaatttttgacttgcagcatttagaaataagttattttagcaatccacacactcgtggtttattctgaactaacttgagacaaacagctacagatagggaatatcatgagtatttccaagactaaaactcttcacaaagtcagtgggaccctctcatgggagggttttaagacccacaataaaaaaggtggggaaacattgagtggaaagagggcagcaggtcaggggccttccccagaggcctaacacacccaacattaccctggatgaaaacaaatacataccataacatcacactttcttcaatgtgtaacagagaaaatgaaatgtattcaaaggtaagctttcagaattccactttacacaattaataaggttttaatattactctgtgttgatgttaaggaattattaaatatgaacagcattttctggttatatatggaaaataccttgatttatgaggtatgaaaatgctcatttttacgtatgcatgttttacttttgtgctttttttataaaacaaggtg

SEQ ID NO: 9741 - DNA, 231 bp, Homo sapiens
ggctcatctcaaattcctggcctcaactgattcgcttgcctcggagtcccaaaatccttggattacaggtgtgagccattgcgcctggcatctttctcagctttctcctaaacaccaacccttcctcgcctatgccttagacccagagaccatgaactccctgagaaactgccatgcaccatgcactgtgctgtgctaggcactgggatgtggggagaagagacacaatct

SEQ ID NO: 9742 - DNA, 380 bp, Homo sapiens
  misc_feature (250)..(251): n is a, c, g, or t
actccactgcatggatgggatgggtaactgaaatcagcacacccttttgaatggtcatcttcttgcaaaagttccctcaaaaatactcatattggctggatgccgtggctcatctctgtaatcccagggctttgggaggctgaggtgggggggatcacttgaggctaagagtttaagaccagcctggggaacatagcgagaccccatctctacaaaaaattgaaaaattagctagctgtagtaggtgtgnncgcctgtagtcccagctactcgggaggctatagcaggaggattttttgaactcaggagtttgaggttatagtgagctgtgatcgcaccactgcactccagcctgggcaccagagcgagaccctgcctct

SEQ ID NO: 9743 - DNA, 984 bp, Homo sapiens
tctgaaaaagaaaatgatcctctgcgaacaccggaggctttgcctgaagaaaagaagattgaatatagattgttaaaggaagagattgccaaccgtgagaaacagcgtttgattaaatcagatcagctgaagacaagttcatcatccccagcaaactctgatgtggaaattgatggtattggcaggatagcaatggttactaagcaggttacagatgcagaatcaaaactgaaaaaacataggattctcttgatgaaagatgaatctgttttaaagaatttagtgcaacaagaagctaagaagaaagaatctgttagaaatgctgaagcaaagattacaaaacttacagaacagcttcaagcaactgaaaaaattcttaatgttaacagaatgtttttgaagaagcttcaggaacaaattcacagagttcaacagcgtgttacaattaagaaagctttgactctaaaatatggagaagagcttgctcgggcaaaggcagtggccagtaaagaaataggaaaacgtaaactggaacaagatcgctttgggccaaacaaaatgatgagactggacagttctccagtatcaagtccaagaaagcattcagcagaactaattgctatggagaaaagacggttacaaaagctagaatatgaatatgccctgaaaattcaaaaattaaaagaagcccgtgcccttaaagcaaaggaacaacaaaatatctctccagttgtggaagaggaacccgaattttctttacctcaaccctcacttcatgatctgacacaagataaattaaccctggacactgaagaaaatgatgttgatgatgaaattttgtctggttcaagcagagagcgaagaagatcttttttagaatccaattattttactaaacctaaccttaagcacactgatactgctaacaaagaatgcataaacaaacttaataaaaatactgtagaaaaaccagaaaaatttcta

SEQ ID NO: 9744 - DNA, 300 bp, Homo sapiens
tcacagagttcaacagcgtgttacaattaagaaagctttgactctaaaatatggagaagagcttgctcgggcaaaggcagtggccagtaaagaaataggaaaacgtaaactggaacaagatcgctttggggtgagggttttatagaaatattttacttttggaaagcagaaagtttttatgatagttttaagggtaagatgtatatataaagtaactctttgctgtaaattccaagagattaagattaaagctttgtttttaaatgacatccacatttttggatgtctactttattattt

SEQ ID NO: 9745 - DNA, 428 bp, Homo sapiens
atattgcttttgacagtatggtcattgatatggtttggatgtttgtcccctttaaatttcattttgaaatgtaatccccagtgtcggaagtggggcctggtgggaagtgtttgggtcatggggacagatacctcgtgagtggcttggtatcctccttgcagtaacaagtgaattctcactttgaattcacaagatatctggttattttttaaagtatggcatccctgcccccttgctccttctctcaccatgtgattcactggctcaccttcacgttctgctgtgattataagcatccttgaggacctcaccataagacgagcagactccagtactatgcttcatatacagcttccagaacctgagccagtaaacctcttttctttataaattacccagtcttgggtatttctttatagtaatgcaaa

SEQ ID NO: 9746 - DNA, 158 bp, Homo sapiens
ttctgtagatttttgtatttttaaaaaaggtcaagatcttcggcagttttctgaattgaattgtttgtgatatttgctctgtttttaaaatcttctaaggccattaccaggttcagtgcttatcttagtacaatttaaattgattccgtgaataattt

SEQ ID NO: 9747 - DNA, 356 bp, Homo sapiens
tgtggtcagatttattaatgccttattatttatataattctctcaaattgacctttacaattttatttcacaacagatgtctgaagaaatgagtttttattatctttagaggtaatgagtgcctcaagcaatagtgattattagactcataaatgcatgcaaactctaaataaaaatgacccataataagcttttattcagtgtttatgtgtatgctgctctttgaaattcctcagtggtaatctgtttggaatatgtatctactgtaatgtcatggaaattcaacagtggtcatattggggcattgcaagacagtacttgagtgggaccttccccagaatcatttgcaaaaaaaa

SEQ ID NO: 9748 - DNA, 116 bp, Homo sapiens
ttggacactttgtagcttttggtggttagtggagggaaaccttttatgatttaaatacttttactccactgattggttaccatcactgcatgtatcagcccttgatgagtttaaga

SEQ ID NO: 9749 - DNA, 467 bp, Homo sapiens
ttccaaacatcaaagctttgcttctccattccctactgcctgaatttccttttactcttcttggttctttcttctcactcttctttcaagacctagaccctggctcatctgctcaaatgaaacctctgactcttcagtgttgtttgttcctgaatttgggctccagattaagtatgcatgtgtcactacctggggaactagccctttctgctttagtttttttgtttgctctttgacttctcaacttgattgggaactctttgaagacaaggaccatccaccacagggcttggtatttcatggggtactgaattaaaataaaagtttaataaatgaaagagaaatttagttcaattaaataaatctgtattcatttattttttcagtcatttcttcacccatttttttcccaagaaatatacctgtacattgaattcctgctttatgccaatcactctattgtgtac

SEQ ID NO: 9750 - DNA, 1278 bp, Homo sapiens
tcaggagaccgaggtgaaaggatcacttgagcccaggagctggaggctgcagtgagctatgatcgcagcactgcactctagcctgggtgaccgaacaagacctcgtctctttaaaaaaaaaaaaagaattctgggattacaacaggagcccaaggctagaataatgtatcaaaggaaacaggagatctccccgaatctggagaccttcaaaagagagcacttatttacttaggatgagtgaagtggaggcatttaacaactaaggagtctattgtgcaaaaaaccttttccttatctgagcacaaaacaacactgtgggctttagtgaatgtggatcattaggacaccttgcactccccagagtgggtctccccctgcatacactgacatagccccagccaaaacaagcagccttttcactcagcagtggtctgagaactacaccgttaatttcatgtaagcttctgcaaccatcagtacccacagctgagctgctgaccaggaaaacagtggctccttcatcacacagatgcagacactcagtgaatcaaatgaatggaaatgactcctgtccacagagtgccttctcagtcccatattcaaagtaattctgggaactgtgggccatatgtgccactggtacccaggctaagcgcccaccagcattacccttccactccattttggggtacctgaagtggcctatttttatttgttctggacaggctcagtgagactctcatggaaacatggaaacatggaaacatggaaaagatccaaaataaatccttgcctatagctatagcgtctagcactggttctcaaagtaaggtccctggacctgcaacgtcagcatccctagggtacttgttagaaatgcatattctcaggccccaccccaaacctactgactcagaaactctgagggtctagcccagcaattgttttaacaagccctccagatggttctgttgctggctaaagtttaagaactactggcttatagcatgggctataaaccagactgggacattgggttgtaaggaccgtttaattgattcaatccaaataggttaactagagaatcatagctgtctgcagggccaaccacactccagcctgggcgatagagcgagcctttgtctctaaaaaacaaaaaataaaatcaattttaaaatgattgcaggaacccaaattcttacaactctgatttcttgtgagaattagaaaaaaaagcttccctttagacagatgaattagaaaaaggtgccccttctg

SEQ ID NO: 9751 - DNA, 1613 bp, Homo sapiens
agaatttaggtgaattactctattgctctggattgagaaaaacattctaattatgactcaaaatccagaaaccactaaaaaaactggtaattcagactacataaaaattttttaaaactcatgacaaagccatcataagcaaaagacagatgacaaattggaaagaaaatatttgcaactcattactgtcaaagggttcatatccctaacaaataaacaacatatcaacgatatagtagaaaaatggataggaacaaaacaatatgggaaacaaaaggaaatacaaatggctcctaaacatattaaaaggtggtcaaccttaggcatagtaaaaatttacatactgagcagtcaggtgtgtggcgtgcacctataagccaggctattcgggaggttaaggctggaggatcacttgagcccacgagtttgaggctacggtgaactatgatcataccactgcactccagcctgggtgataacgtgggaccctgtctcttttttaaggaaaataaaagaatgtacacattgatataaattttcatctaccagaatggccagaatccaacattttaataacatctacattggtaatgttgcaggttagcaagtactatcataaattttagatggtatgtgaattgatgactacccctatgaaggacaatatgccaatatctttcaaaattataaatgcacacagtctttgcccccaaaattcttatctttgggaatttattctacaggtacaatatttatataaatgtgaaatgacatatgtacaaggtctggaaacaacccagctgcccattaatagaggacgggttaattcaacactggcacattcacataacagaataccaagtatctacttcaaaaaatgagaaaactatctagtcatatgtgaagactgccaagaaatactaggtgaaaaaaatgaagtcgtatgtatatgatgtcaatttttgagtaaaaatgagagaaaaaataagactttccatttgtatatgtttgtacctgtctacaacagtgtgaatggaaacctaagaaaccaagagcacaggctattcatggtgggagatgagtgtgcagtggaggaagctgggccaaggacacaggaacacattcactgaataactttttatattgtttgtttcttttaaccatgtgaatgtattacctattcaaaaaattaaataagataagcatattttataagctttatgattcaatacaaatcaaacaatgcttttaattgttcccactttgtagctgaatggaaataggccaacttacaaaatgtcacaaaggttctagaatcagtctttctcgtctcaaattcttgctccacaacctagaatttgtgactatggacaggttacttagccttttttatcctcagtcttcttacttataaaacagagaagtaattgtacctacctactagtgctattgtgaagattaacggtgtattcttttaaagccaaactatgcatgtaaaagcccttaatacaatgccagccaatgcttgccattatgataagaaacaacctcagactacttataaatacattttctcccttctccacaggttacaatcaaattctcatgccata

SEQ ID NO: 9752 - DNA, 392 bp, Homo sapiens
aaagaggaagtattggatttcgaaggagatgaggcttatttgcatgtgatagaataaggcatatttcttattcctatagggaaatctcaaataggagaattgaacacagcacagatatttttgtctttcacctgcagatctaaccagttattctctaaatttgaagtgccgtaagctagtactgtgtcagtctgtttgaccattagagcagaggtcaaggatgctatgtaatcctactaaagtctatttttacagagagactagtaaaagaagccttgagacctttattgtttacacagcctggaagctgtcactgagtccttaaattgaagcatgacattgtgcagtgatgtgctagtggacaaagaagtacagaacagaatcaaggatgt

SEQ ID NO: 9753 - DNA, 499 bp, Homo sapiens
ctaaatacatcttgtctttccttctttaggatagccccttgaagcagaagttttcttgaatttatcatcatttattaattttacaaatgcataaaatttattagtgaaatctgttgactcatcagcccaggtagagaagctggtatttaacagttaattacacaaaacctcttcagcattatgtatgccatcaatacatcattttatcacactgtttgagagtagaaacttttcaatttctcttactgcattttgctcactgtaaattcacatgctggtattattaggttcttgctactgtcgcttttcatttcattgaaatcttttctctttcatgtgtttacacaagtgcaaaataatattcacagcatcttctaaattttaaccatgaatttaaaactgctttaaagctttggaatagctgggtgcagtggctcacatctataatctcagcactttggtaggctgaggtgggaggattgcttgaggccaggagttg

SEQ ID NO: 9754 - DNA, 475 bp, Homo sapiens
gggcgaaggcgaaatggcccagcctgcggattccgagtccggtctgagcctgctgtgtaaaatcaccttcaagtcgaggccctctttggcccctccggcagcctcgagttccttagcagccaaagcttcgctggggggcggcggaggcggcggcctctttgctgcctcaggtgccatctcttacgccgaggtcctgaagcaagggcccctgcctcctggagccgctcgccccttgggagaggtttctcgaggggcacaggaagccgagggaggtgatggagacggcgaagggtgctctggtcctccctcggcgcctgcgtcccaagcccgggccctaccgccgccaccctacaccaccttcccaggctcgaagcccaaattcgactgggttagcgctcccgacggccctgaacgccacttccgcttcaacggggctggcggaggcatcggggcgccgcgacggcgtgcggccgca

SEQ ID NO: 9755 - DNA, 383 bp, Homo sapiens
ccggagggacctgtacggccagtgccctaggactgtgtcggacctggctttgcagaatgcctttggggaccgctggggaccctacttcgccgagtatgattggtgttccacctgctcctcctcttcagagtctgacaacgagggctatttcctaggagaacccatcccccagccagcgcgcctgcgatacgtcacaagcgatgagctgctgcacaaatacagctcctacggcctccccaaatcttccacattaggtggcagaggacagttgcacagcaggaaaagacagaagagcaaaaactgtatcatttcttaatatgattgggatcagggaatgggagaagatgggagctaagaatgtaaagtcagaaacttgcactgtt

SEQ ID NO: 9756 - DNA, 352 bp, Homo sapiens
tcttcaggatatttggtttctatgataaggtgataaacatggatggcttgatcttggagccaccaaactacattgagctttaaattctccattgggtacaatggttacatgcttcttaccctaaaactctggacttacaagtcatagttgtatgtaagtattaaattcactgaatgagatttttctctagacagatatcctttctgaatctgggtttcctggctgggtgcaatggctcactcctgtacttacaacaatttggaaggcccaggcagaaggattgcttgaagccaagagttcgagaccagcctgggcaggaaagtgagacctcatctctaatttaaaaaaaaaa

SEQ ID NO: 9757 - DNA, 368 bp, Homo sapiens
ttttaattctcatcctactgtctccagcatgactgtacctgtgtttccacactagtgccaactataagaagtcaaaatgcactggccatgccagacaatacaaaccactagtgagcaaagcagagatgcaatttgaggggctaatagtatcagtgatacctttcagcttagatgaaagtaaaaagaaggaaagaaaaaggtaacagtgtgattttcttctcctggcgtcctaaaataaacaattaacttcagcaatatcagtataactaaattaaaaggtctttcatttctcgtctgtttttctcctctaaattcatgttggtttctgcttatcaagtaaactttatcacacaagttaggccttgtat

SEQ ID NO: 9758 - DNA, 609 bp, Homo sapiens
taggctgagaccggtgcgccgcgcgctagtggccgctcttccgcgggctagcgggcggtgggggcgccagcagcgcggaaggcggcacgcgggccatggctccctgggcggaggcgagcactcgcgtctgaacccgctgcgccggttgtggctcacgctgaccgccgccttcctgctgactctactgctgcagctcctgccgcccggcctgctcccgggctgcgcgatcttccaggacctgatccgctatgggaaaaccaagtgtggggagccgtcgcgccccgccgcctgccgagcctttgatgtccccaagagatatttttcccacttttatatcatctcagtgctgtggaatggcttcctgctttggtgccttactcaatctctgttcctgggagcaccttttccaagctggcttcatggtttgctcagaattctcggggcggcacagttccagggaggggagctggcactgtctgcattcttagtgctagtatttctgtggctgcacagcttacgaagactcttcgagtgcctctacgtcagtgtcttctccaatgtcatgattcacgtcgtgcagtactgttttggacttgtctattatgtcct

SEQ ID NO: 9759 - DNA, 436 bp, Homo sapiens
ggtcagagagaagtggtcagcagacatgtggcgcttggggctgcctcatttgggaagtcttcaatgggcccctacctcgggcagcagcctacgcaaccctgggaagatccccaaaacgctggtgccccattactgtgagctggtgggagcaaaccccaaggtgcgtcccaacccagcccgcttcctgcagaactgccgggcacctggtggcttcatgagcaaccgctttgtagaaaccaaccctgccatccgggagcagacggtcaagtccatgctgctcctggccccaaagctgaacgaggccaacctcaatgtggagctgatgaagcactttgcacggctacaggccaaggatgaacagggccccatccgctgcaacaccacagtctgcctgggcaaaatcggctcctacctcagtgctagccgtgagtgtcct

SEQ ID NO: 9760 - DNA, 462 bp, Homo sapiens
tcttgtttcattaaactcagaaaacccatcatataataagatagaaaatggaaaatgggttttccataagcccaccccaaatattcagtttttccttgaatttaaggtatacttgttttccatcactaaaagtttttctgaacaatattattctaaaaatactggccaggcgcggtagctcacgcctgtaatcccagcactttgggaggctgaggtaagtggatcacgaggtcaggagtttgagaccagcctggccaatatggtgtaaccccatctctactaaaaatacaaaaattagccgggtacaaaaattagctgggtgtggtggcacacgcctgtagtcccagctacttggaaggctgaggcagaagaatcacttgaacccgagaggcagaagttgcactgagccaagatcgtgccactacactccagcctgggcaacagagcaagactccgtctcaa

SEQ ID NO: 9761 - DNA, 614 bp, Homo sapiens
tgaggctgtgcaggatttgccttggttttattagggaacctgctaatagaagcaatttcaagtgacgggcttccctcagtaaaaagctggaagcaatgacatcttttctatctgagtgactctccttagtcgtggtaaataaataaataaataaataaatagatagatagatagataaataaataaataaataaaaattagtttacatgcagtgtttgaaaagaaaatgattttgcttcccaagtttttatgtgttttcttttttaccaactatatttcactttatttacaattgtcagtttattctcacaccttctggttagttttatcttctcaccatggtctgttagaaccccatcctcgagcaaaaaaacaaaaacaaaaaccacccccccaaaacaaacaaacaaacaaacaaaacaggtgttcatccctgtgagatgctaatgcccctggaactgtttgaaaagagcaaaattttgtaaggagattcttttcaaaaagtgttagagaagtattcttcaaaaacatcttagaatgtttccttaaaaaatttcctttcttggttttcattaattgcctttgattaaaattaggttacaaacatatcttaa

SEQ ID NO: 9762 - DNA, 302 bp, Homo sapiens
gcctgagctagggtttcctgactccaactggggacctgctcccagctcttggggctgctctgctcccagcattgaccagctgttgttctgtttagattctaaaccttcagagcccacagacaggatctcctttagggggattcacttctccatagcagtgagcatggtctttgggtgcagctaattcagaggacacttgagcctttgccagtgagacaggcttgggttgtttgcttgtttgtttgttgagacggagtctcactccaatctgggtgacagagtgagactccatctcaaaaaaa

SEQ ID NO: 9763 - DNA, 2044 bp, Homo sapiens
caggccgggcacctccgagcgcaaggacagcgcgaggtccgcgcagcccagcgcagccatagccccgcgcggactcactctatgatgtccctgtcggtgcggccgcagcgccgtctgctcagcgcccgggtcaataggagccagtccttcgcaggcgtcctcggcagccacgagcgggggcccaggagtttcccggtcttcagcccgccggggcccccacggaagccccccgcgctctcccgagtgtccaggatgttttccgtggctcacccagccgccaaggtgccgcagcccgagcggctggacctggtgtacacggcgctgaagcggggcctgacggcctacttggaagtgcaccagcaggagcaagagaaactccaggggcagataagggagtccaagaggaattcccgcttgggcttcctgtatgatctggacaagcaagtcaagtccattgaacgcttcctgcgacgactggagttccatgccagcaagatcgatgagctgtatgaggcatactgtgtccagcggcgtctccgggatggtgcctacaacatggtccgtgcctacaccactgggtccccgggaagccgagaggcccgggacagcctggcagaggccactcgggggcatcgcgagtacacggagagcatgtgtctgctggagagcgagctggaggcacagctgggcgagtttcatctccgaatgaaagggctggctggcttcgccaggctgtgtgtaggcgatcagtatgagatctgcatgaaatatgggcgtcagcgctggaaactacggggccgaattgagggtagtggaaagcaggtgtgggacagtgaagaaaccatctttctccctctactcacggaatttctgtctattaaggtgacagaactgaagggcctggccaaccatgtggttgtgggcagtgtctcctgtgagaccaaggacctgtttgccgccctgccccaggttgtggctgtggatatcaatgaccttggtaccatcaagctcagcctggaagtcacatggagccccttcgacaaggatgaccagccctcagctgcttcttctgtcaacaaggcctccacagtcaccaagcgcttctccacctatagccagagcccaccggacacaccctcacttcgggaacaggctttctataacatgctgcgacggcaggaggagctggagaatgggacagcatggtccctgtcatctgaatcttcagacgactcatccagcccacagctctcaggcactgcccgccactcaccagcccctaggcccctggtgcagcagcccgagccccttcccatccaagttgccttccgcaggcctgagacccccagctctgggcccttggatgaggagggggccgtggccccagtcctggcaaatgggcatgcaccctacagtcggactctgagccacatcagtgaggctagtgtagatgctgccttggctgaggcttcagtggaggccgttggcccagaaagcctagcctggggacctagcccacctacacacccagctcccacccatggagagcaccccagtcctgttcctcctgccctggaccctggccactctgccacaagctctaccctcggtacaacaggctctgtccccacatctacagaccctgccccatctgcacacctagactcagttcataagtccacagactctggcccttcagaactgccaggccccactcacaccactacaggctctacctatagtgccattaccactacccacagtgctccaagccccctcactcacactactacaggctccacccacaagcccataatctctacccttactactacaggccctaccctcaatatcataggcccagtccagactaccacaagccccacccacactatgccaagccctacccataccacagcaagccccaactaaatactaccgtatggcccaccataattacccccatactccttacactattcctcatcacccaactaaaaatattaaacacaaactaccacctacctccctcaccaaagcccat

SEQ ID NO: 9764 - DNA, 4033 bp, Homo sapiens
cggattcacccgcatgtggagccccgcgcggactcactctatgatgtccctgtcggtgcggccgcagcgccgtctgctcagcgcccgggtcaataggagccagtccttcgcaggcgtcctcggcagccacgagcgggggcccaggagtttcccggtcttcagcccgccggggcccccacggaagccccccgcgctctcccgagtgtccaggatgttttccgtggctcacccagccgccaaggtgccgcagcccgagcggctggacctggtgtacacggcgctgaagcggggcctgacggcctacttggaagtgcaccagcaggagcaagagaaactccaggggcagataagggagtccaagaggaattcccgcttgggcttcctgtatgatctggacaagcaagtcaagtccattgaacgcttcctgcgacgactggagttccatgccagcaagatcgatgagctgtatgaggcatactgtgtccagcggcgtctccgggatggtgcctacaacatggtccgtgcctacaccactgggtccccgggaagccgagaggcccgggacagcctggcagaggccactcgggggcatcgcgagtacacggagagcatgtgtctgctggagagcgagctggaggcacagctgggcgagtttcatctccgaatgaaagggctggctggcttcgccaggctgtgtgtaggcgatcagtatgagatctgcatgaaatatgggcgtcagcgctggaaactacggggccgaattgagggtagtggaaagcaggtgtgggacagtgaagaaaccatctttctccctctactcacggaatttctgtctattaaggtgacagaactgaagggcctggccaaccatgtggttgtgggcagtgtctcctgtgagaccaaggacctgtttgccgccctgccccaggttgtggctgtggatatcaatgaccttggtaccatcaagctcagcctggaagtcacatggagccccttcgacaaggatgaccagccctcagctgcttcttctgtcaacaaggcctccacagtcaccaagcgcttctccacctatagccagagcccaccggacacaccctcacttcgggaacaggctttctataacatgctgcgacggcaggaggagctggagaatgggacagcatggtccctgtcatctgaatcttcagacgactcatccagcccacagctctcaggcactgcccgccactcaccagcccctaggcccctggtgcagcagcccgagccccttcccatccaagttgccttccgcaggcctgagacccccagctctgggcccttggatgaggagggggccgtggccccagtcctggcaaatgggcatgcaccctacagtcggactctgagccacatcagtgaggctagtgtagatgctgccttggctgaggcttcagtggaggccgttggcccagaaagcctagcctggggacctagcccacctacacacccagctcccacccatggagagcaccccagtcctgttcctcctgccctggaccctggccactctgccacaagctctaccctcggtacaacaggctctgtccccacatctacagaccctgccccatctgcacacctagactcagttcataagtccacagactctggcccttcagaactgccaggccccactcacaccactacaggctctacctatagtgccattaccactacccacagtgctccaagccccctcactcacactactacaggctccacccacaagcccataatctctacccttactactacaggccctaccctcaatatcataggcccagtccagactaccacaagccccacccacactatgccaagccctacccataccacagcaagccccactcatacttccacaagccccacccatacccccacaagtcccacccacaaaaccagtatgtcacctcccaccactacaagtcctacccccagtggtatgggcctagtccagactgccacaagtcccacccatcctaccacaagccccacccatcccaccacaagccccatccttataaatgtaagcccttccacttctctagaacttgctaccctctccagcccctccaaacactcagaccccaccctcccaggcactgactcccttccctgtagtcccccagtctccaattcctacactcaggcagaccctatggcccccagaactccccacccaagtcctgcccattccagtaggaaacccctcacaagccctgccccagatccctcagagtctacggttcagagtctaagccccactccctcacccccaacccctgcaccccagcattcagacctttgcctggccatggctgtccagaccccagtcccaacggcagccggagggtctggggacaggagcctggaggaggcactgggggccctaatggctgccctggatgactaccgtggccagtttcctgagctgcagggcctggagcaggaggtgacccgcctagaaagtctgctcatgcagagacaaggtctgactcgcagccgggcctccagtctcagcatcactgtggagcatgccttggagagcttcagcttcctcaatgaagacgaagatgaagacaatgatgttcctggggacaggcctccaagcagcccggaggctggggctgaggacagcatagactcacccagtgcccgccccctcagcacggggtgtccagctctggatgctgccttggtccggcacctgtaccactgcagtcgcctcctgctgaaactgggcacatttgggcccctgcgctgccaggaggcatgggccctggagcggctgctgcgggaagcccgagtactggaggcagtatgcgagttcagcaggcggtgggagatcccggccagctctgcccaggaagtggtgcagttctcggcctctcggcctggcttcctgaccttctgggaccagtgcacagagagactcagctgcttcctctgcccggtggagcgggtgcttctcaccttctgcaaccagtatggtgcccgcctctccctgcgccagccaggcttggctgaggctgtgtgtgtgaagttcctggaggatgccctggggcagaagctgcccagaaggccccagccagggcctggagagcagctcacagtcttccagttctggagttttgtggaaaccttggacagccccaccatggaggcctacgtgactgagaccgctgaggaggtgctactggtgcggaatctgaactcggatgatcaggctgttgtgctgaaggccctgagattggcgcccgaggggcgtctgcgaagggacgggctgcgggccctcagctccctgctcgtccatggcaacaacaaggtcatggctgctgtcagcacccagctccggagcctgtcactgggccctaccttccgggagagggccctcctgtgcttcctggaccagctggaggatgaggacgtgcagactcgagtggctggctgcctggccctaggctgcatcaaggctcccgagggcattgagcccctggtgtacctctgccaaactgacacagaagctgtgagggaagctgcccggcaaagcctacagcagtgtggagaagagggacagtctgcccatcgacggctggaggagtccctggacgccctgccccgcatctttgggcctggcagcatggccagcacagcattctaaactattcacccatgggttcctggtgcccctttccccccactttcagggctcaccaggcactggcagggagggtaagggctggctccagatacccctcccccacagattcctagcaatgaaaatctaatatattcttctgttgcccctggggttggagagtcagtgcctgcagtcaagtgcctcccagcctcggctcagcacatcccttgccacaaatcagtgtctggggcttggccaccctgccgctgcccagccacatcccttggttttgtattttatttacagagttttacagaaaataaaaaagcaaaatgtctttcctacaaaaaaagg

SEQ ID NO: 9765 - DNA, 3949 bp, Homo sapiens
caggccgggcacctccgagcgcaaggacagcgcgaggtccgcgcagcccagcgcagccatgagtttcccggtcttcagcccgccggggcccccacggaagccccccgcgctctcccgagtgtccaggatgttttccgtggctcacccagccgccaaggtgccgcagcccgagcggctggacctggtgtacacggcgctgaagcggggcctgacggcctacttggaagtgcaccagcaggagcaagagaaactccaggggcagataagggagtccaagaggaattcccgcttgggcttcctgtatgatctggacaagcaagtcaagtccattgaacgcttcctgcgacgactggagttccatgccagcaagatcgatgagctgtatgaggcatactgtgtccagcggcgtctccgggatggtgcctacaacatggtccgtgcctacaccactgggtccccgggaagccgagaggcccgggacagcctggcagaggccactcgggggcatcgcgagtacacggagagcatgtgtctgctggagagcgagctggaggcacagctgggcgagtttcatctccgaatgaaagggctggctggcttcgccaggctgtgtgtaggcgatcagtatgagatctgcatgaaatatgggcgtcagcgctggaaactacggggccgaattgagggtagtggaaagcaggtgtgggacagtgaagaaaccatctttctccctctactcacggaatttctgtctattaaggtgacagaactgaagggcctggccaaccatgtggttgtgggcagtgtctcctgtgagaccaaggacctgtttgccgccctgccccaggttgtggctgtggatatcaatgaccttggtaccatcaagctcagcctggaagtcacatggagccccttcgacaaggatgaccagccctcagctgcttcttctgtcaacaaggcctccacagtcaccaagcgcttctccacctatagccagagcccaccggacacaccctcacttcgggaacaggctttctataacatgctgcgacggcaggaggagctggagaatgggacagcatggtccctgtcatctgaatcttcagacgactcatccagcccacagctctcaggcactgcccgccactcaccagcccctaggcccctggtgcagcagcccgagccccttcccatccaagttgccttccgcaggcctgagacccccagctctgggcccttggatgaggagggggccgtggccccagtcctggcaaatgggcatgcaccctacagtcggactctgagccacatcagtgaggctagtgtagatgctgccttggctgaggcttcagtggaggccgttggcccagaaagcctagcctggggacctagcccacctacacacccagctcccacccatggagagcaccccagtcctgttcctcctgccctggaccctggccactctgccacaagctctaccctcggtacaacaggctctgtccccacatctacagaccctgccccatctgcacacctagactcagttcataagtccacagactctggcccttcagaactgccaggccccactcacaccactacaggctctacctatagtgccattaccactacccacagtgctccaagccccctcactcacactactacaggctccacccacaagcccataatctctacccttactactacaggccctaccctcaatatcataggcccagtccagactaccacaagccccacccacactatgccaagccctacccataccacagcaagccccactcatacttccacaagccccacccatacccccacaagtcccacccacaaaaccagtatgtcacctcccaccactacaagtcctacccccagtggtatgggcctagtccagactgccacaagtcccacccatcctaccacaagccccacccatcccaccacaagccccatccttataaatgtaagcccttccacttctctagaacttgctaccctctccagcccctccaaacactcagaccccaccctcccaggcactgactcccttccctgtagtcccccagtctccaattcctacactcaggcagaccctatggcccccagaactccccacccaagtcctgcccattccagtaggaaacccctcacaagccctgccccagatccctcagagtctacggttcagagtctaagccccactccctcacccccaacccctgcaccccagcattcagacctttgcctggccatggctgtccagaccccagtcccaacggcagccggagggtctggggacaggagcctggaggaggcactgggggccctaatggctgccctggatgactaccgtggccagtttcctgagctgcagggcctggagcaggaggtgacccgcctagaaagtctgctcatgcagagacaaggtctgactcgcagccgggcctccagtctcagcatcactgtggagcatgccttggagagcttcagcttcctcaatgaagacgaagatgaagacaatgatgttcctggggacaggcctccaagcagcccggaggctggggctgaggacagcatagactcacccagtgcccgccccctcagcacggggtgtccagctctggatgctgccttggtccggcacctgtaccactgcagtcgcctcctgctgaaactgggcacatttgggcccctgcgctgccaggaggcatgggccctggagcggctgctgcgggaagcccgagtactggaggcagtatgcgagttcagcaggcggtgggagatcccggccagctctgcccaggaagtggtgcagttctcggcctctcggcctggcttcctgaccttctgggaccagtgcacagagagactcagctgcttcctctgcccggtggagcgggtgcttctcaccttctgcaaccagtatggtgcccgcctctccctgcgccagccaggcttggctgaggctgtgtgtgtgaagttcctggaggatgccctggggcagaagctgcccagaaggccccagccagggcctggagagcagctcacagtcttccagttctggagttttgtggaaaccttggacagccccaccatggaggcctacgtgactgagaccgctgaggaggtgctactggtgcggaatctgaactcggatgatcaggctgttgtgctgaaggccctgagattggcgcccgaggggcgtctgcgaagggacgggctgcgggccctcagctccctgctcgtccatggcaacaacaaggtcatggctgctgtcagcacccagctccggagcctgtcactgggccctaccttccgggagagggccctcctgtgcttcctggaccagctggaggatgaggacgtgcagactcgagtggctggctgcctggccctaggctgcatcaaggctcccgagggcattgagcccctggtgtacctctgccaaactgacacagaagctgtgagggaagctgcccggcaaagcctacagcagtgtggagaagagggacagtctgcccatcgacggctggaggagtccctggacgccctgccccgcatctttgggcctggcagcatggccagcacagcattctaaactattcacccatgggttcctggtgcccctttccccccactttcagggctcaccaggcactggcagggagggtaagggctggctccagatacccctcccccacagattcctagcaatgaaaatctaatatattcttctgttgcccctggggttggagagtcagtgcctgcagtcaagtgcctcccagcctcggctcagcacatcccttgccacaaatcagtgtctggggcttggccaccctgccgctgcccagccacatcccttggttttgtattttatttacagagttttacagaaaataaaaaagcaaaatgtctttcctacaaaaaaagg

SEQ ID NO: 9766 - DNA, 3796 bp, Homo sapiens
caggccgggcacctccgagcgcaaggacagcgcgaggtccgcgcagcccagcgcagccatggcctacttggaagtgcaccagcaggagcaagagaaactccaggggcagataagggagtccaagaggaattcccgcttgggcttcctgtatgatctggacaagcaagtcaagtccattgaacgcttcctgcgacgactggagttccatgccagcaagatcgatgagctgtatgaggcatactgtgtccagcggcgtctccgggatggtgcctacaacatggtccgtgcctacaccactgggtccccgggaagccgagaggcccgggacagcctggcagaggccactcgggggcatcgcgagtacacggagagcatgtgtctgctggagagcgagctggaggcacagctgggcgagtttcatctccgaatgaaagggctggctggcttcgccaggctgtgtgtaggcgatcagtatgagatctgcatgaaatatgggcgtcagcgctggaaactacggggccgaattgagggtagtggaaagcaggtgtgggacagtgaagaaaccatctttctccctctactcacggaatttctgtctattaaggtgacagaactgaagggcctggccaaccatgtggttgtgggcagtgtctcctgtgagaccaaggacctgtttgccgccctgccccaggttgtggctgtggatatcaatgaccttggtaccatcaagctcagcctggaagtcacatggagccccttcgacaaggatgaccagccctcagctgcttcttctgtcaacaaggcctccacagtcaccaagcgcttctccacctatagccagagcccaccggacacaccctcacttcgggaacaggctttctataacatgctgcgacggcaggaggagctggagaatgggacagcatggtccctgtcatctgaatcttcagacgactcatccagcccacagctctcaggcactgcccgccactcaccagcccctaggcccctggtgcagcagcccgagccccttcccatccaagttgccttccgcaggcctgagacccccagctctgggcccttggatgaggagggggccgtggccccagtcctggcaaatgggcatgcaccctacagtcggactctgagccacatcagtgaggctagtgtagatgctgccttggctgaggcttcagtggaggccgttggcccagaaagcctagcctggggacctagcccacctacacacccagctcccacccatggagagcaccccagtcctgttcctcctgccctggaccctggccactctgccacaagctctaccctcggtacaacaggctctgtccccacatctacagaccctgccccatctgcacacctagactcagttcataagtccacagactctggcccttcagaactgccaggccccactcacaccactacaggctctacctatagtgccattaccactacccacagtgctccaagccccctcactcacactactacaggctccacccacaagcccataatctctacccttactactacaggccctaccctcaatatcataggcccagtccagactaccacaagccccacccacactatgccaagccctacccataccacagcaagccccactcatacttccacaagccccacccatacccccacaagtcccacccacaaaaccagtatgtcacctcccaccactacaagtcctacccccagtggtatgggcctagtccagactgccacaagtcccacccatcctaccacaagccccacccatcccaccacaagccccatccttataaatgtaagcccttccacttctctagaacttgctaccctctccagcccctccaaacactcagaccccaccctcccaggcactgactcccttccctgtagtcccccagtctccaattcctacactcaggcagaccctatggcccccagaactccccacccaagtcctgcccattccagtaggaaacccctcacaagccctgccccagatccctcagagtctacggttcagagtctaagccccactccctcacccccaacccctgcaccccagcattcagacctttgcctggccatggctgtccagaccccagtcccaacggcagccggagggtctggggacaggagcctggaggaggcactgggggccctaatggctgccctggatgactaccgtggccagtttcctgagctgcagggcctggagcaggaggtgacccgcctagaaagtctgctcatgcagagacaaggtctgactcgcagccgggcctccagtctcagcatcactgtggagcatgccttggagagcttcagcttcctcaatgaagacgaagatgaagacaatgatgttcctggggacaggcctccaagcagcccggaggctggggctgaggacagcatagactcacccagtgcccgccccctcagcacggggtgtccagctctggatgctgccttggtccggcacctgtaccactgcagtcgcctcctgctgaaactgggcacatttgggcccctgcgctgccaggaggcatgggccctggagcggctgctgcgggaagcccgagtactggaggcagtatgcgagttcagcaggcggtgggagatcccggccagctctgcccaggaagtggtgcagttctcggcctctcggcctggcttcctgaccttctgggaccagtgcacagagagactcagctgcttcctctgcccggtggagcgggtgcttctcaccttctgcaaccagtatggtgcccgcctctccctgcgccagccaggcttggctgaggctgtgtgtgtgaagttcctggaggatgccctggggcagaagctgcccagaaggccccagccagggcctggagagcagctcacagtcttccagttctggagttttgtggaaaccttggacagccccaccatggaggcctacgtgactgagaccgctgaggaggtgctactggtgcggaatctgaactcggatgatcaggctgttgtgctgaaggccctgagattggcgcccgaggggcgtctgcgaagggacgggctgcgggccctcagctccctgctcgtccatggcaacaacaaggtcatggctgctgtcagcacccagctccggagcctgtcactgggccctaccttccgggagagggccctcctgtgcttcctggaccagctggaggatgaggacgtgcagactcgagtggctggctgcctggccctaggctgcatcaaggctcccgagggcattgagcccctggtgtacctctgccaaactgacacagaagctgtgagggaagctgcccggcaaagcctacagcagtgtggagaagagggacagtctgcccatcgacggctggaggagtccctggacgccctgccccgcatctttgggcctggcagcatggccagcacagcattctaaactattcacccatgggttcctggtgcccctttccccccactttcagggctcaccaggcactggcagggagggtaagggctggctccagatacccctcccccacagattcctagcaatgaaaatctaatatattcttctgttgcccctggggttggagagtcagtgcctgcagtcaagtgcctcccagcctcggctcagcacatcccttgccacaaatcagtgtctggggcttggccaccctgccgctgcccagccacatcccttggttttgtattttatttacagagttttacagaaaataaaaaagcaaaatgtctttcctacaaaaaaagg

SEQ ID NO: 9767 - DNA, 3529 bp, Homo sapiens
cggattcacccgcatgtggagccccgcgcggactcactctatgatgtccctgtcggtgcggccgcagcgccgtctgctcagcgcccgggtcaataggagccagtccttcgcaggcgtcctcggcagccacgagcgggggcccaggagtttcccggtcttcagcccgccggggcccccacggaagccccccgcgctctcccgagtgtccaggatgttttccgtggctcacccagccgccaaggtgccgcagcccgagcggctggacctggtgtacacggcgctgaagcggggcctgacggcctacttggaagtgcaccagcaggagcaagagaaactccaggggcagataagggagtccaagaggaattcccgcttgggcttcctgtatgatctggacaagcaagtcaagtccattgaacgcttcctgcgacgactggagttccatgccagcaagatcgatgagctgtatgaggcatactgtgtccagcggcgtctccgggatggtgcctacaacatggtccgtgcctacaccactgggtccccgggaagccgagaggcccgggacagcctggcagaggccactcgggggcatcgcgagtacacggagagcatgtgtctgctggagagcgagctggaggcacagctgggcgagtttcatctccgaatgaaagggctggctggcttcgccaggctgtgtgtaggcgatcagtatgagatctgcatgaaatatgggcgtcagcgctggaaactacggggccgaattgagggtagtggaaagcaggtgtgggacagtgaagaaaccatctttctccctctactcacggaatttctgtctattaaggtgacagaactgaagggcctggccaaccatgtggttgtgggcagtgtctcctgtgagaccaaggacctgtttgccgccctgccccaggttgtggctgtggatatcaatgaccttggtaccatcaagctcagcctggaagtcacatggagccccttcgacaaggatgaccagccctcagctgcttcttctgtcaacaaggcctccacagtcaccaagcgcttctccacctatagccagagcccaccggacacaccctcacttcgggaacaggctttctataacatgctgcgacggcaggaggagctggagaatgggacagcatggtccctgtcatctgaatcttcagacgactcatccagcccacagctctcaggcactgcccgccactcaccagcccctaggcccctggtgcagcagcccgagccccttcccatccaagttgccttccgcaggcctgagacccccagctctgggcccttggatgaggagggggccgtggccccagtcctggcaaatgggcatgcaccctacagtcggactctgagccacatcagtgaggctagtgtagatgctgccttggctgaggcttcagtggaggccgttggcccagaaagcctagcctggggacctagcccacctacacacccagctcccacccatggagagcaccccagtcctgttcctcctgccctggaccctggccactctgccacaagctctaccctcggtacaacaggctctgtccccacatccctcagagtctacggttcagagtctaagcccaccctcccaggcactgactcccttccctgtagtcccccagtctccaattcctacactcaggcagaccctatggcccccagaactccccacccaagtcctgcccattccagtaggaaacccctcacaagccctgccccagatccctcagagtctacggttcagagtctaagccccactccctcacccccaacccctgcaccccagcattcagacctttgcctggccatggctgtccagaccccagtcccaacggcagccggagggtctggggacaggagcctggaggaggcactgggggccctaatggctgccctggatgactaccgtggccagtttcctgagctgcagggcctggagcaggaggtgacccgcctagaaagtctgctcatgcagagacaaggtctgactcgcagccgggcctccagtctcagcatcactgtggagcatgccttggagagcttcagcttcctcaatgaagacgaagatgaagacaatgatgttcctggggacaggcctccaagcagcccggaggctggggctgaggacagcatagactcacccagtgcccgccccctcagcacggggtgtccagctctggatgctgccttggtccggcacctgtaccactgcagtcgcctcctgctgaaactgggcacatttgggcccctgcgctgccaggaggcatgggccctggagcggctgctgcgggaagcccgagtactggaggcagtatgcgagttcagcaggcggtgggagatcccggccagctctgcccaggaagtggtgcagttctcggcctctcggcctggcttcctgaccttctgggaccagtgcacagagagactcagctgcttcctctgcccggtggagcgggtgcttctcaccttctgcaaccagtatggtgcccgcctctccctgcgccagccaggcttggctgaggctgtgtgtgtgaagttcctggaggatgccctggggcagaagctgcccagaaggccccagccagggcctggagagcagctcacagtcttccagttctggagttttgtggaaaccttggacagccccaccatggaggcctacgtgactgagaccgctgaggaggtgctactggtgcggaatctgaactcggatgatcaggctgttgtgctgaaggccctgagattggcgcccgaggggcgtctgcgaagggacgggctgcgggccctcagctccctgctcgtccatggcaacaacaaggtcatggctgctgtcagcacccagctccggagcctgtcactgggccctaccttccgggagagggccctcctgtgcttcctggaccagctggaggatgaggacgtgcagactcgagtggctggctgcctggccctaggctgcatcaaggctcccgagggcattgagcccctggtgtacctctgccaaactgacacagaagctgtgagggaagctgcccggcaaagcctacagcagtgtggagaagagggacagtctgcccatcgacggctggaggagtccctggacgccctgccccgcatctttgggcctggcagcatggccagcacagcattctaaactattcacccatgggttcctggtgcccctttccccccactttcagggctcaccaggcactggcagggagggtaagggctggctccagatacccctcccccacagattcctagcaatgaaaatctaatatattcttctgttgcccctggggttggagagtcagtgcctgcagtcaagtgcctcccagcctcggctcagcacatcccttgccacaaatcagtgtctggggcttggccaccctgccgctgcccagccacatcccttggttttgtattttatttacagagttttacagaaaataaaaaagcaaaatgtctttcctacaaaaaaagg

SEQ ID NO: 9768 - DNA, 4060 bp, Homo sapiens
cggattcacccgcatgtggagccccgcgcggactcactctatgatgtccctgtcggtgcggccgcagcgccgtctgctcagcgcccgggtcaataggagccagtccttcgcaggcgtcctcggcagccacgagcgggggcccaggagtttcccggtcttcagcccgccggggcccccacggaagccccccgcgctctcccgagtgtccaggatgttttccgtggctcacccagccgccaaggtgccgcagcccgagcggctggacctggtgtacacggcgctgaagcggggcctgacggcctacttggaagtgcaccagcaggagcaagagaaactccaggggcagataagggagtccaagaggaattcccgcttgggcttcctgtatgatctggacaagcaagtcaagtccattgaacgcttcctgcgacgactggagttccatgccagcaagatcgatgagctgtatgaggcatactgtgtccagcggcgtctccgggatggtgcctacaacatggtccgtgcctacaccactgggtccccgggaagccgagaggcccgggacagcctggcagaggccactcgggggcatcgcgagtacacggagagcatgtgtctgctggagagcgagctggaggcacagctgggcgagtttcatctccgaatgaaagggctggctggcttcgccaggctgtgtgtaggcgatcagtatgaggctgcctcatcctacctgttcccccagatctgcatgaaatatgggcgtcagcgctggaaactacggggccgaattgagggtagtggaaagcaggtgtgggacagtgaagaaaccatctttctccctctactcacggaatttctgtctattaaggtgacagaactgaagggcctggccaaccatgtggttgtgggcagtgtctcctgtgagaccaaggacctgtttgccgccctgccccaggttgtggctgtggatatcaatgaccttggtaccatcaagctcagcctggaagtcacatggagccccttcgacaaggatgaccagccctcagctgcttcttctgtcaacaaggcctccacagtcaccaagcgcttctccacctatagccagagcccaccggacacaccctcacttcgggaacaggctttctataacatgctgcgacggcaggaggagctggagaatgggacagcatggtccctgtcatctgaatcttcagacgactcatccagcccacagctctcaggcactgcccgccactcaccagcccctaggcccctggtgcagcagcccgagccccttcccatccaagttgccttccgcaggcctgagacccccagctctgggcccttggatgaggagggggccgtggccccagtcctggcaaatgggcatgcaccctacagtcggactctgagccacatcagtgaggctagtgtagatgctgccttggctgaggcttcagtggaggccgttggcccagaaagcctagcctggggacctagcccacctacacacccagctcccacccatggagagcaccccagtcctgttcctcctgccctggaccctggccactctgccacaagctctaccctcggtacaacaggctctgtccccacatctacagaccctgccccatctgcacacctagactcagttcataagtccacagactctggcccttcagaactgccaggccccactcacaccactacaggctctacctatagtgccattaccactacccacagtgctccaagccccctcactcacactactacaggctccacccacaagcccataatctctacccttactactacaggccctaccctcaatatcataggcccagtccagactaccacaagccccacccacactatgccaagccctacccataccacagcaagccccactcatacttccacaagccccacccatacccccacaagtcccacccacaaaaccagtatgtcacctcccaccactacaagtcctacccccagtggtatgggcctagtccagactgccacaagtcccacccatcctaccacaagccccacccatcccaccacaagccccatccttataaatgtaagcccttccacttctctagaacttgctaccctctccagcccctccaaacactcagaccccaccctcccaggcactgactcccttccctgtagtcccccagtctccaattcctacactcaggcagaccctatggcccccagaactccccacccaagtcctgcccattccagtaggaaacccctcacaagccctgccccagatccctcagagtctacggttcagagtctaagccccactccctcacccccaacccctgcaccccagcattcagacctttgcctggccatggctgtccagaccccagtcccaacggcagccggagggtctggggacaggagcctggaggaggcactgggggccctaatggctgccctggatgactaccgtggccagtttcctgagctgcagggcctggagcaggaggtgacccgcctagaaagtctgctcatgcagagacaaggtctgactcgcagccgggcctccagtctcagcatcactgtggagcatgccttggagagcttcagcttcctcaatgaagacgaagatgaagacaatgatgttcctggggacaggcctccaagcagcccggaggctggggctgaggacagcatagactcacccagtgcccgccccctcagcacggggtgtccagctctggatgctgccttggtccggcacctgtaccactgcagtcgcctcctgctgaaactgggcacatttgggcccctgcgctgccaggaggcatgggccctggagcggctgctgcgggaagcccgagtactggaggcagtatgcgagttcagcaggcggtgggagatcccggccagctctgcccaggaagtggtgcagttctcggcctctcggcctggcttcctgaccttctgggaccagtgcacagagagactcagctgcttcctctgcccggtggagcgggtgcttctcaccttctgcaaccagtatggtgcccgcctctccctgcgccagccaggcttggctgaggctgtgtgtgtgaagttcctggaggatgccctggggcagaagctgcccagaaggccccagccagggcctggagagcagctcacagtcttccagttctggagttttgtggaaaccttggacagccccaccatggaggcctacgtgactgagaccgctgaggaggtgctactggtgcggaatctgaactcggatgatcaggctgttgtgctgaaggccctgagattggcgcccgaggggcgtctgcgaagggacgggctgcgggccctcagctccctgctcgtccatggcaacaacaaggtcatggctgctgtcagcacccagctccggagcctgtcactgggccctaccttccgggagagggccctcctgtgcttcctggaccagctggaggatgaggacgtgcagactcgagtggctggctgcctggccctaggctgcatcaaggctcccgagggcattgagcccctggtgtacctctgccaaactgacacagaagctgtgagggaagctgcccggcaaagcctacagcagtgtggagaagagggacagtctgcccatcgacggctggaggagtccctggacgccctgccccgcatctttgggcctggcagcatggccagcacagcattctaaactattcacccatgggttcctggtgcccctttccccccactttcagggctcaccaggcactggcagggagggtaagggctggctccagatacccctcccccacagattcctagcaatgaaaatctaatatattcttctgttgcccctggggttggagagtcagtgcctgcagtcaagtgcctcccagcctcggctcagcacatcccttgccacaaatcagtgtctggggcttggccaccctgccgctgcccagccacatcccttggttttgtattttatttacagagttttacagaaaataaaaaagcaaaatgtctttcctacaaaaaaagg

SEQ ID NO: 9769 - DNA, 4162 bp, Homo sapiens
cggattcacccgcatgtggagccccgcgcggactcactctatgatgtccctgtcggtgcggccgcagcgccgtctgctcagcgcccgggtcaataggagccagtccttcgcaggcgtcctcggcagccacgagcgggggcccaggagtttcccggtcttcagcccgccggggcccccacggaagccccccgcgctctcccgagtgtccaggatgttttccgtggctcacccagccgccaaggtgccgcagcccgagcggctggacctggtgtacacggcgctgaagcggggcctgacggcctacttggaagtgcaccagcaggagcaagagaaactccaggggcagataagggagtccaagaggaattcccgcttgggcttcctgtatgatctggacaagcaagtcaagtccattgaacgcttcctgcgacgactggagttccatgccagcaagatcgatgagctgtatgaggcatactgtgtccagcggcgtctccgggatggtgcctacaacatggtccgtgcctacaccactgggtccccgggaagccgagaggcccgggacagcctggcagaggccactcgggggcatcgcgagtacacggagagcatgtgtctgctggagagcgagctggaggcacagctgggcgagtttcatctccgaatgaaagggctggctggcttcgccaggctgtgtgtaggcgatcagtatgagatctgcatgaaatatgggcgtcagcgctggaaactacggggccgaattgagggtagtggaaagcaggtgtgggacagtgaagaaaccatctttctccctctactcacggaatttctgtctattaaggtgacagaactgaagggcctggccaaccatgtggttgtgggcagtgtctcctgtgagaccaaggacctgtttgccgccctgccccaggttgtggctgtggatatcaatgaccttggtaccatcaagctcagcctggaagtcacatggagccccttcgacaaggatgaccagccctcagctgcttcttctgtcaacaaggcctccacagtcaccaagcgcttctccacctatagccagagcccaccggacacaccctcacttcgggaacaggctttctataacatgctgcgacggcaggaggagctggagaatgggacagcatggtccctgtcatctgaatcttcagacgactcatccagcccacagctctcaggcactgcccgccactcaccagcccctaggcccctggtgcagcagcccgagccccttcccatccaagttgccttccgcaggcctgagacccccagctctgggcccttggatgaggagggggccgtggccccagtcctggcaaatgggcatgcaccctacagtcggactctgagccacatcagtgaggctagtgtagatgctgccttggctgaggcttcagtggaggccgttggcccagaaagcctagcctggggacctagcccacctacacacccagctcccacccatggagagcaccccagtcctgttcctcctgccctggaccctggccactctgccacaagctctaccctcggtacaacaggctctgtccccacatctacagaccctgccccatctgcacacctagactcagttcataagtccacagactctggcccttcagaactgccaggccccactcacaccactacaggctctacctatagtgccattaccactacccacagtgctccaagccccctcactcacactactacaggctccacccacaagcccataatctctacccttactactacaggccctaccctcaatatcataggcccagtccagactaccacaagccccacccacactatgccaagccctacccataccacagcaagccccactcatacttccacaagccccacccatacccccacaagtcccacccacaaaaccagtatgtcacctcccaccactacaagtcctacccccagtggtatgggcctagtccagactgccacaagtcccacccatcctaccacaagccccacccatcccaccacaagccccatccttataaatgtaagcccttccacttctctagaacttgctaccctctccagcccctccaaacactcagaccccaccctcccaggcactgactcccttccctgtagtcccccagtctccaattcctacactcaggcagaccctatggcccccagaactccccacccaagtcctgcccattccagtaggaaacccctcacaagccctgccccagatccctcagagtctacggttcagagtctaagccccactccctcacccccaacccctgcaccccagcattcagacctttgcctggccatggctgtccagaccccagtcccaacggcagccggagggtctggggacaggagcctggaggaggcactgggggccctaatggctgccctggatgactaccgtggccagtttcctgagctgcagggcctggagcaggaggtgacccgcctagaaagtctgctcatgcagagacaaggtctgactcgcagccgggcctccagtctcagcatcactgtggagcatgccttggagagcttcagcttcctcaatgaagacgaagatgaagacaatgatgttcctggggacaggcctccaagcagcccggaggctggggctgaggacagcatagactcacccagtgcccgccccctcagcacggggtgtccagctctggatgctgccttggtccggcacctgtaccactgcagtcgcctcctgctgaaactgggcacatttgggcccctgcgctgccaggaggcatgggccctggagcggctgctgcgggaagcccgagtactggaggcagtatgcgagttcagcaggcggtgggagatcccggccagctctgcccaggaagtggtgcagttctcggcctctcggcctggcttcctgaccttctgggaccagtgcacagagagactcagctgcttcctctgcccggtggagcgggtgcttctcaccttctgcaaccagtatggtgcccgcctctccctgcgccagccaggcttggctgaggctgtgtgtgtgaagttcctggaggatgccctggggcagaagctgcccagaaggccccagccagggcctggagagcagctcacagtcttccagttctggagttttgtggaaaccttggacagccccaccatggaggcctacgtgactgagaccgctgaggagggtgaggcggtggccctgatcacatagtggcctcttggggtctgaggacatgaggacaagccctccccaacctcgggggctcctcaccctgccaccttgcccacccacccaccatatccccttttttcagtgctactggtgcggaatctgaactcggatgatcaggctgttgtgctgaaggccctgagattggcgcccgaggggcgtctgcgaagggacgggctgcgggccctcagctccctgctcgtccatggcaacaacaaggtcatggctgctgtcagcacccagctccggagcctgtcactgggccctaccttccgggagagggccctcctgtgcttcctggaccagctggaggatgaggacgtgcagactcgagtggctggctgcctggccctaggctgcatcaaggctcccgagggcattgagcccctggtgtacctctgccaaactgacacagaagctgtgagggaagctgcccggcaaagcctacagcagtgtggagaagagggacagtctgcccatcgacggctggaggagtccctggacgccctgccccgcatctttgggcctggcagcatggccagcacagcattctaaactattcacccatgggttcctggtgcccctttccccccactttcagggctcaccaggcactggcagggagggtaagggctggctccagatacccctcccccacagattcctagcaatgaaaatctaatatattcttctgttgcccctggggttggagagtcagtgcctgcagtcaagtgcctcccagcctcggctcagcacatcccttgccacaaatcagtgtctggggcttggccaccctgccgctgcccagccacatcccttggttttgtattttatttacagagttttacagaaaataaaaaagcaaaatgtctttcctacaaaaaaagg

SEQ ID NO: 9770 - DNA, 1871 bp, Homo sapiens
cggattcacccgcatgtggagccccgcgcggactcactctatgatgtccctgtcggtgcggccgcagcgccgtctgctcagcgcccgggtcaataggagccagtccttcgcaggcgtcctcggcagccacgagcgggggcccaggagtttcccggtcttcagcccgccggggcccccacggaagccccccgcgctctcccgagtgtccaggatgttttccgtggctcacccagccgccaaggtgccgcagcccgagcggctggacctggtgtacacggcgctgaagcggggcctgacggcctacttggaagtgcaccagcaggagcaagagaaactccaggggcagataagggagtccaagaggaattcccgcttgggcttcctgtatgatctggacaagcaagtcaagtccattgaacgcttcctgcgacgactggagttccatgccagcaagatcgatgagctgtatgaggcatactgtgtccagcggcgtctccgggatggtgcctacaacatggtccgtgcctacaccactgggtccccgggaagccgagaggcccgggacagcctggcagaggccactcgggggcatcgcgagtacacggagagcatgtgtctgctggagagcgagctggaggcacagctgggcgagtttcatctccgaatgaaagggctggctggcttcgccaggctgtgtgtaggcgatcagtatgagatctgcatgaaatatgggcgtcagcgctggaaactacggggccgaattgagggtagtggaaagcaggtgtgggacagtgaagaaaccatctttctccctctactcacggaatttctgtctattaaggtgacagaactgaagggcctggccaaccatgtggttgtgggcagtgtctcctgtgagaccaaggacctgtttgccgccctgccccaggttgtggctgtggatatcaatgaccttggtaccatcaagctcagcctggaagtcacatggagccccttcgacaaggatgaccagccctcagctgcttcttctgtcaacaaggcctccacagtcaccaagcgcttctccacctatagccagagcccaccggacacaccctcacttcgggaacaggctttctataacatgctgcgacggcaggaggagctggagaatgggacagcatggtccctgtcatctgaatcttcagacgactcatccagcccacagctctcaggcactgcccgccactcaccagcccctaggcccctggtgcagcagcccgagccccttcccatccaagttgccttccgcaggcctgagacccccagctctgggcccttggatgaggagggggccgtggccccagtcctggcaaatgggcatgcaccctacagtcggactctgagccacatcagtgaggctagtgtagatgctgccttggctgaggcttcagtggaggccgttggcccagaaagcctagcctggggacctagcccacctacacacccagctcccacccatggagagcaccccagtcctgttcctcctgccctggaccctggccactctgccacaagctctaccctcggtacaacaggctctgtccccacatctacagaccctgccccatctgcacacctagactcagttcataagtccacagattcctagcaatgaaaatctaatatattcttctgttgcccctggggttggagagtcagtgcctgcagtcaagtgcctcccagcctcggctcagcacatcccttgccacaaatcagtgtctggggcttggccaccctgccgctgcccagccacatcccttggttttgtattttatttacagagttttacagaaaataaaaaagcaaaatgtctttcctacaaaaaaagg

SEQ ID NO: 9771 - DNA, 449 bp, Homo sapiens
ccacccttgacctcatcctcactcattacaggagaagagggacagtctgcccatcgacggctggaggagtccctggacgccctgccccgcatctttgggcctggcagcatggccagcacagcattctaaactattcacccatgggttcctggtgcccctttccccccactttcagggctcaccaggcactggcagggagggtaagggctggctccagatacccctcccccacagattcctagcaatgaaaatctaatatattcttctgttgcccctggggttggagagtcagtgcctgcagtcaagtgcctcccagcctcggctcagcacatcccttgccacaaatcagtgtctggggcttggccaccctgccgctgcccagccacatcccttggttttgtattttatttacagagttttacagaaaataaaaaagcaaaatgtctttc

SEQ ID NO: 9772 - DNA, 458 bp, Homo sapiens
gcggccgcgcagggttggtggggtcaaagggcgtcagatggggctgggtctgggggtgcgtagtgagagtctgggggactcctgctctcctctttctgaggacagcctctccttcaggagtttcccggtcttcagcccgccggggcccccacggaagccccccgcgctctcccgagtgtccaggatgttttccgtggctcacccagccgccaaggtgccgcagcccgagcggctggacctggtgtacacggcgctgaagcggggcctgacctgacgtgagcagctcctctgttcccagccctgtcccgggatccctccccaagcccgcatcctgctagcaggaacctttccaggggcagataagggagtccaagaggaattcccgcttggtgagtggcgggaggtacggatgccctttgcctctttggtgtggagggctgggcaagggcagccctggg

SEQ ID NO: 9773 - DNA, 4176 bp, Homo sapiens
gcggccgcgcagggttggtggggtcaaagggcgtcagatggggctgggtctgggggtgcgtagtgagagtctgggggactcctgctctcctctttctgaggacagcctctccttcaggagtttcccggtcttcagcccgccggggcccccacggaagccccccgcgctctcccgagtgtccaggatgttttccgtggctcacccagccgccaaggtgccgcagcccgagcggctggacctggtgtacacggcgctgaagcggggcctgacctgacgtgagcagctcctctgttcccagccctgtcccgggatccctccccaagcccgcatcctgctagcaggaaccttctccagccccatgccctctccctgctgtctgcaccctgggcagcatgaggctggagagccgagttcattcttgtggtcgcccctttcctcagggcctacttggaagtgcaccagcaggagcaagagaaactccaggggcagataagggagtccaagaggaattcccgcttgggcttcctgtatgatctggacaagcaagtcaagtccattgaacgcttcctgcgacgactggagttccatgccagcaagatcgatgagctgtatgaggcatactgtgtccagcggcgtctccgggatggtgcctacaacatggtccgtgcctacaccactgggtccccgggaagccgagaggcccgggacagcctggcagaggccactcgggggcatcgcgagtacacggagagcatgtgtctgctggagagcgagctggaggcacagctgggcgagtttcatctccgaatgaaagggctggctggcttcgccaggctgtgtgtaggcgatcagtatgagatctgcatgaaatatgggcgtcagcgctggaaactacggggccgaattgagggtagtggaaagcaggtgtgggacagtgaagaaaccatctttctccctctactcacggaatttctgtctattaaggtgacagaactgaagggcctggccaaccatgtggttgtgggcagtgtctcctgtgagaccaaggacctgtttgccgccctgccccaggttgtggctgtggatatcaatgaccttggtaccatcaagctcagcctggaagtcacatggagccccttcgacaaggatgaccagccctcagctgcttcttctgtcaacaaggcctccacagtcaccaagcgcttctccacctatagccagagcccaccggacacaccctcacttcgggaacaggctttctataacatgctgcgacggcaggaggagctggagaatgggacagcatggtccctgtcatctgaatcttcagacgactcatccagcccacagctctcaggcactgcccgccactcaccagcccctaggcccctggtgcagcagcccgagccccttcccatccaagttgccttccgcaggcctgagacccccagctctgggcccttggatgaggagggggccgtggccccagtcctggcaaatgggcatgcaccctacagtcggactctgagccacatcagtgaggctagtgtagatgctgccttggctgaggcttcagtggaggccgttggcccagaaagcctagcctggggacctagcccacctacacacccagctcccacccatggagagcaccccagtcctgttcctcctgccctggaccctggccactctgccacaagctctaccctcggtacaacaggctctgtccccacatctacagaccctgccccatctgcacacctagactcagttcataagtccacagactctggcccttcagaactgccaggccccactcacaccactacaggctctacctatagtgccattaccactacccacagtgctccaagccccctcactcacactactacaggctccacccacaagcccataatctctacccttactactacaggccctaccctcaatatcataggcccagtccagactaccacaagccccacccacactatgccaagccctacccataccacagcaagccccactcatacttccacaagccccacccatacccccacaagtcccacccacaaaaccagtatgtcacctcccaccactacaagtcctacccccagtggtatgggcctagtccagactgccacaagtcccacccatcctaccacaagccccacccatcccaccacaagccccatccttataaatgtaagcccttccacttctctagaacttgctaccctctccagcccctccaaacactcagaccccaccctcccaggcactgactcccttccctgtagtcccccagtctccaattcctacactcaggcagaccctatggcccccagaactccccacccaagtcctgcccattccagtaggaaacccctcacaagccctgccccagatccctcagagtctacggttcagagtctaagccccactccctcacccccaacccctgcaccccagcattcagacctttgcctggccatggctgtccagaccccagtcccaacggcagccggagggtctggggacaggagcctggaggaggcactgggggccctaatggctgccctggatgactaccgtggccagtttcctgagctgcagggcctggagcaggaggtgacccgcctagaaagtctgctcatgcagagacaaggtctgactcgcagccgggcctccagtctcagcatcactgtggagcatgccttggagagcttcagcttcctcaatgaagacgaagatgaagacaatgatgttcctggggacaggcctccaagcagcccggaggctggggctgaggacagcatagactcacccagtgcccgccccctcagcacggggtgtccagctctggatgctgccttggtccggcacctgtaccactgcagtcgcctcctgctgaaactgggcacatttgggcccctgcgctgccaggaggcatgggccctggagcggctgctgcgggaagcccgagtactggaggcagtatgcgagttcagcaggcggtgggagatcccggccagctctgcccaggaagtggtgcagttctcggcctctcggcctggcttcctgaccttctgggaccagtgcacagagagactcagctgcttcctctgcccggtggagcgggtgcttctcaccttctgcaaccagtatggtgcccgcctctccctgcgccagccaggcttggctgaggctgtgtgtgtgaagttcctggaggatgccctggggcagaagctgcccagaaggccccagccagggcctggagagcagctcacagtcttccagttctggagttttgtggaaaccttggacagccccaccatggaggcctacgtgactgagaccgctgaggaggtgctactggtgcggaatctgaactcggatgatcaggctgttgtgctgaaggccctgagattggcgcccgaggggcgtctgcgaagggacgggctgcgggccctcagctccctgctcgtccatggcaacaacaaggtcatggctgctgtcagcacccagctccggagcctgtcactgggccctaccttccgggagagggccctcctgtgcttcctggaccagctggaggatgaggacgtgcagactcgagtggctggctgcctggccctaggctgcatcaaggctcccgagggcattgagcccctggtgtacctctgccaaactgacacagaagctgtgagggaagctgcccggcaaagcctacagcagtgtggagaagagggacagtctgcccatcgacggctggaggagtccctggacgccctgccccgcatctttgggcctggcagcatggccagcacagcattctaaactattcacccatgggttcctggtgcccctttccccccactttcagggctcaccaggcactggcagggagggtaagggctggctccagatacccctcccccacagattcctagcaatgaaaatctaatatattcttctgttgcccctggggttggagagtcagtgcctgcagtcaagtgcctcccagcctcggctcagcacatcccttgccacaaatcagtgtctggggcttggccaccctgccgctgcccagccacatcccttggttttgtattttatttacagagttttacagaaaataaaaaagcaaaatgtctttcctacaaaaaaagg

SEQ ID NO: 9774 - DNA, 3998 bp, Homo sapiens
gggcgctgggagcgatgcccggagcccaggcgggctggctcgaagtggccagtgccggaatggtccgcgtgggtgtgcgagctgcggtgtctgggggcctgtcccggacccaccatgaacaccaagaagagagggagagccccgcgcggactcactctatgatgtccctgtcggtgcggccgcagcgccgtctgctcagcgcccgggtcaataggagccagtccttcgcaggcgtcctcggcagccacgagcgggggcccagggcctacttggaagtgcaccagcaggagcaagagaaactccaggggcagataagggagtccaagaggaattcccgcttgggcttcctgtatgatctggacaagcaagtcaagtccattgaacgcttcctgcgacgactggagttccatgccagcaagatcgatgagctgtatgaggcatactgtgtccagcggcgtctccgggatggtgcctacaacatggtccgtgcctacaccactgggtccccgggaagccgagaggcccgggacagcctggcagaggccactcgggggcatcgcgagtacacggagagcatgtgtctgctggagagcgagctggaggcacagctgggcgagtttcatctccgaatgaaagggctggctggcttcgccaggctgtgtgtaggcgatcagtatgagatctgcatgaaatatgggcgtcagcgctggaaactacggggccgaattgagggtagtggaaagcaggtgtgggacagtgaagaaaccatctttctccctctactcacggaatttctgtctattaaggtgacagaactgaagggcctggccaaccatgtggttgtgggcagtgtctcctgtgagaccaaggacctgtttgccgccctgccccaggttgtggctgtggatatcaatgaccttggtaccatcaagctcagcctggaagtcacatggagccccttcgacaaggatgaccagccctcagctgcttcttctgtcaacaaggcctccacagtcaccaagcgcttctccacctatagccagagcccaccggacacaccctcacttcgggaacaggctttctataacatgctgcgacggcaggaggagctggagaatgggacagcatggtccctgtcatctgaatcttcagacgactcatccagcccacagctctcaggcactgcccgccactcaccagcccctaggcccctggtgcagcagcccgagccccttcccatccaagttgccttccgcaggcctgagacccccagctctgggcccttggatgaggagggggccgtggccccagtcctggcaaatgggcatgcaccctacagtcggactctgagccacatcagtgaggctagtgtagatgctgccttggctgaggcttcagtggaggccgttggcccagaaagcctagcctggggacctagcccacctacacacccagctcccacccatggagagcaccccagtcctgttcctcctgccctggaccctggccactctgccacaagctctaccctcggtacaacaggctctgtccccacatctacagaccctgccccatctgcacacctagactcagttcataagtccacagactctggcccttcagaactgccaggccccactcacaccactacaggctctacctatagtgccattaccactacccacagtgctccaagccccctcactcacactactacaggctccacccacaagcccataatctctacccttactactacaggccctaccctcaatatcataggcccagtccagactaccacaagccccacccacactatgccaagccctacccataccacagcaagccccactcatacttccacaagccccacccatacccccacaagtcccacccacaaaaccagtatgtcacctcccaccactacaagtcctacccccagtggtatgggcctagtccagactgccacaagtcccacccatcctaccacaagccccacccatcccaccacaagccccatccttataaatgtaagcccttccacttctctagaacttgctaccctctccagcccctccaaacactcagaccccaccctcccaggcactgactcccttccctgtagtcccccagtctccaattcctacactcaggcagaccctatggcccccagaactccccacccaagtcctgcccattccagtaggaaacccctcacaagccctgccccagatccctcagagtctacggttcagagtctaagccccactccctcacccccaacccctgcaccccagcattcagacctttgcctggccatggctgtccagaccccagtcccaacggcagccggagggtctggggacaggagcctggaggaggcactgggggccctaatggctgccctggatgactaccgtggccagtttcctgagctgcagggcctggagcaggaggtgacccgcctagaaagtctgctcatgcagagacaaggtctgactcgcagccgggcctccagtctcagcatcactgtggagcatgccttggagagcttcagcttcctcaatgaagacgaagatgaagacaatgatgttcctggggacaggcctccaagcagcccggaggctggggctgaggacagcatagactcacccagtgcccgccccctcagcacggggtgtccagctctggatgctgccttggtccggcacctgtaccactgcagtcgcctcctgctgaaactgggcacatttgggcccctgcgctgccaggaggcatgggccctggagcggctgctgcgggaagcccgagtactggaggcagtatgcgagttcagcaggcggtgggagatcccggccagctctgcccaggaagtggtgcagttctcggcctctcggcctggcttcctgaccttctgggaccagtgcacagagagactcagctgcttcctctgcccggtggagcgggtgcttctcaccttctgcaaccagtatggtgcccgcctctccctgcgccagccaggcttggctgaggctgtgtgtgtgaagttcctggaggatgccctggggcagaagctgcccagaaggccccagccagggcctggagagcagctcacagtcttccagttctggagttttgtggaaaccttggacagccccaccatggaggcctacgtgactgagaccgctgaggaggtgctactggtgcggaatctgaactcggatgatcaggctgttgtgctgaaggccctgagattggcgcccgaggggcgtctgcgaagggacgggctgcgggccctcagctccctgctcgtccatggcaacaacaaggtcatggctgctgtcagcacccagctccggagcctgtcactgggccctaccttccgggagagggccctcctgtgcttcctggaccagctggaggatgaggacgtgcagactcgagtggctggctgcctggccctaggctgcatcaaggctcccgagggcattgagcccctggtgtacctctgccaaactgacacagaagctgtgagggaagctgcccggcaaagcctacagcagtgtggagaagagggacagtctgcccatcgacggctggaggagtccctggacgccctgccccgcatctttgggcctggcagcatggccagcacagcattctaaactattcacccatgggttcctggtgcccctttccccccactttcagggctcaccaggcactggcagggagggtaagggctggctccagatacccctcccccacagattcctagcaatgaaaatctaatatattcttctgttgcccctggggttggagagtcagtgcctgcagtcaagtgcctcccagcctcggctcagcacatcccttgccacaaatcagtgtctggggcttggccaccctgccgctgcccagccacatcccttggttttgtattttatttacagagttttacagaaaataaaaaagcaaaatgtctttcctacaaaaaaagg

SEQ ID NO: 9775 - DNA, 4046 bp, Homo sapiens
gcggccgcgcagggttggtggggtcaaagggcgtcagatggggctgggtctgggggtgcgtagtgagagtctgggggactcctgctctcctctttctgaggacagcctctccttcaggagtttcccggtcttcagcccgccggggcccccacggaagccccccgcgctctcccgagtgtccaggatgttttccgtggctcacccagccgccaaggtgccgcagcccgagcggctggacctggtgtacacggcgctgaagcggggcctgacctgacgtgagcagctcctctgttcccagccctgtcccgggatccctccccaagcccgcatcctgctagcaggaacctttccaggggcagataagggagtccaagaggaattcccgcttgggcttcctgtatgatctggacaagcaagtcaagtccattgaacgcttcctgcgacgactggagttccatgccagcaagatcgatgagctgtatgaggcatactgtgtccagcggcgtctccgggatggtgcctacaacatggtccgtgcctacaccactgggtccccgggaagccgagaggcccgggacagcctggcagaggccactcgggggcatcgcgagtacacggagagcatgtgtctgctggagagcgagctggaggcacagctgggcgagtttcatctccgaatgaaagggctggctggcttcgccaggctgtgtgtaggcgatcagtatgagatctgcatgaaatatgggcgtcagcgctggaaactacggggccgaattgagggtagtggaaagcaggtgtgggacagtgaagaaaccatctttctccctctactcacggaatttctgtctattaaggtgacagaactgaagggcctggccaaccatgtggttgtgggcagtgtctcctgtgagaccaaggacctgtttgccgccctgccccaggttgtggctgtggatatcaatgaccttggtaccatcaagctcagcctggaagtcacatggagccccttcgacaaggatgaccagccctcagctgcttcttctgtcaacaaggcctccacagtcaccaagcgcttctccacctatagccagagcccaccggacacaccctcacttcgggaacaggctttctataacatgctgcgacggcaggaggagctggagaatgggacagcatggtccctgtcatctgaatcttcagacgactcatccagcccacagctctcaggcactgcccgccactcaccagcccctaggcccctggtgcagcagcccgagccccttcccatccaagttgccttccgcaggcctgagacccccagctctgggcccttggatgaggagggggccgtggccccagtcctggcaaatgggcatgcaccctacagtcggactctgagccacatcagtgaggctagtgtagatgctgccttggctgaggcttcagtggaggccgttggcccagaaagcctagcctggggacctagcccacctacacacccagctcccacccatggagagcaccccagtcctgttcctcctgccctggaccctggccactctgccacaagctctaccctcggtacaacaggctctgtccccacatctacagaccctgccccatctgcacacctagactcagttcataagtccacagactctggcccttcagaactgccaggccccactcacaccactacaggctctacctatagtgccattaccactacccacagtgctccaagccccctcactcacactactacaggctccacccacaagcccataatctctacccttactactacaggccctaccctcaatatcataggcccagtccagactaccacaagccccacccacactatgccaagccctacccataccacagcaagccccactcatacttccacaagccccacccatacccccacaagtcccacccacaaaaccagtatgtcacctcccaccactacaagtcctacccccagtggtatgggcctagtccagactgccacaagtcccacccatcctaccacaagccccacccatcccaccacaagccccatccttataaatgtaagcccttccacttctctagaacttgctaccctctccagcccctccaaacactcagaccccaccctcccaggcactgactcccttccctgtagtcccccagtctccaattcctacactcaggcagaccctatggcccccagaactccccacccaagtcctgcccattccagtaggaaacccctcacaagccctgccccagatccctcagagtctacggttcagagtctaagccccactccctcacccccaacccctgcaccccagcattcagacctttgcctggccatggctgtccagaccccagtcccaacggcagccggagggtctggggacaggagcctggaggaggcactgggggccctaatggctgccctggatgactaccgtggccagtttcctgagctgcagggcctggagcaggaggtgacccgcctagaaagtctgctcatgcagagacaaggtctgactcgcagccgggcctccagtctcagcatcactgtggagcatgccttggagagcttcagcttcctcaatgaagacgaagatgaagacaatgatgttcctggggacaggcctccaagcagcccggaggctggggctgaggacagcatagactcacccagtgcccgccccctcagcacggggtgtccagctctggatgctgccttggtccggcacctgtaccactgcagtcgcctcctgctgaaactgggcacatttgggcccctgcgctgccaggaggcatgggccctggagcggctgctgcgggaagcccgagtactggaggcagtatgcgagttcagcaggcggtgggagatcccggccagctctgcccaggaagtggtgcagttctcggcctctcggcctggcttcctgaccttctgggaccagtgcacagagagactcagctgcttcctctgcccggtggagcgggtgcttctcaccttctgcaaccagtatggtgcccgcctctccctgcgccagccaggcttggctgaggctgtgtgtgtgaagttcctggaggatgccctggggcagaagctgcccagaaggccccagccagggcctggagagcagctcacagtcttccagttctggagttttgtggaaaccttggacagccccaccatggaggcctacgtgactgagaccgctgaggaggtgctactggtgcggaatctgaactcggatgatcaggctgttgtgctgaaggccctgagattggcgcccgaggggcgtctgcgaagggacgggctgcgggccctcagctccctgctcgtccatggcaacaacaaggtcatggctgctgtcagcacccagctccggagcctgtcactgggccctaccttccgggagagggccctcctgtgcttcctggaccagctggaggatgaggacgtgcagactcgagtggctggctgcctggccctaggctgcatcaaggctcccgagggcattgagcccctggtgtacctctgccaaactgacacagaagctgtgagggaagctgcccggcaaagcctacagcagtgtggagaagagggacagtctgcccatcgacggctggaggagtccctggacgccctgccccgcatctttgggcctggcagcatggccagcacagcattctaaactattcacccatgggttcctggtgcccctttccccccactttcagggctcaccaggcactggcagggagggtaagggctggctccagatacccctcccccacagattcctagcaatgaaaatctaatatattcttctgttgcccctggggttggagagtcagtgcctgcagtcaagtgcctcccagcctcggctcagcacatcccttgccacaaatcagtgtctggggcttggccaccctgccgctgcccagccacatcccttggttttgtattttatttacagagttttacagaaaataaaaaagcaaaatgtctttcctacaaaaaaagg

SEQ ID NO: 9776 - DNA, 4064 bp, Homo sapiens
gcggccgcgcagggttggtggggtcaaagggcgtcagatggggctgggtctgggggtgcgtagtgagagtctgggggactcctgctctcctctttctgaggacagcctctccttcaggagtttcccggtcttcagcccgccggggcccccacggaagccccccgcgctctcccgagtgtccaggatgttttccgtggctcacccagccgccaaggtgccgcagcccgagcggctggacctggtgtacacggcgctgaagcggggcctgacctgctccaggagcttccagtggggtaggtgggacccctacagacatggacagcaggagattctgctgcagtggtactgagcagtggtactgctgcatggtgcttcttgggaagaggttagggcttcctggaggagggaacacttctgccggggcttgatgggagttcccctgcagagggaaccttgcacaaggaagcagagctctccccagtcggatcgatgagctgtatgaggcatactgtgtccagcggcgtctccgggatggtgcctacaacatggtccgtgcctacaccactgggtccccgggaagccgagaggcccgggacagcctggcagaggccactcgggggcatcgcgagtacacggagagcatgtgtctgctggagagcgagctggaggcacagctgggcgagtttcatctccgaatgaaagggctggctggcttcgccaggctgtgtgtaggcgatcagtatgagatctgcatgaaatatgggcgtcagcgctggaaactacggggccgaattgagggtagtggaaagcaggtgtgggacagtgaagaaaccatctttctccctctactcacggaatttctgtctattaaggtgacagaactgaagggcctggccaaccatgtggttgtgggcagtgtctcctgtgagaccaaggacctgtttgccgccctgccccaggttgtggctgtggatatcaatgaccttggtaccatcaagctcagcctggaagtcacatggagccccttcgacaaggatgaccagccctcagctgcttcttctgtcaacaaggcctccacagtcaccaagcgcttctccacctatagccagagcccaccggacacaccctcacttcgggaacaggctttctataacatgctgcgacggcaggaggagctggagaatgggacagcatggtccctgtcatctgaatcttcagacgactcatccagcccacagctctcaggcactgcccgccactcaccagcccctaggcccctggtgcagcagcccgagccccttcccatccaagttgccttccgcaggcctgagacccccagctctgggcccttggatgaggagggggccgtggccccagtcctggcaaatgggcatgcaccctacagtcggactctgagccacatcagtgaggctagtgtagatgctgccttggctgaggcttcagtggaggccgttggcccagaaagcctagcctggggacctagcccacctacacacccagctcccacccatggagagcaccccagtcctgttcctcctgccctggaccctggccactctgccacaagctctaccctcggtacaacaggctctgtccccacatctacagaccctgccccatctgcacacctagactcagttcataagtccacagactctggcccttcagaactgccaggccccactcacaccactacaggctctacctatagtgccattaccactacccacagtgctccaagccccctcactcacactactacaggctccacccacaagcccataatctctacccttactactacaggccctaccctcaatatcataggcccagtccagactaccacaagccccacccacactatgccaagccctacccataccacagcaagccccactcatacttccacaagccccacccatacccccacaagtcccacccacaaaaccagtatgtcacctcccaccactacaagtcctacccccagtggtatgggcctagtccagactgccacaagtcccacccatcctaccacaagccccacccatcccaccacaagccccatccttataaatgtaagcccttccacttctctagaacttgctaccctctccagcccctccaaacactcagaccccaccctcccaggcactgactcccttccctgtagtcccccagtctccaattcctacactcaggcagaccctatggcccccagaactccccacccaagtcctgcccattccagtaggaaacccctcacaagccctgccccagatccctcagagtctacggttcagagtctaagccccactccctcacccccaacccctgcaccccagcattcagacctttgcctggccatggctgtccagaccccagtcccaacggcagccggagggtctggggacaggagcctggaggaggcactgggggccctaatggctgccctggatgactaccgtggccagtttcctgagctgcagggcctggagcaggaggtgacccgcctagaaagtctgctcatgcagagacaaggtctgactcgcagccgggcctccagtctcagcatcactgtggagcatgccttggagagcttcagcttcctcaatgaagacgaagatgaagacaatgatgttcctggggacaggcctccaagcagcccggaggctggggctgaggacagcatagactcacccagtgcccgccccctcagcacggggtgtccagctctggatgctgccttggtccggcacctgtaccactgcagtcgcctcctgctgaaactgggcacatttgggcccctgcgctgccaggaggcatgggccctggagcggctgctgcgggaagcccgagtactggaggcagtatgcgagttcagcaggcggtgggagatcccggccagctctgcccaggaagtggtgcagttctcggcctctcggcctggcttcctgaccttctgggaccagtgcacagagagactcagctgcttcctctgcccggtggagcgggtgcttctcaccttctgcaaccagtatggtgcccgcctctccctgcgccagccaggcttggctgaggctgtgtgtgtgaagttcctggaggatgccctggggcagaagctgcccagaaggccccagccagggcctggagagcagctcacagtcttccagttctggagttttgtggaaaccttggacagccccaccatggaggcctacgtgactgagaccgctgaggaggtgctactggtgcggaatctgaactcggatgatcaggctgttgtgctgaaggccctgagattggcgcccgaggggcgtctgcgaagggacgggctgcgggccctcagctccctgctcgtccatggcaacaacaaggtcatggctgctgtcagcacccagctccggagcctgtcactgggccctaccttccgggagagggccctcctgtgcttcctggaccagctggaggatgaggacgtgcagactcgagtggctggctgcctggccctaggctgcatcaaggctcccgagggcattgagcccctggtgtacctctgccaaactgacacagaagctgtgagggaagctgcccggcaaagcctacagcagtgtggagaagagggacagtctgcccatcgacggctggaggagtccctggacgccctgccccgcatctttgggcctggcagcatggccagcacagcattctaaactattcacccatgggttcctggtgcccctttccccccactttcagggctcaccaggcactggcagggagggtaagggctggctccagatacccctcccccacagattcctagcaatgaaaatctaatatattcttctgttgcccctggggttggagagtcagtgcctgcagtcaagtgcctcccagcctcggctcagcacatcccttgccacaaatcagtgtctggggcttggccaccctgccgctgcccagccacatcccttggttttgtattttatttacagagttttacagaaaataaaaaagcaaaatgtctttcctacaaaaaaagg

SEQ ID NO: 9777 - DNA, 1360 bp, Homo sapiens
gctagtagggctggtgttgaatcggcacgagggcacggggtgtccagctctggatgctgccttggtccggcacctgtaccactgcagtcgcctcctgctgaaactgggcacatttgggcccctgcgctgccaggaggcatgggccctggagcggctgctgcgggaagcccgagtactggaggcagtatgcgagttcagcaggcggtgggagatcccggccagctctgcccaggaagtggtgcagttctcggcctctcggcctggcttcctgaccttctgggaccagtgcacagagagactcagctgcttcctctgcccggtggagcgggtgcttctcaccttctgcaaccagtatggtgcccgcctctccctgcgccagccaggcttggctgaggctgtgtgtgtgaagttcctggaggatgccctggggcagaagctgcccagaaggccccagccagggcctggagagcagctcacagtcttccagttctggagttttgtggaaaccttggacagccccaccatggaggcctacgtgactgagaccgctgaggaggtgctactggtgcggaatctgaactcggatgatcaggctgttgtgctgaaggccctgagattggcgcccgaggggcgtctgcgaagggacgggctgcgggccctcagctccctgctcgtccatggcaacaacaaggtcatggctgctgtcagcacccagctccggagcctgtcactgggccctaccttccgggagagggccctcctgtgcttcctggaccagctggaggatgaggacgtgcagactcgagtggctggctgcctggccctaggctgcatcaaggctcccgagggcattgagcccctggtgtacctctgccaaactgacacagaagctgtgagggaagctgcccggcaaagcctacagcagtgtggagaagagggacagtctgcccatcgacggctggaggagtccctggacgccctgccccgcatctttgggcctggcagcatggccagcacagcattctaaactattcacccatgggttcctggtgcccctttccccccactttcagggctcaccaggcactggcagggagggtaagggctggctccagatacccctcccccacagattcctagcaatgaaaatctaatatattcttctgttgcccctggggttggagagtcagtgcctgcagtcaagtgcctcccagcctcggctcagcacatcccttgccacaaatcagtgtctggggcttggccaccctgccgctgcccagccacatcccttggttttgtattttatttacagagttttacagaaaataaaaaagcaaaatgtctttcctacaaaaaaagg

SEQ ID NO: 9778 - DNA, 313 bp, Homo sapiens
aggtggggggctggagggagtatgctgaagaaccccaatatggctcaccgacttctccccttctcctccaactcagggctggctggcttcgccaggctgtgtgtaggcgatcagtatgaggtatgagaatgtgcagggaagggctgggtcggtagggtcccaacacctaggctgcctcatcctacctgttcccccagatctgcatgaaatatgggcgtcagcgctggaaactacggggccgaattgagggtagtggaaagcaggtgtgggacagtgaagaaaccatctttctccctctactcacggaatttct

SEQ ID NO: 9779 - DNA, 1442 bp, Homo sapiens
cagcacccctgcctcattaaccagatggctgggataagactcttgattttgaaaattcaacaaccagagttcagctatttgcagtgatatgcagtcatttgtcactatcaaaaaggaaaataactaaaatgtggtgtgttggcattagttacttactaatgagcaagatcagcacctgcatttcagcttggctctgtcattttctatttattggaagaatggtgttgtggttaagtgtgtggtgtgtagaggaagactatttgtttttttgtcttgttttgtttttattgaaatatagcatgcatactgaaaaatgcacaaatcatatgtgcagagctcactgaatttcacagaatgaatacacccatgcaatagcactcagatcaagagacagaacattagcagcacccccagaaggaccacccccaggatcccttccagtaaccacaccccctccagtagaaactattatccttacttctaacatcacagattacttttgcttggttttgtaacttatataaatgaaatcacaccatatctactcttcgtgattattttcactcaacattatgtttgtgatatccattcgtattgttacaatagttgttgttggttaactctcattgctgtatagtattacattgtgtaaatataccaaaatttatttattcaattcattgtactattcatggttattagtttgcaattattggcaattatgaataatgctgctataaccatttctttatattctttgtagtgaacatgcatgtatttctgttgttatatatttaggaatgaaactgctgtgtcattttgtgtgcatatattcaaatataatagttgttgccaaacactttttcaaagtggttgtaccactttgcatttccaccagcagtgtatgagtgttctagttgctctaaattctcaccaacacttggcattttggtattttttattttagccaatgtggtgatcatgtggtgacctctcattatggtttccttttgcatttctctgatgactaatgaaattgagaatcttttcaatatatgttcgactggccattgtacatcttgttttgtttgtcttttagatgtcttttgtcattgatttgtaagggctctttatgtattctggatatgaatcttttgtcaaatatatgcattgcaaatatatacttttttacttattgatatctttaatttgttttaagaaaatttttaatttttatggaaattttatagaaatgctgaaaatcaaacgttatctgcagtggtaacagtctgacttctaaactgctatatgtaatagaagaacaatacataattgttgtatatatttatgaggtacatgtaatattttgatacaagcataaaatatgtaatgattgttgatctcttttaatgaacagaattccttaatcataaaaaaaaaaa

SEQ ID NO: 9780 - DNA, 754 bp, Homo sapiens
cagctgaaggtcaagcgaaggctttaaaggcaagaaggcagtgttgaaaggtgtcacagccacaaaaagaagaagatccgcacgtcacccaccttccggcggccgaagacactgcgactccggagacagcccaaacatcctcggaagagcgctcccaggagaaacaagcttgaccactatgctatcatcaagtttccgctgaccactgagtctgccatgaagaagatagaagacaacaacacacttgtgttcattgtggatgttaaagccaacaagcaccagattaaacaggctgtgaagaagctgtatgacattgatgtggccaaggtcaacaccctgattcggcctgatggagagaagaaggcatatgttcgactggccattgtacatcttgttttgtttgtcttttagatgtcttttgtcattgatttgtaagggctctttatgtattctggatatgaatcttttgtcaaatatatgcattgcaaatatatacttttttacttattgatatctttaatttgttttaagaaaatttttaatttttatggaaattttatagaaatgctgaaaatcaaacgttatctgcagtggtaacagtctgacttctaaactgctatatgtaatagaagaacaatacataattgttgtatatatttatgaggtacatgtaatattttgatacaagcataaaatatgtaatgattgttgatctcttttaatgaacagaattccttaatcataaaaaaaaaaa

SEQ ID NO: 9781 - DNA, 279 bp, Homo sapiens
ttctgagctcatgggacatcatgaatgtggtatgcaaatgaggtggcaaggagcacgtagctcctttgctcacatgcgtgcatcatggtcccgttggacttcacttgaaaacacaggttcgaagataaaatgattaagaatttcaagacagtgccatcagagtattaaaccaagcttcaggcccttctgagggcaaggctctatgcacatcacatgcccctgaagctgaccctgcttgcctgattctctgacatgaagaaagaaattccactgtgcttt

SEQ ID NO: 9782 - DNA, 107 bp, Homo sapiens
taaactaacaccccaaactatctaatttgattagttttcacgtttagtaacatcagtaaagttctcttcaaattaaaatacgcagacaagaaactaaaaaaaaaaaa

SEQ ID NO: 9783 - DNA, 2814 bp, Homo sapiens
gaagaatccttacaatttaaaatattttcacttttattttgaaaaagagccaactttctcaaaggaagctgtcattaacttctgttgtttggttagctaataaattctgttagtatgcaagttaaacctgtgtaaaggaggttataacgtggtaaggtataattttccaatatgagacaatggcttaaatttgcctttggagatggagaatattttcaacatacataattttaacaaatagttttgttgctttttgttaagcttaaaaaaaaatttggatcagaaattataggattgagctggtaccaaaagaatcctaaagtacagaatggttttccaaaagagcagacatttcaatgaaaataaaaccccaaaacattttttttatatatcatgattgcatgcttttaaaataaggaggcttatcattgaattttagttccataaaaatgaaaatacatgtttattatttagaaatggttagtgactggtattgaagtattattcacacttatgtttgtaataatttatttaaagaatgccaacagtttagcacacttttgtaatctctagaacagttctatacattaaaaataaacattaaaaataaagcagttcctttaaacaacttactatgaaactataattgttaatgaaataagatattcctatgtatacattagtatgatttaagggtatgaaaaacagtgctaaaatgtggagttaattggaatgtgtgcagctgcatactcactttctgtgtttttatatttccttacctagttttaaaaatcatcacttttcggcacttcagctagacttatttcaatattataattatgattaatgaaggagcagtcagaagtagaggtgtggtattccgtgggcagaagtcaaatgaaaaaagctatattgtttacttgtttactatatcaatgttaatattatgccttattttgataaatcaaatagtatatcttaatcattgttgataaatatacaggcaaagtttgagcatcatatgtatttttatgaagctgcttaattccaaattgcctcccaccccactatctagcatagtttaagcaacacataattttgaaagaaaagtttgtaatccctcctttcttttttttgcccatttctaaatcctgtatgcccgcagtaaagatagtttggggattttaaaagttttctctattacccatttctaaatcctgtatgtcaaagatagtttggagattataaaaattttcatgtattggtgtaggttgagtatccctaatgagaaaattcaaaatctgaaatgcttcaaaatctgaaatttttcgagcacagacatgatgctcaaaggaaatactcacagagcattttacatttgtaggttagcgatactcaacaagtaaatataatgcacatgttctaaaatatccccccaaaccccagcaatccaaaacacttctggtcctaagcattttgagtaggggatactcactcaacctgtatatttgtgctaatacatgactcattagaatgattctttgtaaacttaatattttaaaagtacagcacttctgtagtatggaaggtttcagtaataattatattcattcagtagtctcttaccattatctcccagatggaaaaagaggactaatgtggaaaccccagagggtgtccagttggaccagggagatattagacacttaacagtattttcagtctgtccatctctttattccaatgtgagaaatggaagtgtttttttttttacgtttattgggctcttcatatttctctacattatttttaatgtgcagtttcttcaattggttagtatttccatactatttgcaactttatggcctttaaatataggacatattatatagcagaaattttgactttaaatcctcttgagtagtatattttgagaagaaaagctatactgctcttctggatggtttccatcctttatttaggtcttttctttttgaattcaagtgttttgtatgcttagaaagtagacatgtataatattgagatcggttatttctgagctggaaattggaaactttggaaactcaggaaattgctctgacaatgttttaactgctctcaatttaagaaaatgacgaaatgtataaaaaagacaaaaataacgtgtgctgttttttccaagtgcctttttctaagtgcttttccattgtgcaatgaggtgaagtttggtaatttttcggtgtagtagttaaatattgctcaatttttatttacatgtaaagaaaacagatttaaatgtttatgtggccaaaaggtgtcatttaaaaggtaaaataagtttatgtagaatgtatgttcatggtgcttatttttaaaatgtaattcaagtttacagtattacttaatgcttctttacagaatttaatagagaaacaaggctagaacacatctacatcctgaagagccgtttataacttcatattatatgatgacaaagttcattattttccttaaagttgagcaattgacttttatggtccaatgatgaacttattattaataaatgattgagttaactgtgaggcttctcattaaaatacaatattgcagctatcagttggagaatatattataaaattttcagacagtatatcagaaaaatgtttttatttgtactgtatagaaaatgtaattttgctgttaactctgtactttttaaattgaaaatgttttataaatttgcttttaaattttcttatgaagccatttgcaaattacatacttaatttaataaaatactttagccacaaaaaa

SEQ ID NO: 9784 - DNA, 2748 bp, Homo sapiens
gaagaatccttacaatttaaaatattttcacttttattttgaaaaagagccaactttctcaaaggaagctgtcattaacttctgttgtttggttagctaataaattctgttagtatgcaagttaaacctgtgtaaaggaggttataacgtggtaaggtataattttccaatatgagacaatggcttaaatttgcctttggagatggagaatattttcaacatacataattttaacaaatagttttgttgctttttgttaagcttaaaaaaaaatttggatcagaaattataggattgagctggtaccaaaagaatcctaaagtacagaatggttttccaaaagagcagacatttcaatgaaaataaaaccccaaaacattttttttatatatcatgattgcatgcttttaaaataaggaggcttatcattgaattttagttccataaaaatgaaaatacatgtttattatttagaaatggttagtgactggtattgaagtattattcacacttatgtttgtaataatttatttaaagaatgccaacagtttagcacacttttgtaatctctagaacagttctatacattaaaaataaacattaaaaataaagcagttcctttaaacaacttactatgaaactataattgttaatgaaataagatattcctatgtatacattagtatgatttaagggtatgaaaaacagtgctaaaatgtggagttaattggaatgtgtgcagctgcatactcactttctgtgtttttatatttccttacctagttttaaaaatcatcacttttcggcacttcagctagacttatttcaatattataattatgattaatgaaggagcagtcagaagtagaggtgtggtattccgtgggcagaagtcaaatgaaaaaagctatattgtttacttgtttactatatcaatgttaatattatgccttattttgataaatcaaatagtatatcttaatcattgttgataaatatacaggcaaagtttgagcatcatatgtatttttatgaagctgcttaattccaaattgcctcccaccccactatctagcatagtttaagcaacacataattttgaaagaaaagtttgtaatccctcctttcttttttttgcccatttctaaatcctgtatgtcaaagatagtttggagattataaaaattttcatgtattggtgtaggttgagtatccctaatgagaaaattcaaaatctgaaatgcttcaaaatctgaaatttttcgagcacagacatgatgctcaaaggaaatactcacagagcattttacatttgtaggttagcgatactcaacaagtaaatataatgcacatgttctaaaatatccccccaaaccccagcaatccaaaacacttctggtcctaagcattttgagtaggggatactcactcaacctgtatatttgtgctaatacatgactcattagaatgattctttgtaaacttaatattttaaaagtacagcacttctgtagtatggaaggtttcagtaataattatattcattcagtagtctcttaccattatctcccagatggaaaaagaggactaatgtggaaaccccagagggtgtccagttggaccagggagatattagacacttaacagtattttcagtctgtccatctctttattccaatgtgagaaatggaagtgtttttttttttacgtttattgggctcttcatatttctctacattatttttaatgtgcagtttcttcaattggttagtatttccatactatttgcaactttatggcctttaaatataggacatattatatagcagaaattttgactttaaatcctcttgagtagtatattttgagaagaaaagctatactgctcttctggatggtttccatcctttatttaggtcttttctttttgaattcaagtgttttgtatgcttagaaagtagacatgtataatattgagatcggttatttctgagctggaaattggaaactttggaaactcaggaaattgctctgacaatgttttaactgctctcaatttaagaaaatgacgaaatgtataaaaaagacaaaaataacgtgtgctgttttttccaagtgcctttttctaagtgcttttccattgtgcaatgaggtgaagtttggtaatttttcggtgtagtagttaaatattgctcaatttttatttacatgtaaagaaaacagatttaaatgtttatgtggccaaaaggtgtcatttaaaaggtaaaataagtttatgtagaatgtatgttcatggtgcttatttttaaaatgtaattcaagtttacagtattacttaatgcttctttacagaatttaatagagaaacaaggctagaacacatctacatcctgaagagccgtttataacttcatattatatgatgacaaagttcattattttccttaaagttgagcaattgacttttatggtccaatgatgaacttattattaataaatgattgagttaactgtgaggcttctcattaaaatacaatattgcagctatcagttggagaatatattataaaattttcagacagtatatcagaaaaatgtttttatttgtactgtatagaaaatgtaattttgctgttaactctgtactttttaaattgaaaatgttttataaatttgcttttaaattttcttatgaagccatttgcaaattacatacttaatttaataaaatactttagccacaaaaaa

SEQ ID NO: 9785 - DNA, 2760 bp, Homo sapiens
gaagaatccttacaatttaaaatattttcacttttattttgaaaaagagccaactttctcaaaggaagctgtcattaacttctgttgtttggttagctaataaattctgttagtatgcaagttaaacctgtgtaaaggaggttataacgtggtaaggtataattttccaatatgagacaatggcttaaatttgcctttggagatggagaatattttcaacatacataattttaacaaatagttttgttgctttttgttaagcttaaaaaaaaatttggatcagaaattataggattgagctggtaccaaaagaatcctaaagtacagaatggttttccaaaagagcagacatttcaatgaaaataaaaccccaaaacattttttttatatatcatgattgcatgcttttaaaataaggaggcttatcattgaattttagttccataaaaatgaaaatacatgtttattatttagaaatggttagtgactggtattgaagtattattcacacttatgtttgtaataatttatttaaagaatgccaacagtttagcacacttttgtaatctctagaacagttctatacattaaaaataaacattaaaaataaagcagttcctttaaacaacttactatgaaactataattgttaatgaaataagatattcctatgtatacattagtatgatttaagggtatgaaaaacagtgctaaaatgtggagttaattggaatgtgtgcagctgcatactcactttctgtgtttttatatttccttacctagttttaaaaatcatcacttttcggcacttcagctagacttatttcaatattataattatgattaatgaaggagcagtcagaagtagaggtgtggtattccgtgggcagaagtcaaatgaaaaaagctatattgtttacttgtttactatatcaatgttaatattatgccttattttgataaatcaaatagtatatcttaatcattgttgataaatatacaggcaaagtttgagcatcatatgtatttttatgaagctgcttaattccaaattgcctcccaccccactatctagcatagtttaagcaacacataattttgaaagaaaagtttgtaatccctcctttcttttttttgcccatttctaaatcctgtatgcccgcagtaaagatagtttggggattttaaaagttttctctattacccatttctaaatcctgtatgtcaaagatagtttggagattataaaaattttcatgtattggtgtaggttgagtatccctaatgagaaaattcaaaatctgaaatgcttcaaaatctgaaatttttcgagcacagacatgatgctcaaaggaaatactcacagagcattttacatttgtaggttagcgatactcaacaagtaaatataatgcacatgttctaaaatatccccccaaaccccagcaatccaaaacacttctggtcctaagcattttgagtaggggatactcactcaacctgtatatttgtgctaatacatgactcattagaatgattctttgtaaacttaatattttaaaagtacagcacttctgtagtatggaaggtttcagtaataattatattcattcagtagtctcttaccattatctcccagatggaaaaagaggactaatgtggaaaccccagagggtgtccagttggaccagggagatattagacacttaacagtattttcagtctgtccatctctttattccaatgtgagaaatggaagtgtttttttttttacgtttattgggctcttcatatttctctacattatttttaatgtgcagtttcttcaattggttagtatttccatactatttgcaactttatggcctttaaatataggacatattatatagcagaaattttgactttaaatcctcttgagtagtatattttgagaagaaaagctatactgctcttctggatggtttccatcctttatttaggtcttttctttttgaattcaagtgttttgtatgcttagaaagtagacatgtataatattgagatcggttatttctgagctggaaattggaaactttggaaactcaggaaattgctctgacaatgttttaactgctctcaatttaagaaaatgacgaaatgtataaaaaagacaaaaataacgtgtgctgttttttccaagtgcctttttctaagtgcttttccattgtgcaatgaggtgaagtttggtaatttttcggtgtagtagttaaatattgctcaatttttatttacatgtaaagaaaacagatttaaatgtttatgtggccaaaaggtgtcatttaaaaggtaaaataagtttatgtagaatgtatgttcatggtgcttatttttaagaaacaaggctagaacacatctacatcctgaagagccgtttataacttcatattatatgatgacaaagttcattattttccttaaagttgagcaattgacttttatggtccaatgatgaacttattattaataaatgattgagttaactgtgaggcttctcattaaaatacaatattgcagctatcagttggagaatatattataaaattttcagacagtatatcagaaaaatgtttttatttgtactgtatagaaaatgtaattttgctgttaactctgtactttttaaattgaaaatgttttataaatttgcttttaaattttcttatgaagccatttgcaaattacatacttaatttaataaaatactttagccacaaaaaa

SEQ ID NO: 9786 - DNA, 2793 bp, Homo sapiens
gaagaatccttacaatttaaaatattttcacttttattttgaaaaagagccaactttctcaaaggaagctgtcattaacttctgttgtttggttagctaataaattctgttagtatgcaagttaaacctgtgtaaaggaggttataacgtggtaaggtataattttccaatatgagacaatggcttaaatttgcctttggagatggagaatattttcaacatacataattttaacaaatagttttgttgctttttgttaagcttaaaaaaaaatttggatcagaaattataggattgagctggtaccaaaagaatcctaaagtacagaatggttttccaaaagagcagacatttcaatgaaaataaaaccccaaaacattttttttatatatcatgattgcatgcttttaaaataaggaggcttatcattgaattttagttccataaaaatgaaaatacatgtttattatttagaaatggttagtgactggtattgaagtattattcacacttatgtttgtaataatttatttaaagaatgccaacagtttagcacacttttgtaatctctagaacagttctatacattaaaaataaacattaaaaataaagcagttcctttaaacaacttactatgaaactataattgttaatgaaataagatattcctatgtatacattagtatgatttaagggtatgaaaaacagtgctaaaatgtggagttaattggaatgtgtgcagctgcatactcactttctgtgtttttatatttccttacctagttttaaaaatcatcacttttcggcacttcagctagacttatttcaatattataattatgattaatgaaggagcagtcagaagtagaggtgtggtattccgtgggcagaagtcaaatgaaaaaagctatattgtttacttgtttactatatcaatgttaatattatgccttattttgataaatcaaatagtatatcttaatcattgttgataaatatacaggcaaagtttgagcatcatatgtatttttatgaagctgcttaattccaaattgcctcccaccccactatctagcatagtttaagcaacacataattttgaaagaaaagtttgtaatccctcctttcttttttttgcccatttctaaatcctgtatgcccgcagtaaagatagtttggggattttaaaagttttctctattacccatttctaaatcctgtatgtcaaagatagtttggagattataaaaattttcatgtattggtgtaggttgagtatccctaatgagaaaattcaaaatctgaaatgcttcaaaatctgaaatttttcgagcacagacatgatgctcaaaggaaatactcacagagcattttacatttgtaggttagcgatactcaacaagtaaatataatgcacatgttctaaaatatccccccaaaccccagcaatccaaaacacttctggtcctaagcattttgagtaggggatactcactcaacctgtatatttgtgctaatacatgactcattagaatgattctttgtaaacttaatattttaaaagtacagcacttctgtagtatggaaggtttcagtaataattatattcattcagtagtctcttaccattatctcccagatggaaaaagaggactaatgtggaaaccccagagggtgtccagttggaccagggagatattagacacttaacagtattttcagtctgtccatctctttattccaatgtgagaaatggaagtgtttttttttttacgtttattgggctcttcatatttctctacattatttttaatgtgcagtttcttcaattggttagtatttccatactatttgcaactttatggcctttaaatataggacatattatatagcagaaattttgactttaaatcctcttgagtagtatattttgagaagaaaagctatactgctcttctggatggtttccatcctttatttaggtcttttctttttgaattcaagtgttttgtatgcttagaaagtagacatgtataatattgagatcggttatttctgagctggaaattggaaactttggaaactcaggaaattgctctgacaatgttttaactgctctcaatttaagaaaatgacgaaatgtataaaaaagacaaaaataacgtgtgctgttttttccaagtgcctttttctaagtgcttttccattgtgcaatgaggtgaagtttggtaatttttcggtgtagtagttaaatattgctcaatttttatttacatgtaaagaaaacagatttaaatgtttatgtggccaaaaggtgtcatttaaaaggtaaaataagtttatgtagaatgtatgttcatggtgcttatttttaaaatgtaattcaagtttacagtattacttaatgcttctttacagaatttaatagagaaacaaggctagaacacatctacatcctgaagagccgtttataacttcatattatatgatgacaaagttcattattttccttaaagttgagcaattgacttttatggtccaatgatgaacttattattaataaatgattgagttaactgtgaggcttctcattaaaatacaatattgcagctatcagttggagaatatattataaaattttcagacagtatatcagaaaaatgtttttatttgtactgtatagaaaatgtaattttgctgtggctaaagtattttattaaattaagtatgtaatttgcaaatggcttcataagaaaatttacaagcaaatttataaaacattttcaatttgtc

SEQ ID NO: 9787 - DNA, 409 bp, Homo sapiens
gaaaatcaatgaaactagaaatcgattctttaaaaagatcaataaattgacaaacctttagctagagggactaagcaaaagagggagaagagtcaaattactaagatcagaaatgaaagcaagggcattattagtgactctacagaaataaaaaggattataagagagtgctatgaacgattacatgccaacaaattggataacctggatgaaactgataaatttttacaaacacaaaacctatcacagctaaatcacaaagaaatagaaaatctgaataaacctataactagcaaggagattgaatgagtaataaaaagtctcctgagaaatgaaagctctggaactgatgcactgctgaattctacccaacatttaaagaactaacaccaatccttctcaaacctaa

SEQ ID NO: 9788 - DNA, 472 bp, Homo sapiens
aatcttagcaagtcgacctgtaagtctgtttataaaacaggaatgacttatacatcagagtggttgtgaaaattaagggaaagattttactgttactggaccataggcatttcccatcctgcttcttttaagttattcatgaaaaaaattaaaaactatgttctttgatactttaccctaactaaccttttttttttttcccatcttaggtttcccaaaccactccttatgatccagtgaatattcaagagagctacatttgaagcctgtacaaaagcttatccctgtaacacatgtgccataatatacaaacttctaccttcgtcagtccttaacatctacctctctgaattttcatgaatttctatttcacaagggtaattgttttatatacactggcagcagcatacaataaaacttagtatgaaactttaaaaaaaaagtcgacgcggccgcgaatttagtagtagta

SEQ ID NO: 9789 - DNA, 444 bp, Homo sapiens
  misc_feature (349)..(349): n is a, c, g, or t
  misc_feature (352)..(352): n is a, c, g, or t
  misc_feature (359)..(359): n is a, c, g, or t
  misc_feature (440)..(440): n is a, c, g, or t
ggagccagcactaagattcccttctggagaccttattctccacaattcctagcctcagtgctcctctcctttgcttctcctcctatgaatacccctcctgactactcactcctccaacacagtttattttcatacttaattttagcagaccagaaaaaaataaagtttcagtctcaagccacaaatctcctttgctgtccttaagtgaggcatccaacagcgctattctatagtataggatcagtggaatgggataaactgtgggagtcttatatggaccctataaggggcaaattaattcaccaatttggcattacattggaaatggaacaggattccaggtccattnttnttagggntacggttgttggggggccatttttttggaagggcaccccaacgggctttgtggcttggtggggggtttttttttccccttnccaa

SEQ ID NO: 9790 - DNA, 365 bp, Homo sapiens
cggccgcttactactactaggttcgcggcccgtcgacctcagcctcccaagtagctggggcaggaggatcacttgaacctcaggaggcggaggttgcagtgagctgagatttccacactgcactccagcctgggtgacagagtgagactccatctcaaacaaacaaacaaacaaaaaaaacccattattctgaggagtccatgacacaaaaaagttaaagtgatctaggaaatcattgaaaatgaaataagaccaaagtgtgatgatataacccccttgaaatttaacttatctttccctctttctgtcatgctaagaagagatcataggccgtcgacgcggccgcgaatttagtagtagtagta

SEQ ID NO: 9791 - DNA, 367 bp, Homo sapiens
tcctgccaagatttttatagatagttgattctcatattatattgaaaatctttgccaaatatgttttgtgttttcttcggtgaccttggctaatacacttcttgacccattgtaatggatccgcttcttgctcaacacttacaaaaatgtgacctaccaagctatttcactaaataaatggcttctggttttagggggaattttgtcattctcctgtgagaaggtgctaaaggtagttatttttttaaatagcatgtttttttctgtatatttttctatatattcaattacctactgagcatctccacttgtttttatatacacacttcaaattcattatggacagtattcaacttatctttccctt

SEQ ID NO: 9792 - DNA, 391 bp, Homo sapiens
gaaacaaatgatcaccttatgggttattttcatcttgctggtgtccccttaataaggacaaagagttaatactttgcttgaaaaactgaatgggactgggcggggtggctcacgcctgtaatcccagaactttgggaggccaaggctggtagatcacttgaggtcaggagatcgagagcagcccctgcccctgggggatggtgaaaccccgtccctactaaaaatacaaaaattagcctgatgtgctggtgggaccctgtaatcccagctattcgggaggctgaggcaggagaatcacttgaccccaggaggcataggttgcagtgagccgagatcgtgtcagtgcattccagcctgggcaacagaggggactccgtctcaaaaaaaaaaa

SEQ ID NO: 9793 - DNA, 485 bp, Homo sapiens
ctgcttcccctcaccttatgccatgattgtagtttcttgaggcctccccatccatgcctcctgtacagctggtagaactgtgagtcaattaaacctcttttctccataaatttccccagtctcgggtatttctttatagcagtgtgagaatggaataatacacctttgggatactagacctaaaaatacttattcatcattttatttgatttacctgcaaatttcaacaatgttaactattccttcctcaaagtatcttcttcacatgccttatgtaatgtatcatcaccctctagtttttctccctttcttgatatctaattcaaaattatttccttctaccaagttaccaaaagattgatttcccaatatttgtcttagtgcttttctcatctcactctacagtttccatcaaactgttatcatctatatatattatctatgtcaaggtttctatcaatatctatatccagataactcacaat

SEQ ID NO: 9794 - DNA, 476 bp, Homo sapiens
ctagagaatataattaaacatgctaacatgttgctgtaatttcctaattctagctagtgttcttattttaataagcataagtgtgccttagtgcgagaagtcctggaaatggacttcacatcttgaacttaggatatttacatgtaactactagttgtaccagttacatgtggcttcagttgctaaactggggttctacagaagtcactaaatttttcccccttatcctcagttcagtttgctctaaagtgggaataaaaatatctccagttggtacttaagagaactaaatgaagtatgaaagtgcctttggtaagctagaaagcattatacagatgtcatccacttttaaaagggggttaagccattttcttaaatgagaatttttccagaaagggatatttttgccaaatttcagtttcttatacaaggcttcgctagtgttacatgtgcatttcttcccttaaatctttaaa

SEQ ID NO: 9795 - DNA, 547 bp, Homo sapiens
ttaaactcttaaaatttcattaaaaattgaggcttatttaaccttgatttctcattccccacccacttcaacttcattgtcttttaatagtggtttaaattttttttgaaaatcagtggagaaattatcatcaattggtaatgtacttttgtaagttctttctcatgactagaagcttacttcactgcaaaggtctttggttcttttctgtttatattagtgtcattttcacacttttatagaatgcagttagttggtttcactagtaatatttttcgttaagtatttgtttccactgggatcccttgtccttttcatcagtctgaatctcaagtttgcagtaagagaaggaagaccaaagaaaccaggccccttagttcaaaaggctggagagaacgttttctattactgtttccttcatccagggagaatagcacccagctgaactgtggttgggagcacacagacccacttctctacctcagtgcattatggcctctggggcaagttcagccagtgtctataggcagataaatggagcaagatt

SEQ ID NO: 9796 - DNA, 453 bp, Homo sapiens
tagctatgaatttaaatatttgattactttttgatatgccatttctaaattacctctaaaattaagaccaaaataataaatacacataatactaatgtttcagaaatgagctccaccattacttacagtgtgatcatacaaactaacaccttgtaataattagtcaccttttgtcaatatttatttgaatagccaacaacagcatagaggatgtgcattgactgctaagcctagaatgctagaaaaataaggaaaggctgcgcttcctttcctcggcgtgatctgtccacctgctatctgtggggaacttggctgctgagcgaatcgctctgttctatgtatagctttgttgatttacatagttctccaaaaggcacacacccagggttttgtttcaagtgaataatgttaacagacaaactgtctaataaacctgaaatgttctcccagggg

SEQ ID NO: 9797 - DNA, 607 bp, Homo sapiens
atttctaatggaacataggctagatgatgcagagagaggaattacaaagaaaccctcctgcacccacccccaagaatcagtgataacttttgtaaaactacggtattatagagaagtaggctgtgaatgtcaagtagaaagtgcagaagctttttccaatcactttactctaatattgccaaccaagacttgctctaaaaccataatacttgtgaagtctacaactgcatttaaattaggacatcttaaagaacaagccccaaaactggctacaagaacgtctttcctgccaggctttagtatacaaagccaacaaatgcctgctagagatacctagtagtgtgaaaatgttagcagcattgtaaacttcaatcctggcagcttagttttttttactcttatttgttgtgatttgaatttaataatacattttcttcagaaagcttaaatcctgtgtgttaaatttgttacagaaatggaaaaaaaaaaaaccttttgttaacatttttcttttctctctttccataaaccctccccctactccatttacatgcagaacactcatccagtctagtgtctaatatatctaggtggttgaaatccaagt

SEQ ID NO: 9798 - DNA, 1083 bp, Homo sapiens
gctaaagcctaaaagcaaaccctgacaaattcacaaaggggtggattggtgattgagtcctgccaaattagagggtcttgggaaatgctgtgggctttccatgaatccgttgtaataaaacataaaccagtccacataagtccaaagtgatcagacagtaattttactgcccactagaacaagattaattcacacaatcaatgacacatgttagccaggtcgatatttaagcaaaatacatctaagaacagctaacaaataactcttctcaaactcacatagagcattcagcaagatagaccacatgtgctgagccatcgttagtattttctgtcctttctctttgactcgtgtatagtgtgctcaaactcttaaaattatacactttaatgattatacactttcatgcatctcaattgcatgtaagttatatttcaatatatttgttaaaagtttataattaaaaaaactgtcctagcttgattcaagaaatcttttttatatttaagaaaatgtaatgttatgtattatcagggcaaaagagaaaaaccatatgattaccttgtcatacacagtaaaagcatttggcacaattgaaaacttttttcatgatttataaaaacaaaccccagaaaactctcagcatgataagaagagaaggcaacactttcaaccctattaagggtagatttgaaaaaaactcagaggtaacattatattaaatggcataggattgaatgcttttctattaaatcagagaaaaaagtagaatatctgttgttattctttcaattcagcattatactagagatctaaatcaatgcaataaagtaagaaaaataaataaaagtattgaaaagattgaaaagaaagaattgaagctgtctttattcacagataatgactgtgtatgttaataatcctagaaatctacaaaaatctgccaaaactaattagtgagtttggtaatgttgcagaatataagctcaatagaagtagtcttttgtatttctgtgtattagcaatgagcatttggaaaatgaaataaaaatacaatttcatttcaagtaacatctaaataca

SEQ ID NO: 9799 - DNA, 366 bp, Homo sapiens
gatgccatggcttcttccttgctcttttgcttggattatttctgagggaagccagctgccaagacactaaattgtgaggacattcagtcagccctctagatggggactgaggcctctaccaagagccatgtgggtgagccatccgagaaccacccttcagacccaggcaagccttcagatgactacagccatgactgacgtcttgactacaacctcatgagagtccctgagccaaaactgctcagctgagctgtttctgacttacagaaactatgagatgataagtgtttaacttttttttttccctgagatggagtctcattctgtcccccaggctggagtgcagtggtgcaatctcagctcact

SEQ ID NO: 9800 - DNA, 358 bp, Homo sapiens
taaagttagcacaaactccgaatgagtgaatcctaaagcgttgctcctggaggaaatacaggctgctggtcacaatatttttatcaactgatcaatatataccttgtcttatgtgtgtttctgcttcaagacactttatttaatatatacgttgattcattaactctgaactctctaggcaacagcattataactcctgccttcacaaagcttatctaacacacacatttcctcctcaggcacatcccagccttcttgcacttaggattcagcagtatgcttaagggccattttcaacagcaaactcatcagcgcaaacacaaacatgtgaaaaacgtagcactaaagagactgcaaa

SEQ ID NO: 9801 - DNA, 2793 bp, Homo sapiens
aggtaacagtattgactcactcaaagccttcgttaattgactacaggaagccttctgcattgaaatttgaggtggtccatatgccacaggacagaacagaagaaaatgaaatatttgttgacctagctctgaatgtcttgccaggcttatcaacctggcaatcagttataaaattaaatgatttttttgttgaaataagaggaactttaaaaatgatgtgtgagagctttatctacaatcagacgcttatgaagaagctacaggaaaccaactacgatgtaatgcttatagaccctgtgattccctgtggagacctgatggctgagttgcttgcagtcccttttgtgctcacacttagaatttctgtaggaggcaatatggagcgaagctgtgggaaacttccagctccactttcctatgtacctgtgcctatgacaggactaacagacagaatgacctttctggaaagagtaaaaaattcaatgctttcagttttgttccacttctggattcaggattacgactatcatttttgggaagagttttatagtaaggcattaggaaggcccactacattatgtgagactgtgggaaaagctgagatatggctaatacgaacatattgggattttgaatttcctcaaccataccaacctaactttgagtttgttggaggattgcactgtaaacctgccaaagctttgcctaaggaaatggaaaattttgtccagagttcaggggaagatggtattgtggtgttttctctggggtcactgtttcaaaatgttacagaagaaaaggctaatatcattgcttcagcccttgcccagatcccacagaaggtgttatggaggtacaaaggaaaaaaaccatccacattaggagccaatactcggctgtatgattggataccccagaatgatcttcttggtcatcccaaaaccaaagcttttatcactcatggtggaatgaatgggatctatgaagctatttaccatggggtccctatggtgggagttcccatatttggtgatcagcttgataacatagctcacatgaaggccaaaggagcagctgtagaaataaacttcaaaactatgacaagcgaagatttactgagggctttgagaacagtcattaccgattcctcttataaagagaatgctatgagattatcaagaattcaccatgatcaacctgtaaagcccctagatcgagcagtcttctggatcgagtttgtcatgcgccacaaaggagccaagcacctgcgatcagctgcccatgacctcacctggttccagcactactctatagatgtgattgggttcctgctggcctgtgtggcaactgctatattcttgttcacaaaatgttttttattttcctgtcaaaaatttaataaaactagaaagatagaaaagagggaatagatctttccaaattcaagaaagacctgatggggtaatcctgttaattccagccacatagaatttggtgaaaaccttgctattttcatattatctattctgttattttatcttagctatatagcctagaattccacgatcatgaggttgtgagtatatctcattctttcgttgtattttcctaggtgtctttactctcttctctcactttgtgacacaaggacatgaatacatctaaattttcctatttctgatatgactgttttgatgatgtcattacttctataaccttaagtgatagggtgacatgcaatatgattattcctggtgtgcgcccaaacacatggatataaagaggtaaaaaacttaaaattcacaaaattcagtaaaccacacaaatcaggtaagtgttctatgagattagctggctatgagaaacataatgatgtttctttttcaatttaaataagcccttctacatagccagcatcagtgatctcagaaaataaattgctaataatgatgacatggcattatgcttagaaaagtttgctgtatttccatagacctcatctagatgtcatggcctacatttctgccatcactcaaccaatacttttttctgttttcttgatgataaaaagacctttctcatgattgccatcaaataacaaaagaaactattttttttctcacatagagaacatgtcagtaagatattcaaggtgaacagattatttttgggattagtaactatttgaaatatgtggtgataattactgagtttataaaatttatttgatagtacacttaaagaagatttatatgtttattctttaaaaatgatgaatactcataattcttatctctataatcaaaagtataatttactgtagaaaaataaagagatgcttgttctgaaagtaagatcagtgaactgcttttcagtctcaatctttgagaattgtaaattcatcaaataattgcttacatagtaaaaatttaaggtattagaaaacctgcataacaaatagtattatatattaaatattttgatatgtaaagctctacacaaagctaaatatagtgtaataatgtttacactaataagcaaatatgttaatcttctcatttttttactgtcatataatcttagtgatatgcctattaatagttttaaataaataaattggcttatctggctttttgaaaattttgaaattcttacagatgttgattaggtatatctacaaattaatttcaattttaaaatgatgatataaaaataaatataagtatttttcttgtgtatgtatacaataaatataaataaaattgtttactgttttgaaagtttaaaaagttt

SEQ ID NO: 9802 - DNA, 2890 bp, Homo sapiens
aggtaacagtattgactcactcaaagccttcgttaattgactacaggaagccttctgcattgaaatttgaggtggtccatatgccacaggacagaacagaagaaaatgaaatatttgttgacctagctctgaatgtcttgccaggcttatcaacctggcaatcagttataaaattaaatgatttttttgttgaaataagaggaactttaaaaatgatgtgtgagagctttatctacaatcagacgcttatgaagaagctacaggaaaccaactacgatgtaatgcttatagaccctgtgattccctgtggagacctgatggctgagttgcttgcagtcccttttgtgctcacacttagaatttctgtaggaggcaatatggagcgaagctgtgggaaacttccagctccactttcctatgtacctgtgcctatgacaggactaacagacagaatgacctttctggaaagagtaaaaaattcaatgctttcagttttgttccacttctggattcaggattacgactatcatttttgggaagagttttatagtaaggcattaggaaggcccactacattatgtgagactgtgggaaaagctgagatatggctaatacgaacatattgggattttgaatttcctcaaccataccaacctaactttgagtttgttggaggattgcactgtaaacctgccaaagctttgcctaaggaaagttataccagaaaaccaagctctcttaagccatggcatctgtatctaaaatagaaatacagaaggagagctgacaatttccatcattctctaggaaatggaaaattttgtccagagttcaggggaagatggtattgtggtgttttctctggggtcactgtttcaaaatgttacagaagaaaaggctaatatcattgcttcagcccttgcccagatcccacagaaggtgttatggaggtacaaaggaaaaaaaccatccacattaggagccaatactcggctgtatgattggataccccagaatgatcttcttggtcatcccaaaaccaaagcttttatcactcatggtggaatgaatgggatctatgaagctatttaccatggggtccctatggtgggagttcccatatttggtgatcagcttgataacatagctcacatgaaggccaaaggagcagctgtagaaataaacttcaaaactatgacaagcgaagatttactgagggctttgagaacagtcattaccgattcctcttataaagagaatgctatgagattatcaagaattcaccatgatcaacctgtaaagcccctagatcgagcagtcttctggatcgagtttgtcatgcgccacaaaggagccaagcacctgcgatcagctgcccatgacctcacctggttccagcactactctatagatgtgattgggttcctgctggcctgtgtggcaactgctatattcttgttcacaaaatgttttttattttcctgtcaaaaatttaataaaactagaaagatagaaaagagggaatagatctttccaaattcaagaaagacctgatggggtaatcctgttaattccagccacatagaatttggtgaaaaccttgctattttcatattatctattctgttattttatcttagctatatagcctagaattccacgatcatgaggttgtgagtatatctcattctttcgttgtattttcctaggtgtctttactctcttctctcactttgtgacacaaggacatgaatacatctaaattttcctatttctgatatgactgttttgatgatgtcattacttctataaccttaagtgatagggtgacatgcaatatgattattcctggtgtgcgcccaaacacatggatataaagaggtaaaaaacttaaaattcacaaaattcagtaaaccacacaaatcaggtaagtgttctatgagattagctggctatgagaaacataatgatgtttctttttcaatttaaataagcccttctacatagccagcatcagtgatctcagaaaataaattgctaataatgatgacatggcattatgcttagaaaagtttgctgtatttccatagacctcatctagatgtcatggcctacatttctgccatcactcaaccaatacttttttctgttttcttgatgataaaaagacctttctcatgattgccatcaaataacaaaagaaactattttttttctcacatagagaacatgtcagtaagatattcaaggtgaacagattatttttgggattagtaactatttgaaatatgtggtgataattactgagtttataaaatttatttgatagtacacttaaagaagatttatatgtttattctttaaaaatgatgaatactcataattcttatctctataatcaaaagtataatttactgtagaaaaataaagagatgcttgttctgaaagtaagatcagtgaactgcttttcagtctcaatctttgagaattgtaaattcatcaaataattgcttacatagtaaaaatttaaggtattagaaaacctgcataacaaatagtattatatattaaatattttgatatgtaaagctctacacaaagctaaatatagtgtaataatgtttacactaataagcaaatatgttaatcttctcatttttttactgtcatataatcttagtgatatgcctattaatagttttaaataaataaattggcttatctggctttttgaaaattttgaaattcttacagatgttgattaggtatatctacaaattaatttcaattttaaaatgatgatataaaaataaatataagtatttttcttgtgtatgtatacaataaatataaataaaattgtttactgttttgaaagtttaaaaagttt

SEQ ID NO: 9803 - DNA, 423 bp, Homo sapiens
ccagtgacatttcatacaatggaagctgaggcagcctgggcccctaactaaggacaaaatggttcaagggccccaccaacctaggatgaacatgaagtatcgataaggataaactgttactgttttaattccctgagattttgagattattaacacagcccaacatgtcacaccatggcacatgtatactgtaaaatacaatgtagtcactacaaataataaacttgctgtgaatatacacatgagaaggggtgtcactgatatttgaccaagctaagaaggcaagctgtaggccgggcacggtggctcacgcctgtaatcccagcactttgggaggccgcggtgggtggatcacaaggtcaggagattgagaccatcctgactaacacagtgaaaccctgtctctactaaaaaacacaaaaa

SEQ ID NO: 9804 - DNA, 309 bp, Homo sapiens
gtttccctgttgctcaaacccctaggaggagcatgcagacgggcaggtgcagaggccgtggggagcgcttctgggctctgacctcacggcagcgtctagggatggctgtctgtgactcccgaatccctagtgggcgtctcttacagtgtgctctttcagctttgccgtctgcagaaggattatgttaatcagctcgatagaccctctgccttattgcaagggcagtggccagtttaacagctttctgtatcccaagttcttgcccagtgtacaagaagaatcggatgacacgtgggcttgaaggatgag

SEQ ID NO: 9805 - DNA, 369 bp, Homo sapiens
tacccttatcttatttgttatttttttttctgggttctccatttcttgtcactgccctgagccctgggtttgtcttagcagtttggactatctacaggttaagatcagaggtgccttttctctgtgagtacgagtggggctgcagtagaagcgggggagagcttgcggaaccccaagctctctgcttcatgctactgcatttttctttactaggttctgttgagtcgggaagcagatcaaggtcaagttagtcctcacccttcctaacgcgttttctaaggttcttctgcatacttaaaaaagttcgggacctaagtagttaccgggaccccaagagctacgaggtttaggcctgccttcttcaaggcg

SEQ ID NO: 9806 - DNA, 433 bp, Homo sapiens
ctattttaaaaatatatatatgtatagtagctgtccaggcgttaccatggtaggagataagttgcaggcagaaatcagtgaatatggtggtcattgtgccagtcattacatcactttataaagcgatgttggtaactgagctgcaatagaaatttcgggagagaataagaaatatgaaagactgtactacagattctaggaaaggtaagaggaaaggagcctcttcatcatgttttgtagaataaatgttaccattgttcatttaaaacctaggatagagaaatcatgtgccagatgtcataatctgtatggttctttcctgtggattactgataaaaatgttatggggaatgcatttggggcaggagtaagttaatgaaaagaatttgggaatactgaacttggtataaaaaatatgtattatagatgtctc

SEQ ID NO: 9807 - DNA, 330 bp, Homo sapiens
aatagctttatcatgaggttgctccctcaaaggtgcttctctgaatagcctgtttcacatattagttgcattgccctgcatttgacacttaactcgttgtaccttttgtcatcaatgaaatgggatacaattttcttaacagcctccttttaaatataaggagactgaggcccaagacagttgaggaactggtccgggctcctacagcaaattgtaaggcagggatttaaaccaaggtaatgtggtctcagaattcctgtcttaacagttctgctgagctacccatctggcatttcttcacgtgcctggtccctggaggcttggccctta

SEQ ID NO: 9808 - DNA, 162 bp, Homo sapiens
atctgaataatatccctttttattcaactgattagtaactttaatgccatctgcaaaaatttcgtttgccatataacattatcttagtccattttgtgttgttataacagaatacctaaagctgggcaattcataaagaaaagaggtttaattggcttatga

SEQ ID NO: 9809 - DNA, 420 bp, Homo sapiens
ggatgaatttttagattatttcatctttggctatataaacaaggccttcagtgaatagccctgaatttatttatttgtatatgtgtgggtatcctatagaataaattttccaaaaaatattttgcctgactgaaatttgaaatttgacagctactgcccaaattgtcccctaaagtgcatgcacccaattgatccttcccacaaaaggcataagagaatgcctgttttcctgcatccttcccaaccctgcaatattataggattgtaggccctctgtgtccaatcatttgtcctgtgcacagagcaaataggaataatgactggtaaaaaacccttaacctcacaaagcataagggacacagacataaaaacagaaattatagtgcaatgtgggaagtgttctgctaggaaaaaaaaaaa

SEQ ID NO: 9810 - DNA, 358 bp, Homo sapiens
ttaagtgtgcgatttattctagtaaggctggattgggagacccagaggctgagatgagtctgtttccaatctctttccctccaatgtaggccttgactgatgcagccagtcatttgaaggcatggggcctaccttccactcctttgtgagctatcaggagactagttctgtcatcagagaaagggagcatctactccagccctcccaggctagaacacaggaaaagggggagagttcccttacatcatcctaataaaggttagtccaattctggattgccctctgacattagcacactagcaacatgtgaggtttcgccattagccttgcatgtttgtgtccacttttattgattttt

SEQ ID NO: 9811 - DNA, 431 bp, Homo sapiens
cccgaaatttgcctggggaaagcaagtgctttttcccccggagtgagaaggatgggggggcggaggggttgtgttgccgagcagcgcttagagagagatccccctccagggacacccgcctcgcccgtgatctcggtctctcctcgtagcagctgggcgcggtacagtgaggaacttcacgcgcctcagcaggacacggtaagaagcctgtaacacaccagacaccgagcctctaacgcagggcgcaggcacagcgcgcacagcctggggtcccgcgcttggtcgccgaccatgtcactccagaagggagacaaacttgcaggcttcagacaagacgggctcaaagtagttggagctgcctacgccgcgtcccgagaacagtgggtgcctccgaggctcgggcgcttccaagtgaacacaccaaggggagg

SEQ ID NO: 9812 - DNA, 674 bp, Homo sapiens
atttcagataaacagatgatttaagtatgttccatgcatactaaggacatcctgcatttttatttgctaaatctggcaaccctctagaatctagtcttctaggtcattctagtccaaccttcaagttaacagatcgggagaacttgagacatgttaaatgtacttctcacagccagtcactgccaacatcaggattccaacctggtctgcctgactccacgttgtgtgcctggtatcccactaggagccccaaactgtcacctgctggatgggtgggagggtaccgagccccagtaggtaggaggggtccaggaagcagaaattcctggaggctgcactggacaccgattacatctgtgggcgattagcacacgagccttcagataattgcttttgctttaagctgaagtttcccttttccttctgattgcaaagatcacaggaggttcagaaaatacagaaaagcccaaagaaaagaaaaataaccacaacaagtagctggctggacctgtcttgagaaccaaaattcactgctcatcctcattaggttttatacctttcttaccaagaaagtgctgttaacttcttaaaagctaaaaaagcaaaagctgctcagagtaaaaaccctgtgttcttcatttcagggacagggaaggcttgttttgagaaatgca

SEQ ID NO: 9813 - DNA, 857 bp, Homo sapiens
gtgactggcttccctgcctcccttttcaaccattctcaggcaagcagatttgacttgatcccatcatgtccctgcatacaagccttcagtagaatctaccaatatcagaataaagtccaaaatctttaacctgtggcctcccagggttttgggtatcggcttctccttgcctctcatctccgccatccttttcctgctctatacttcggccaggctgctaccctctcccctccaagcctgtgcacattctgtctgggacccttttcccagcagtgcctcctgaatagatgcgatggggatttgtcacctaaagtttcacgtggggcagttctcctacccagcatacagcatattcttcactgcattttcaatacctgttgcttttctgtatttgtcgtaagatgataaaagctctatgacaggagactgtcttatttctcctattgtttttttcagtaagtaccttgaatggcagattactttaaaaattataaaatggcaaatttgtttttataattagaaacctgctgtttaaaaacaaaaactagccaagcaggcatttgcctataatcccagctactctgggggctgaggcaggaggactgcttgagcccacaagtttgggtcagtttgggcaacatagtgaaacctcctctctaaacaaactaaaaaccaaaaattaaagctacttaaaggaaaccacatgattctgtcagtaacatacactgataaatctaacactaatcaatcttttttagttgataatgggttaataggaaaacttttacttaggaagacctacttcaaaataacctagatgctcgtctataccagcagacccaatcagacatagtagc

SEQ ID NO: 9814 - DNA, 790 bp, Homo sapiens
aaaattagcctggcttggtggcgcatgcctgtaatcccagctactcgggaggccaaggcaggagaatcgcttgaacccggggggaggaggttgcagtgagccgagatcgcgccattgcactccagcccgtggcaagagcgaaactccgtctcccccgacccccccgcttccccaaagagttacgtgacgccacttgatatgtgtgtgtgtgaccttggtcaagatcctaccttttgtgagcctgtttcctctgaggaacgtgataattgcctttactttgctgtgttgtcaggaattaagagataatggatgtaatagtctcactgtagtaggcgctctgttaacgatattttctccaaacgtttttgtcttttgtggttcagatccacaactgctggatttactagtctcaagcacttcagttgccactttttacaaaattattttgatttataccttattaggaaggaaaatattttatctcattgtttagaggatgagaggtggaatgtttgcttcgcgtgtgacagtattgctaagtttagaagtgaatttcagttcattgacttagaaaaagaacttgagattatctaggaaagttgaaaacgacccagcaattcctccctaagctttataccctagactgtaatgcctagagaaatccttgcacaggtaccccaggatccttgtacagaaaagtttatataccagcattcgtgctaacaggatattggaaacaacgcaaatgtctccataaattgtgggtattcgtacaattgaatcagccgtg

SEQ ID NO: 9815 - DNA, 312 bp, Homo sapiens
acttttactctgactagcattgtatgggagcttccctgagtgaatgctgcctttgaagtggggtcagagactgaggaccaaggggcacagagaaagaagagtgtggtcctcgatgggaggacccatcacaaaccgtcttgcacagtgtaaaccctggagaggggctgaagaaaccactgcagcccggggccgcccattctacctggcccatggtaggcactcaagaaatggtttgctacgtgaataaacaaatccacaaacatatatttctgaattcctatcatgcgtcaaacacaagagatagggagagag

SEQ ID NO: 9816 - DNA, 566 bp, Homo sapiens
ttatatcaatactctgagacttcaatattctttctttttttatgtaaaatggagatactacaaaaaaagatcagccccagcctatcttctccttttaaaattcctcacacaagtaaaattctggtgtctaaatcatgactggacgaatccaaagaaatcagaaaattatcaagacaccagctaatttcttcacaaggtagcacaagtatgaagctaataaaaagtcatgtaacaattattgatacagatatagccatctaaccttcaaatagacctataaaaagttaacttttatacaatgaataacacatctacttaatactcaaaatattgcccctacctttccatcccttctaattttgagtcatttatttggtttagtatcttacatctctctaaaaacagcttagaaaacaaaaacttccataagacaaggaagtaagatatagtaagtgattattaaatacttacttaatatttaataagtaagtgcttgcatatagaaaatcatgaaaaaggcccaaagtaatagtttctggtgccaaagagaaggaaatagattaacc

SEQ ID NO: 9817 - DNA, 473 bp, Homo sapiens
  misc_feature (15)..(15): n is a, c, g, or t
  misc_feature (37)..(37): n is a, c, g, or t
  misc_feature (87)..(87): n is a, c, g, or t
ctttaagtgtataanaatggaagggatagagttaaangaattggtgaaaatgatggcgaagtcagtcatgctattaaaggagtgccnagagagttcctcggggctgctaatacgtagatcacctaaacactcattcctctaacgcagagcacttcaaagatgagtagcacagaactctctcgttatctaatggagttggtgtaatgcaggccattgcaaccactaaaagttagctttgcatcctccaggcctccagaagtgtatataaattgaaagcttgaagaatctctctctggccttatcaaccctgctgtgaccttatatgaggtccataggaatttatattaatttgataatgactctgcaaacattagaagttcaattatgctcttttcctaaattcctattaattatatataactacgagtgttttattactgtatattaccatattagatatcattccatagata

SEQ ID NO: 9818 - DNA, 264 bp, Homo sapiens
ccactgtcacaaacactatctaaacgtcatacctgatctaaccaatctgtgaaccctatgtaaatcagacacggcttcctcaaacctgactggtcttttgtgatagcagtttgacttgaatggttttgtttttacaatctgttttaacgaagaaatgtgaacagtgattattaggattgataaattttgtgtttggggaacaggtgcacctgttccccaaacacccaccacccctggctaatttttgtgtttggggaacaggta

SEQ ID NO: 9819 - DNA, 566 bp, Homo sapiens
tgagaagtaaatgtaacgtcctgagtatctgtcagaaaaaatactaatgaatacgatcaatcttatgagctgccccaaaattgtttcagtatgttaacaattggattacagtaaagaacaagttgttaaagtatacttatattggctggaaacattgcatcatcagaccttgatgaattttccacttgtttcaatctattttggttttcattttatcacctattgctaaaagtttcactgtgttaagtttcagacaacatgaatgttaacacaggttttaggcgaatattggcatgccagagccgttatcatgcagcaagtgctaagctcccttactcatggagtgtttcagcggttagctttgacaaaattagtttctccaaaaccagaaagacacttttgtgatagcagtttgacttgaatggttttgtttttacaatctgttttaacgaagaaatgtgaacagtgattattaggattgataaattttgtgtttggggaacaggtgcacctgttccccaaacacccaccacccctggctaatttttgtgtttggggaacaggta

SEQ ID NO: 9820 - DNA, 453 bp, Homo sapiens
ctgaggcaggagaatcatttgaacctgggagacggaggttgcagtgagccgagatcacgccactgcactccagcctggtgacagcgagattctgtctcaaaaaacaaaaaagtatttagggtaaaaaacaaggatatactttttgctatgaaatatatcttatggccaggcgtggtggctcatgcctgtaatcccagcactttgggaggccgaggcgggtggatcacctgaggtcaggagttcgagaccagcctggccaacatggtgaaaccccgtctccactaaaagtacaaaaattagccaggtggtggtacacacctgtaatcccagctacttgggaggctgaggcaggagaatcacttgaacccaggaggcaaagttttcagtgagctgagattgggccactgcactccagcctgggtgatggagtaagactccgtctcaaaaaaaaaa

SEQ ID NO: 9821 - DNA, 430 bp, Homo sapiens
cattctcacttacacttatcatcgtttgtctttttatttaggcctcctaatgggtatggagtggtatctcattgtggttttgatttttatttccctaaaggctaatgatgttgagcatcttttcatatgcttattagccatttgtatatcttctttggaggaatgtctactcagatcctttattcatttttgaattgagtttgtctttctattattgacttataagagtttttgggccaggtgcggtggcttacacctataaaaccagcactttgagagaccaaggcagaaagatcgcttgagcccaggagtttgaaaccagcctgggcaacatggcaaaatcccatctctacaaaaagttaaaaaattaaccaggcatgatagtacgcacctgtggtcccagctacttgggaggctgagctgagagggt

SEQ ID NO: 9822 - DNA, 286 bp, Homo sapiens
tttatcaccccgtggggtaggtacctcatcgccccaggaggaaaccgtggcacacagggaagcgcctagcaagtgaagtggtagagctgggatctgggctgtcaccctccagcgcctgtgtgaactgtgctttctcaataaacattcacgccacacccagataggaagtgcctgatctgagccagtcctgtcctaggcacctgggagggcagaaaatatccttgccctcatgcacctgagctcacattccagtggagctgactaagtatgaactccgtgtatagtt

SEQ ID NO: 9823 - DNA, 334 bp, Homo sapiens
taaactgcctattcaaatcctcgtcgacccattttctatttggagttctttgtacattaagcctattaactttccaatacatttgctgcacatttttgtagtccatgatttatcttgttattgcttatgtaatcttttcatatataaaaatctttaatatttgtgtaatcaaatgtttttttcctttatgattcctagtgtttcttgttctgcttaaaaaggtcttttccatcgcaaagttctacaaatatatgcctagattttcttcctatatttttattgttttgtttggatttttatgtaattaaaattattttgtttagcagatccaatg

SEQ ID NO: 9824 - DNA, 882 bp, Homo sapiens
cttggcctcccaaagtgctgggattacaggcatgagccgccacgcccggctaatttttggtatttgtagtagaaacggggtttcaccatgttagccaggctgggtgcgaactcctgacctcaggtagtccacccgccttggcctcccaaagtgctgggattacaggcgtgagccaccgcagtccggccctaatatagtttttaaattcattcattccaaggcttttgggaggcgctcagtggcgtgcagtttcctctcgaatttctttcttcccgcagtctttctgggcgggcgtctcccgtctgtttcttcccatcttcccccttatcatcctgggactggataattcttgaatagtctgggaggtagcagggaacccgagttcggagcctcgaccagaacctccagacgggaaattggagcaggtggtgtcgttccaggacgctgaggaccacctcctcccctaacgcacagcccaacgatcctaaaagtaaaaaccctgagtttctgagtcaagactgagctggtggggtggggaccgagtaggcgtggatggggagcccagcggtccccagcggagaaaatgggtgagacgcctggggccgcggtctccagaattcgcctgggagggagagtggcgctacggcgcgccttcctggggagccgcttcgggctccggattgtccgctggggcccgacgcttgggtcccgacgcgcggttcgcactttccaggtttcttccccagggaacagagcttgagcggggggccacccccccgtcctaccggagttctgaggtgcggtcaggcgcggagagcggacgcccagcgccagattctgtgggctccggagttcaggcccactgagccgcagctgagcaca

SEQ ID NO: 9825 - DNA, 1300 bp, Homo sapiens
ttcgaagatgatgggatccccaaatcagctagcagccccacagccctcccgccttcctcccctctctccacgcctcccccaggccggcgatgccgtcagggcccgtgtctgaggcgtccggtggattcagcagaacaaacatcataaaaagattatttgcgagaggagaagacgatgctgtgagaacttggtcccagagaccgtctcagagcagcagaaaaaccgcaggaaacctaaggagcacgaccctgacggcgacggagggggtgcgcgcggacagcactgtcacctcccgccgacgccagggctcaaatcggaacgaagactgggcggccacaaatgccggcttctcctttctttcgctgaggcggagaaatcgcccagcggtgcccggcgcgcctcccgcggaaagcgggcggtgaccattccgacaggccgtccgcagcgctccctttccgcagacaaagctgcctcgaaaggcgctccgcggctcccgagtcaccacgttccattcggcagaagaaagcgaaagcggccgctccctgtcaggcagccagacaatagcggcgggcaggccgctccacgccagcatctttgtttccctcgcgccgggaaacgaagtctccggataccacagaaaccagaagccgataccacagaaaccagaggccgctcttcccgctcggacgtttacagcgggcgggagcgtggcggccacctccgtcttggggaagcggcaggttgagccccgcaccttgctgtgccctctagagcgagcggaggaagcaggcgaaaagctgctgcgagatgttgcggccttgcagacgtctcagctcctcccggcacggcggcctggtaaggcgggaagtagcgccggccccgcgcggaaggaaacgtgcagcgcgatgcggcttagcgcggctttatagagccgaggctttatagagccgcgccccggcgacccctgcggtgactgctgtcggtccgcgttgtgtgtgttctctgtttcggcctccgctgcccgctgcggccttgcccctgcgcctcggagtagccgccgcgggcctgtctgctggagcaaggagacccggaggccgtcccaggggcgagggggtagcggccccggcctcttgggccctcggcctcgcgcccaccgagccctctgcccgggtttggttgggtgtggagcttgcgacgcgcccacttcctgggctgtgcttctgcccgagctgatgcctcgccgcgacgccaggccctatcttgacagcgggtgccagcaggtccaggcctactgacgggc

SEQ ID NO: 9826 - DNA, 490 bp, Homo sapiens
tggtgataatgagaatttgcaccaaaaacaaacaaacaaaaaaatgaaacaaacaaacaaaaaagcttctgaccagtaatttttaaataaaaacttaaatttgaaattcaggaatatagaacagattaaatgtacaaaaaagcaggaaggtttttgtaatatactcatcatgtacatcaggagtgtctaaccttctggctttcctgggtcacattgaaagaattgtcttgggccacacataaaacacactaacacaactgctgatgagattaaaaaaaaaatcgcaaaaaaaaaaacccctcataatgttttaccaaagtttacgaatttgtgttgggccacattcaaagcttccctgggccacatgcagcctgcggcccactggttagagaagcttgatttacatgataacaaagtgacactgaaagaaaacatattgaaatccaaaatgctgaaggagtgagtgcagacccttaaatcacagctgcac

SEQ ID NO: 9827 - DNA, 322 bp, Homo sapiens
ccgtgttgggttagacacaggagcctgctgtcctgagtcttggcggggtgagtttgggcagtggcagtcaggggaatgtgcgtccacttccaaacacagtgtatgcaggatggttggaatgaataaaggggctctggggccagacactctggagtggatttgtggctctgtgtgatctaggcccatttgttacctctctaagtttcaatttcttcatctgtaaacaaagaagagtaccagcagctactgcagtagagaagctgtgagtattacatagacaatgcatgtaaaaccacttagtgcagtgccgggtgtatcaaaa

SEQ ID NO: 9828 - DNA, 338 bp, Homo sapiens
atccattattaacaaattaactttgcattccactgtatgtgaagagctgatttctgtgagcacaacatgaactttgttatctgatatgattaggctttgtgtacccacccaaatctcatcttgaattatattccccagctgttgagaagaggcctggtgggaggtgactgaatcatatgggtgattttccccagtgctattctcatgatagtgagagggttctcacaagatctgatggttttataaatggcagtttcccctggacttctctctctctctctcacctgctgccatgtgagatgtgcctgcttccccttctgccatgattgtaagtttcc

SEQ ID NO: 9829 - DNA, 408 bp, Homo sapiens
aaagataagaatttttaccaagtttagctctcctggatctctacctggagtacctgatggagaatggaaggtaaacatttctctttatccctttctccctaaattcaggttggcaggagaaaatcatttgtttaggttgtgactcttgtgtaagtttggtttggaagacctatttataattatctttctccttttcatgggcagttatttctttcctgtctgtcttgttttgtgtcctgagatcttagcttggcctgctgcctgtcggggtcatgcaggttgttgggtcatgcagatggtcaactgaaagaggttgaggcccacatataaaactaacatatcaacttgccagctctaaaaacattgtctaaatatttctcttttttaacttttattttaagtttgggg

SEQ ID NO: 9830 - DNA, 1691 bp, Homo sapiens
cacaactgcttccagccggacggagctcggccggctgcgccggggcctgtcccaggtctgcagtggggaacctgccgggccacgttggtggggcctgggccgcaccttcggtcagtgtggaggcccggtggctctggcccgactgggtggcgggtgtgggggcaggctggggcctgggggaggggcgaggtgccgtgggtggcggccgaggaggcatgaaattgctgcagatgcttcttcgggggaatccctgctgcccgcagcctgagatcagcccgcaaggtcagctcggtgcccttccttggagctgccggccaccagcagagcctaccctcttcatggaaagcctcgtgcagtggccccctggtgatggcatccgacagtgatgtgaagatgctgctgaacttcgtgaacctggcgtccagcgacatcaaggcagccctggataagtccgcaccctgccgccgctccgtggaccatcgcaagtacctgcagaagcagctcaagcgcttctcccagaagtattcccggctcccgcggggccttcctggcagagctgctgagccctacctgaaaagggggtctgaggaccggcccaggaggctgctcctggatttgggccctgattccagccccggcgggggtgggggctgcaaggagaaggtgctgaggaacccctacagggaggaatgtcttgctaaggagcagctcccacagaggcagcatccagaagctgcccagcctggccaggtgcccatgaggaaaagacagctgcccgcttccttctgggaagagccaaggcccacccacagctaccatgtggggctggaggggggactgggccccagggagggacctccctatgagggtaagaaaaattgcaagggcttggagcccctgggacctgagactaccctggtgtccatgtctccaagggccctggctgaaaaggagccgtcaagatgcctggggtctccttggtgggccgcgtcaatgcctggagttgctgccccttccagtaccatggacagcccatctatccgggccccctgggggcactgcctcagagtcctgtccccagcctgggcctttggaggaagagcccagcctttcccggggagctggcgcacctctgcaaggatgtggacggcctggggcagaaggtgtgcaggcccgtggtgctgaaacccatccccaccaagccagccgtgcccccacccatcttcaatgtctttggctacctctagccacgcggagagggcctcagcccccacctctggcctgcaggagtgtcgaggtccccgaggcgctctcctgtgaggaggtggctgggccacagtgtggcctcttccgtttgtgtgcgcatgggagtggagggcaggattggggcagggctcctcaggcagtgacccttcagccttgcagccttggaagctgggaggctggacctggttggcccctccccaggcaggccagggcccagcagcttgtcccgctgtccctgtgcagaccataggtactgggatgttgcccttccttgccttgcagtcaccccagaagccagagagacgcatctgtttacctgccacccactctgcgagccaatctcagttgttgttcttgttcttcttgttctttgtaaatattgagaaagttaaaagaataaagacatttcttttggagtttccata

SEQ ID NO: 9831 - DNA, 1477 bp, Homo sapiens
gacttttcattcctggttggtgcctgggagagtgacgaggcctatcagtactggaggacacagtcaaggtcagctcggtgcccttccttggagctgccggccaccagcagagcctaccctcttcatggaaagcctcgtgcagtggccccctggtgatggcatccgacagtgatgtgaagatgctgctgaacttcgtgaacctggcgtccagcgacatcaaggcagccctggataagtccgcaccctgccgccgctccgtggaccatcgcaagtacctgcagaagcagctcaagcgcttctcccagaagtattcccggctcccgcggggccttcctggcagagctgctgagccctacctgaaaagggggtctgaggaccggcccaggaggctgctcctggatttgggccctgattccagccccggcgggggtgggggctgcaaggagaaggtgctgaggaacccctacagggaggaatgtcttgctaaggagcagctcccacagaggcagcatccagaagctgcccagcctggccaggtgcccatgaggaaaagacagctgcccgcttccttctgggaagagccaaggcccacccacagctaccatgtggggctggaggggggactgggccccagggagggacctccctatgagggtaagaaaaattgcaagggcttggagcccctgggacctgagactaccctggtgtccatgtctccaagggccctggctgaaaaggagccgtcaagatgcctggggtctccttggtgggccgcgtcaatgcctggagttgctgccccttccagtaccatggacagcccatctatccgggccccctgggggcactgcctcagagtcctgtccccagcctgggcctttggaggaagagcccagcctttcccggggagctggcgcacctctgcaaggatgtggacggcctggggcagaaggtgtgcaggcccgtggtgctgaaacccatccccaccaagccagccgtgcccccacccatcttcaatgtctttggctacctctagccacgcggagagggcctcagcccccacctctggcctgcaggagtgtcgaggtccccgaggcgctctcctgtgaggaggtggctgggccacagtgtggcctcttccgtttgtgtgcgcatgggagtggagggcaggattggggcagggctcctcaggcagtgacccttcagccttgcagccttggaagctgggaggctggacctggttggcccctccccaggcaggccagggcccagcagcttgtcccgctgtccctgtgcagaccataggtactgggatgttgcccttccttgccttgcagtcaccccagaagccagagagacgcatctgtttacctgccacccactctgcgagccaatctcagttgttgttcttgttcttcttgttctttgtaaatattgagaaagttaaaagaataaagacatttcttttggagtttccata

SEQ ID NO: 9832 - DNA, 1519 bp, Homo sapiens
cacaactgcttccagccggacggagctcggccggctgcgccggggcctgtcccaggtctgcagtggggaacctgccgggccacgttggtggggcctgggccgcaccttcggtcagctcggtgcccttccttggagctgccggccaccagcagagcctaccctcttcatggaaagcctcgtgcagtggccccctggtgatggcatccgacagtgatgtgaagatgctgctgaacttcgtgaacctggcgtccagcgacatcaaggcagccctggataagtccgcaccctgccgccgctccgtggaccatcgcaagtacctgcagaagcagctcaagcgcttctcccagaagtattcccggctcccgcggggccttcctggcagagctgctgagccctacctgaaaagggggtctgaggaccggcccaggaggctgctcctggatttgggccctgattccagccccggcgggggtgggggctgcaaggagaaggtgctgaggaacccctacagggaggaatgtcttgctaaggagcagctcccacagaggcagcatccagaagctgcccagcctggccaggtgcccatgaggaaaagacagctgcccgcttccttctgggaagagccaaggcccacccacagctaccatgtggggctggaggggggactgggccccagggagggacctccctatgagggtaagaaaaattgcaagggcttggagcccctgggacctgagactaccctggtgtccatgtctccaagggccctggctgaaaaggagccgtcaagatgcctggggtctccttggtgggccgcgtcaatgcctggagttgctgccccttccagtaccatggacagcccatctatccgggccccctgggggcactgcctcagagtcctgtccccagcctgggcctttggaggaagagcccagcctttcccggggagctggcgcacctctgcaaggatgtggacggcctggggcagaaggtgtgcaggcccgtggtgctgaaacccatccccaccaagccagccgtgcccccacccatcttcaatgtctttggctacctctagccacgcggagagggcctcagcccccacctctggcctgcaggagtgtcgaggtccccgaggcgctctcctgtgaggaggtggctgggccacagtgtggcctcttccgtttgtgtgcgcatgggagtggagggcaggattggggcagggctcctcaggcagtgacccttcagccttgcagccttggaagctgggaggctggacctggttggcccctccccaggcaggccagggcccagcagcttgtcccgctgtccctgtgcagaccataggtactgggatgttgcccttccttgccttgcagtcaccccagaagccagagagacgcatctgtttacctgccacccactctgcgagccaatctcagttgttgttcttgttcttcttgttctttgtaaatattgagaaagttaaaagaataaagacatttcttttggagtttccata

SEQ ID NO: 9833 - DNA, 266 bp, Homo sapiens
ctcatgaaaaattgaaggatatattctagatgagtgtttggagaaatctgatggactcttgggaaagtaaattataaaattaaaacatatttttttttcagtaaagtgtaaaactggtcatcctccacctgaaagagaatactaaactttaaaccaaaatataaaaagaaagattgctagttgttttttatctaatcctttttggtgaaaatattagtttgaaaattgttatctaaggtccctgccatcatttggaaagtcaagtg

SEQ ID NO: 9834 - DNA, 454 bp, Homo sapiens
gccgggtgctggcatagaggaggagaggtggccataaatttcagagaatcttcccagcctcctctaatcccatgccaagaaatatgacagattctaggcccagagaggccaagaagatgaaaacatttctggcactttctaaagtttctgtccagaaaagccatcagctgaaggggcgcaggatgacaaatggctgccggatctgcaggttccgggttctgagacaggaaccctgccacatcatgtaaacaatcccggactagcctgctggaggaagatagactgtggaacagaattgagttccacaaggctccagagacatgagagaacccaactgagatcagcagagcagctacctcacccatggctgaccacagatgtatgagtgtgtccagaagaactttctggtggccccataggtttgtgaacaataataaatgcttatcattttacc

SEQ ID NO: 9835 - DNA, 483 bp, Homo sapiens
tcttgcttttgtctcccaggctggagtgcagtggcacaatctctgctcactgcaacctcggcttctcaggttcaagcgagtctcctggctcagccttcccagtagctgggattacaggcgcgtgccaccatgcccggactttggagtttgctgaaatgtaacctcagaataagtggggtatgactgccctctcctttgagggaaaagaaaaagtattttcaggccaggcacggtggctcatgcttataatcccagcactttgggaggctgaggtaccataaatatgaaaaggcaagatattggcaattcagtacaacttgtttgtgtccagaatacatcaataaaagaagaacaattcaagagaaacaggaaattcacagaagaggaaaccggaattgtcataaacaaatgaaaaatgctcaacttccctagtaattatgagaattcaaatcaaaataaagacttcatttcacacttataaga

SEQ ID NO: 9836 - DNA, 454 bp, Homo sapiens
ccctggaggcccctccagagagggacccggggccccgcccgcagctggagaaggggtgaatgcctttcctacctaacgcctggtccgcggccctgcttgttgcgtctccaagaccacgtgtctgctgcattttaaaaatagttgtgaacatctgactttctccttttactttggagtttgctgaaatgtaacctcagaataagtggggtatgactgccctctcctttgagggaaaagaaaaagtattttcaggccaggcacggtggctcatgcttataatcccagcactttgggaggctgagaatacatcaataaaagaagaacaattcaagagaaacaggaaattcacagaagaggaaaccggaattgtcataaacaaatgaaaaatgctcaacttccctagtaattatgagaattcaaatcaaaataaagacttcatttcacacttataaga

SEQ ID NO: 9837 - DNA, 439 bp, Homo sapiens
aaactagattccttcctcacatcgtacccaaagatagactccggatatattttttaaaactaaatataaaaagccaaactttaaaacttaaaaaaaatctgcaagcaaatacaaccatgaacttgaagggggtgggtttcttaaataagatgagaaggacatattttataaaggaaaatgttgatgaatttgactaccttgaaattttaaacttctttatgatgaaaggtaccataaatatgaaaaggcaagatattggcaattcagtacaacttgtttgtgtccagaatacatcaataaaagaagaacaattcaagagaaacaggaaattcacagaagaggaaaccggaattgtcataaacaaatgaaaaatgctcaacttccctagtaattatgagaattcaaatcaaaataaagacttcatttcacacttataaga

SEQ ID NO: 9838 - DNA, 437 bp, Homo sapiens
ttttttttttttgagacagagtcttctggttcttttgcccaggttgaagcacagtgacaccatcatagcacactgcagccttggcctcctaggctcaagcagtcctcctctcttggcctcccaaagtgctggaatacaggggtatgccaccatgtcaggctactttttatttttatttttttaagagacagtcttgatctgttgcccatgctggtctcgaactcctgggcttgaacattcctccctccttgacttcccaaagtgctgagattacagacatgggccaccatgcctggccttaatttgggtatcttctaattgatgtggactcttatgccctattcatttgtgttttgaagtgaactgactctgaatgtcagtgatagggcactgcttagtgttgggggtggttaggaagatatgcaagtttcttagag

SEQ ID NO: 9839 - DNA, 499 bp, Homo sapiens
gctgtggactggagccttagctggggccttagccagcaaatctatacctaccttccccatgtggcctgggcttcctcacaccatggtggctgggttccaagggcatgcgtcctgagagaggcaggtataagcaatatatcctgttatggcctagagtcatgaactacacagcattgcttccagcacattctgcacagaagtagtcacgaaggcccagccaatttcaaaaggagggaaaacagactctgccttttggttgggaagcagcagtgttctagaagaacacgtgggaccaagatgtggccattttgagaaattgtaatctgtcacaattttgtacaggtctgtcatcggctgtgacctaccctggggtggagggtggtggggggtgaatacaaacacccaggtgctttcggctgagaaaaggatctgcagtaactgaaaggttatcttcttaagatagtcactggtatggggtgttcataataaaggcatatag

SEQ ID NO: 9840 - DNA, 1002 bp, Homo sapiens
aatttttttttttttttgagaatgatgcccgctgcaaaacgaagtaacagaaggctggctctgaaacaccacacttcttggtcttaacgttaaaatgcttttctagagcagaagggaaaaagagttatcagtgctttcgtcccacaaaaatagttcctgtttcactaaattttaccactgcctttagaattagtaaatgaaaacgccaacttgtagaagcattaagttaatgcgatttagaaattaaatagtaaccggcctcatcacacagataaggttaggcttcttcagccaggggcaatttctgtcctaattgtcacagctgccttaatgctgtactttctgcgctgtagctgccaggaggcagataagatttttctctctgaattaattctgggaaaggtggcactttttataggccttaaatgacccttttctaagattttttgttggtggtgtccagatgttccaataatactggagagttaactattccttccaaacctgtgtcgttcaaactgccttgaggagaacgggaaaaaagtaaggttcacactcgaaaagtttcactcggggtggggtgaggacgaggtaggaaggaaacgacagtacgtatcgttcgtaactatcgtacaatacgtatcgtttccgaagctagaccggcagctggcacagtctttcccctttccaggtcctggggagaaacgtctctcgctgagggggctagacacctacgacagcctcctcctcgggaatcaacacagctctggatcgtgacacgcttccagaagtccgtgacgagtgggggcagaagacaggttcttcgcttccccttcacccaaacacgtcccaaattgttcgaggcaggaagagcacgcctctctcatctccccaagacctactctcgctcagctccctcgccctgtttcctctgggggcaccgccaccccgctcgggactcccgcctctggccacagcagccccggagcggcaagggggaag

SEQ ID NO: 9841 - DNA, 436 bp, Homo sapiens
tcttattttcaaggaagcaatatctgctatacatttaacagccagctgatggcctagtgtatacctagtactcaatactttttgttaaactattgaaacaaagaaaaaatgaatgaatttagcagtaatgtagatcatcttttcccttaggcttgggaaaccaaacctaaacattagcaatcattaataataacctgtaggccaataggcccagagaatgaaaaaatccgtagggatgtttttaataagaatgttaacaaaaggttaaccttatgttgaaagatactttatataattttaaacctctataattcataaatcgttttataaaatccagagactctcaaaaatatctgtaatataatagctacctagggcatgtttgtaccctttggattgctactgaaggtttaagatagctatatacctatacacc

SEQ ID NO: 9842 - DNA, 458 bp, Homo sapiens
cctgggttcaagtgattctcctgcctcagcctcctgagtagctgggatcacaggcacgtgccaccatgcccagctaatttttttgtatttttagtagagacggggtttcatcatgttggccaggatggtctcaaactcctaacttcaggtgatccacccacctcggcctcccaaagcacagggattacaggtgtgagacactgcgactggcccattattccttttttggatggcaatgtgcttttaaagaaaacaggcagtttagaaacagatttcatctgttagtaatgcttccttttttgattgtggcaggaaactcctttatctttttatgttttagttccttcttcagcttttccaatcatattgtttctttttgctcctttatgaggccttttgtcttgcctttaggacctaatggattcaggttatgaagccactttttctgtatacttcct

SEQ ID NO: 9843 - DNA, 413 bp, Homo sapiens
cgtggccgcactatctaatctttaaagagacaaaaatattcttccaaaaatggttgtcgtaagtgttcttgtatataatccttcttccagtgatcaaatttgagctgaaaaaattgttggtaatatttaatttgctgaggcaaaacaaatcattcatggtttgtcaatttgtatttattttacaaagaacagtaaatgttccatctggcagtactaaaatgcttatttaccaggttactcaaaggttattctacctaaactgagagcaagctggccatataaataaatggtgaaaaatacaacaatgttacctagaaacctaaaaaaccttaaaaagtcaaagctttttcaaggaaagaagttaaatcttaaaaataaaattaaggtaaaatgcctttttaaggggaggtttt

SEQ ID NO: 9844 - DNA, 993 bp, Homo sapiens
gtagagctcagcagaaagtggctgttctactgagttaaaaagttagaggttagaatttggggcttccacagtagcaggagattgggaaggagggaatctcgcaaaggagggagtctcagatggggagctcccaaatctgtgtacaaacttctctgattcctaaactgtgcatctgggtgaggttcaaggagctgagggaaaaataacggctggaaggctaaaaaggtgttgtcttgtgttgagcagatggtgcttagggtttagttctcaccaagttagaggactctggagaacacctaaagctttctactgagactacagaaggagtaatgattactccccaggactaaagcctatgtcctaggaataaaggcaaaaccaagataggcccaccctgacaaagcctaaaaccaactcttcatagccgcattatgcaatatagtaacttctaggcacacatggcatttcaaatttaattaaaactaagtaaaatttaacatgtagttcctcagacacactagccacatttcaaatgttcacagacacatgtagttaatggctatgatactggactgcacagactacagaatatttctatcatcatggaagttctattgaatggcattgctctataggatcaagactatgctagtaatttaactgcttgatagaacaaatgtcaaatttcttctaaggaagatagtagactccaaagtctttttaatatcatccaaaatgctcagcatacaatttttaaaaattactaattgtgcaaagaatcaggaaaatgtaacctacagtgaagagaaacaacaggtgataaacatagactcacaagtgacccagatgttagaattacaaaagacttaataactataataagttaaagagtctataggaaaatatatctgtagtagctgaagagatggaaaattttaagagagctatggaaactttaaaaaagaaccgaatggaaatcctgaaactgaaaga

SEQ ID NO: 9845 - DNA, 795 bp, Homo sapiens
cggtacccagttcgacggagactctcaaaacagttcaccattcatataaaggttgaaaacaacaaattgagaatgaatactggtgaactgttttgggaggctttttcaaaatttgtgctttgctattgtattcattttctactgctctgtaacaaattaccacaaatttagcagcataaaataatactcatttacagctatgtctaggttctccgctcagggaatcacaaggctagaaatcaagattttggccaggctgagttctcatctggagtctctgggaagaaatctacttccaacttcattcagattattgggaaaatccagttccttgtgactggatgactgaggtctccattttcttgctggctgtcagccagcaatcactctaagcttctagaggccacccacatgccttctcatgttgcccctccatcttcaagccagcagtgatgcgctgagttcttctcatgctttgaatatctgacttcttctgcagccagctggaagaatatatacttttaaagggctcacttgattaggtcaggcccacccaggataacctttgttttgccatataatgtaacattcataggagtgatggcccatcacattcagttttcactcccactcaaggaaaggagattatacaaaggcatccatcatgtggggacaattagcttagaattctttataatgtagctctcacatgacaggttttctacttagtaccttttatggcatcaatgtaaatttaagctgtaaataaaaaacaaatatgtgaaaaaaaaacta

SEQ ID NO: 9846 - DNA, 780 bp, Homo sapiens
agcggggacttaggcaaggggtccaggtcagagtttagagctttcaaatcccaacttgcccctggggattgcgcggctgatgtttagaacgcctagtcaagccaaccggctcgctcttgtttcagcaaaccctgacttacgtctcctatttgacttgaggcggcacagtggccaagtcgattggccgtggcaagtgaccctccctgtggctgaagtgttctgaggactggcgagagaggcgcgccatgcttgccccctgctcaggttgggagcttggctgcttccgtctctgtctccgtcaggtccgactgtgggctggcgctgggcgctgggcttgctgggcttgccaagccaggccgtacagctcaggtgggagcgagcgctggcccggatcggagactgaggtccctccgcctggcccggcgcgccgaactctgaaggagtggacactgcaggtgagcccgtttggtcggctgcgggcgcggctcccgtgccacctggccgtgaggcccctggaccccctcacctacccggatggcgaccgcgtgctggtcgcggtgtgcggcgtggagggcggcgtgcggggcctggacggcctgcaggtgaagtacgacgaggatctggaggagatggccattgtgtctgatactatccacccccaggcgtccgtggaggtgaacgcgcccctgaagtttggcaagtgaagtgaagtgaaaacgggtttgggtcccagggaacgcacagtgaacttaataaatgtggtcgacgtgcacttttaat

SEQ ID NO: 9847 - DNA, 1007 bp, Homo sapiens
agcggggacttaggcaaggggtccaggtcagagtttagagctttcaaatcccaacttgcccctggggattgcgcggctgatgtttagaacgcctagtcaagccaaccggctcgctcttgtttcagcaaaccctgacttacgtctcctatttgacttgaggcggcacagtggccaagtcgattggccgtggcaagtgaccctccctgtggctgaagtgttctgaggactggcgagagaggcgcgccatgcttgccccctgctcaggttgggagcttggctgcttccgtctctgtctccgtcaggtccgactgtgggctggcgctgggcgctgggcttgctgggcttgccaagccaggccgtacagctcaggtgggagcgagcgctggcccggatcggagactgaggtccctccgcctggcccggcgcgccgaactctgaaggagtggacactgcaggtgagcccgtttggtcggctgcgggcgcggctcccgtgccacctggccgtgaggcccctggaccccctcacctacccggatggcgaccgcgtgctggtcgcggtgtgcggcgtggagggcggcgtgcggggcctggacggcctgcaggtgaagtacgacgaggatctggaggagatggccattgtgtctgatactatccacccccaggcgtccgtggaggtgaacgcgcccctgaagtttggtttagatatcaagtcatcagggtctggctgtgtaaaagttcaaagtattgagggtgataattgcaaaattgaaacagagcatgggactagtatcttgcagtctgttaagggtcaaaaattgcatgttcaaacaaaaggaggcaaagtgatctgtctgggaacagtttatggaaatatagatattcatgcatcagataaaagtatggtttgctgaaagccaagtatctttatacagaatcatcatttctgtcttctgctgctggggatattacattaggaagtgttcatggtaagctgacaaaggcataat

SEQ ID NO: 9848 - DNA, 2000 bp, Homo sapiens
agcggggacttaggcaaggggtccaggtcagagtttagagctttcaaatcccaacttgcccctggggattgcgcggctgatgtttagaacgcctagtcaagccaaccggctcgctcttgtttcagcaaaccctgacttacgtctcctatttgacttgaggcggcacagtggccaagtcgattggccgtggcaagtgaccctccctgtggctgaagtgttctgaggactggcgagagaggcgcgccatgcttgccccctgctcaggttgggagcttggctgcttccgtctctgtctccgtcaggtccgactgtgggctggcgctgggcgctgggcttgctgggcttgccaagccaggccgtacagctcaggtgggagcgagcgctggcccggatcggagactgaggtccctccgcctggcccggcgcgccgaactctgaaggagtggacactgcaggtgagcccgtttggtcggctgcgggcgcggctcccgtgccacctggccgtgaggcccctggaccccctcacctacccggatggcgaccgcgtgctggtcgcggtgtgcggcgtggagggcggcgtgcggggcctggacggcctgcaggtgaagtacgacgaggatctggaggagatggccattgtgtctgatactatccacccccaggcgtccgtggaggtttagatatcaagtcatcagggtctggctgtgtaaaagttcaaagtattgagggtgataattgcaaaattgaaacagagcatgggactagtatcttgcagtctgttaaggtaatataacattacaaagcaagatgggtaacatcacagtagattcgtcttctggatgtctaaaagcctcaactaatcagggtgccatagatgtttatgtcagccaactggggaaagtggaattgaaatcccataaaggttctattattgtcaaggtcccatcttcacttcaagctcatttacagttatcagggaaagaggttgatgtgaactcagaagtccatgttcaggaaatggctgaagttcgtaaagatgatgttgtaacagtgactggactcatgaatcaagcaagcaaacgtgaaaaatggattaaggctgatgccccaaaaggcactgtaagttttagaaggcaaagttggtttcagtccctgaaactgcaggactaaaactgatttgagttggatttatgatttttaacaatgattcgcagatctgtgactacaaaaatgtaaatcccaccattcatataaaggttgaaaacaacaaattgagaatgaatactggtgaactgttttgggaggctttttcaaaatttgtgctttgctattgtattcattttctactgctctgtaacaaattaccacaaatttagcagcataaaataatactcatttacagctatgtctaggttctccgctcagggaatcacaaggctagaaatcaagattttggccaggctgagttctcatctggagtctctgggaagaaatctacttccaacttcattcagattattgggaaaatccagttccttgtgactggatgactgaggtctccattttcttgctggctgtcagccagcaatcactctaagcttctagaggccacccacatgccttctcatgttgcccctccatcttcaagccagcagtgatgcgctgagttcttctcatgctttgaatatctgacttcttctgcagccagctggaagaatatatacttttaaagggctcacttgattaggtcaggcccacccaggataacctttgttttgccatataatgtaacattcataggagtgatggcccatcacattcagttttcactcccactcaaggaaaggagattatacaaaggcatccatcatgtggggacaattagcttagaattctttataatgtagctctcacatgacaggttttctacttagtaccttttatggcatcaatgtaaatttaagctgtaaataaaaaacaaatatgtgaaaaaaaaacta

SEQ ID NO: 9849 - DNA, 2014 bp, Homo sapiens
agcggggacttaggcaaggggtccaggtcagagtttagagctttcaaatcccaacttgcccctggggattgcgcggctgatgtttagaacgcctagtcaagccaaccggctcgctcttgtttcagcaaaccctgacttacgtctcctatttgacttgaggcggcacagtggccaagtcgattggccgtggcaagtgaccctccctgtggctgaagtgttctgaggactggcgagagaggcgcgccatgcttgccccctgctcaggttgggagcttggctgcttccgtctctgtctccgtcaggtccgactgtgggctggcgctgggcgctgggcttgctgggcttgccaagccaggccgtacagctcaggtgggagcgagcgctggcccggatcggagactgaggtccctccgcctggcccggcgcgccgaactctgaaggagtggacactgcaggtttagatatcaagtcatcagggtctggctgtgtaaaagttcaaagtattgagggtgataattgcaaaattgaaacagagcatgggactagtatcttgcagtctgttaagggtcaaaaattgcatgttcaaacaaaaggaggcaaagtgatctgtctgggaacagtttatggaaatatagatattcatgcatcagataaaagtgctgtgaccatagataaactgcagggaagttctgttactgtatctaccgaagatggtttgctgaaagccaagtatctttatacagaatcatcatttctgtcttctgctgctggggatattacattaggaagtgttcatgggtaatataacattacaaagcaagatgggtaacatcacagtagattcgtcttctggatgtctaaaagcctcaactaatcagggtgccatagatgtttatgtcagccaactggggaaagtggaattgaaatcccataaaggttctattattgtcaaggtcccatcttcacttcaagctcatttacagttatcagggaaagaggttgatgtgaactcagaagtccatgttcaggaaatggctgaagttcgtaaagatgatgttgtaacagtgactggactcatgaatcaagcaagcaaacgtgaaaaatggattaaggctgatgccccaaaaggcactgtaagttttagaaggcaaagttggtttcagtccctgaaactgcaggactaaaactgatttgagttggatttatgatttttaacaatgattcgcagatctgtgactacaaaaatgtaaatcccaccattcatataaaggttgaaaacaacaaattgagaatgaatactggtgaactgttttgggaggctttttcaaaatttgtgctttgctattgtattcattttctactgctctgtaacaaattaccacaaatttagcagcataaaataatactcatttacagctatgtctaggttctccgctcagggaatcacaaggctagaaatcaagattttggccaggctgagttctcatctggagtctctgggaagaaatctacttccaacttcattcagattattgggaaaatccagttccttgtgactggatgactgaggtctccattttcttgctggctgtcagccagcaatcactctaagcttctagaggccacccacatgccttctcatgttgcccctccatcttcaagccagcagtgatgcgctgagttcttctcatgctttgaatatctgacttcttctgcagccagctggaagaatatatacttttaaagggctcacttgattaggtcaggcccacccaggataacctttgttttgccatataatgtaacattcataggagtgatggcccatcacattcagttttcactcccactcaaggaaaggagattatacaaaggcatccatcatgtggggacaattagcttagaattctttataatgtagctctcacatgacaggttttctacttagtaccttttatggcatcaatgtaaatttaagctgtaaataaaaaacaaatatgtgaaaaaaaaacta

SEQ ID NO: 9850 - DNA, 1264 bp, Homo sapiens
agcggggacttaggcaaggggtccaggtcagagtttagagctttcaaatcccaacttgcccctggggattgcgcggctgatgtttagaacgcctagtcaagccaaccggctcgctcttgtttcagcaaaccctgacttacgtctcctatttgacttgaggcggcacagtggccaagtcgattggccgtggcaagtgaccctccctgtggctgaagtgttctgaggactggcgagagaggcgcgccatgcttgccccctgctcaggttgggagcttggctgcttccgtctctgtctccgtcaggtccgactgtgggctggcgctgggcgctgggcttgctgggcttgccaagccaggccgtacagctcaggtgggagcgagcgctggcccggatcggagactgaggtccctccgcctggcccggcgcgccgaactctgaaggagtggacactgcaggtgagcccgtttggtcggctgcgggcgcggctcccgtgccacctggccgtgaggcccctggaccccctcacctacccggatggcgaccgcgtgctggtcgcggtgtgcggcgtggagggcggcgtgcggggcctggacggcctgcaggtgaagtacgacgaggatctggaggagatggccattgtgtctgatactatccacccccaggcgtccgtggaggtttagatatcaagtcatcagggtctggctgtgtaaaagttcaaagtattgagggtgataattgcaaaattgaaacagagcatgggactagtatcttgcagtctgttaagggtcaaaaattgcatgttcaaacaaaaggaggcaaagtgatctgtctgggaacagtttatggaaatatagatattcatgcatcagataaaagtgctgtgaccatagataaactgcagggaagttctgttactgtatctaccgaagatggtttgctgaaagccaagtatctttatacagaatcatcatttctgtcttctgctgctggggatattacattaggaagtgttcatggacttgcctcattgggatctaattaaatgaaagagcttctgcactgcaaaagaaattatgaacagagtaaatagacaacctacagaatgggagaaaatatttgcaaactctgtatctgacaaaggtttaatatcctttgttcctttgaatcttcaaggaagttaaacaaatcaataagcaaaaaactaataaccctattaaaaatgagcaaaagacaggacattttgctcatttctcaagagaagacg

SEQ ID NO: 9851 - DNA, 1265 bp, Homo sapiens
agcggggacttaggcaaggggtccaggtcagagtttagagctttcaaatcccaacttgcccctggggattgcgcggctgatgtttagaacgcctagtcaagccaaccggctcgctcttgtttcagcaaaccctgacttacgtctcctatttgacttgaggcggcacagtggccaagtcgattggccgtggcaagtgaccctccctgtggctgaagtgttctgaggactggcgagagaggcgcgccatgcttgccccctgctcaggttgggagcttggctgcttccgtctctgtctccgtcaggtccgactgtgggctggcgctgggcgctgggcttgctgggcttgccaagccaggccgtacagctcaggtgggagcgagcgctggcccggatcggagactgaggtccctccgcctggcccggcgcgccgaactctgaaggagtggacactgcaggtgagcccgtttggtcggctgcgggcgcggctcccgtgccacctggccgtgaggcccctggaccccctcacctacccggatggcgaccgcgtgctggtcgcggtgtgcggcgtggagggcggcgtgcggggcctggacggcctgcaggtgaagtacgacgaggatctggaggagatggccattgtgtctgatactatccacccccaggcgtccgtggaggtgaacgcgcccctgaagtttggtttagatatcaagtcatcagggtctggctgtgtaaaagttcaaagtattgagggtgataattgcaaaattgaaacagagcatgggactagtatcttgcagtctgttaagggtcaaaaattgcatgttcaaacaaaaggaggcaaagtgatctgtctgggaacagtttatggaaatatagatattcatgcatcagataaaagtgctgtgaccatagataaactgcagggaagttctgttactgtatctaccgaagatggtttgctgaaagccaagtatctttatacagaatcatcatttctgtcttctgctgctggggatattacattaggaagtgttcatgggtaatataacattacaaagcaagatgggtaacatcacagtagattcgtcttctggatgtctaaaagcctcaactaatcagggtgccatagatgtttatgtcagccaactggggaaagtggaattgaaatcccataaagggtatcactctgtcacccaggctggagtgcagcagcaagatcatggctcagtgcagcctcatcaggatcgcctaagcttgggaggtca

SEQ ID NO: 9852 - DNA, 1202 bp, Homo sapiens
agcggggacttaggcaaggggtccaggtcagagtttagagctttcaaatcccaacttgcccctggggattgcgcggctgatgtttagaacgcctagtcaagccaaccggctcgctcttgtttcagcaaaccctgacttacgtctcctatttgacttgaggcggcacagtggccaagtcgattggccgtggcaagtgaccctccctgtggctgaagtgttctgaggactggcgagagaggcgcgccatgcttgccccctgctcaggttgggagcttggctgcttccgtctctgtctccgtcaggtccgactgtgggctggcgctgggcgctgggcttgctgggcttgccaagccaggccgtacagctcaggtgggagcgagcgctggcccggatcggagactgaggtccctccgcctggcccggcgcgccgaactctgaaggagtggacactgcaggtgagcccgtttggtcggctgcgggcgcggctcccgtgccacctggccgtgaggcccctggaccccctcacctacccggatggcgaccgcgtgctggtcgcggtgtgcggcgtggagggcggcgtgcggggcctggacggcctgcaggtgaagtacgacgaggatctggaggagatggccattgtgtctgatactatccacccccaggcgtccgtggaggtgaacgcgcccctgaagtttggtttagatatcaagtcatcagggtctggctgtgtaaaagttcaaagtattgagggtgataattgcaaaattgaaacagagcatgggactagtatcttgcagtctgttaagacctcttagaaaatctaattgtctccttaagaagaaaaaaatgcatgtctatgaaattttacttataattttgtaagttcatgtgagcttggttaagagttcttgacttaaaacaacaagtgtgcgcctcccgtcgcccaagatgccgaaaggaaaggaggccaaggggaagaagttggctctggcccctgcttttgtgaagaagcaggaggccaagaaagtggtgaatcccctgtttgagaaaaggcctaagaattttggcattggacaggacatccagcccaaaagagacctcacctgctttgtgaaatggccccgctatatcaggttgcaatggcagagatccatactctataagcagctgaaagtgcctcctgcgattaaccagttcaccca

SEQ ID NO: 9853 - DNA, 458 bp, Homo sapiens
tgcaactcctgcccagttcagactatctttaccaagattcttgatgttctaaggtgtttttcagtttcagagatgtgttgctaggatctatgtggtcaattaatgctcttgatataattttatgcaattttgtgttttaggactcatgaatcaagcaagcaaacgtgaaaaatggattaaggctgatgccccaaaaggcactgtaagttttagaaggcaaagttggtttcagtccctgaaactgcaggactaaaactgatttgagttggatttatgatttttaacaatgattcgcagatctgtgactacaaaaatgtaaatcccaccattcatataaaggttgaaaacaacaaattgagaatgaatactggtgaactgttttgggaggctttttcaaaatttgtgctttgctattgtattcattttctactgctctgtaacaaattaccacaaattta

SEQ ID NO: 9854 - DNA, 468 bp, Homo sapiens
gatctgttccatattctgcagagaatgcactattgctcagaatctcgtaattagaggtagggaatcagagtcaataaagtgattgtgtactaggtagtaacattttatgtagttatccactgattccacaggtagcattttggctttttaccagtctttgttttataatgaactgattagtctttctcttactaggctgtgaccatagataaactgcagggaagttctgttactgtatctaccgaagatggtttgctgaaagccaagtatctttatacagaatcatcatttctgtcttctgctgctggggatattacattaggaagtgttcatggtaagctgacaaaggcataatacatctgagactttccacatagcataaattttaagagatgactctgtagttgaaaaaaggatcaggaaactggccttttaaataatgaaatgcagactaaccatctttttaaa

SEQ ID NO: 9855 - DNA, 633 bp, Homo sapiens
ataatattaatgaaattcaaatgtatcatggataaaaaataaaaagatttctcaaaagtcagtaaaggacaaatgaaggcaggaagaaaaaatcaaatgtgtaatccactgtgggatcttaatatcaagattcaaatatgtaaaatgattgcttttaattttgaatatgagttttgtaatgtagaagttaagagagttttatggagctataaagaatgcagtgagttgacaaccattttccttagtatttttccccaagaaaataagtgtgaaacccgttgataagcataccacatgtataaatgactattctagattcctctctctctccttctgttcctttcttctgtctttctccctccctccttctcttcctttctttcttccttttctctctccctctctccccttctccctctccttctctgtctttctccacccctcccatgactttttcttttttttttaaattatactttaagctttagggtacatgtgcacaacatgcaggtttgttacatatgtatacatgtgccgtgttggtgtgctgcatgcattaactcgtcatttaacattaggtatatctcctaatgctatccctccccccaccacccaccccacagcaggccccgg

SEQ ID NO: 9856 - DNA, 6422 bp, Homo sapiens
  misc_feature (581)..(581): n is a, c, g, or t
  misc_feature (622)..(623): n is a, c, g, or t
  misc_feature (653)..(654): n is a, c, g, or t
  misc_feature (682)..(682): n is a, c, g, or t
  misc_feature (2575)..(2575): n is a, c, g, or t
atcctcagaattcctcgggtccctcgatactcggctgaaaattctcatcggactctgagaggagcgctgggctggaggcattttccccagggacagaagcgggctattctctcacttgggccagtaagaaaaatccaaaaaaagttgtcgactctgccagcagggattggctaacgggccgttattttcttgactccaccaaggcggatgaaggggaggctacggctgaggccgggaacagtggcgaatctgcagcctctcagaatttggcagtgcaaggaagggacggggaagagaagcaaagcggcgcgcatcctgtccagcgattcgccccgcccgcccggtgaatctgcgtctgcagaacgcgccactgaaggttccccagcgctggctggcctcctcccctccgccccgccccttttcctcagggactagtcgcagctttcgtcgccgccgattcgtcaaggtcccgggccgcagcatctagatcgtcgtggcgaacgactctccgggggatgcggccaatctccaagctccctgggccgcaacttccgagcctcccagggcgccggccgaggaancgctaccctcggccccgtgggtcccccggcagcgctgtggnnaagtgcgaatgagaccctgtgcccgctggnnctcgcgcagtgtaaatgagcaaagatgnatcaggaaggtgggggagatggcagaaggccccgagcttccagtggcggaactacaagctcatcgtggatcctgccttggaccctgccctgcgcaggccttctcagaaggtgtaccgctatgatggagtccacttcagtgtcaacgactcaaagtatataccagtcgaagacctccaagacccccgttgccatgtcaggtccaaaaacagagacttttccctcccagtccctaagtttaagctggacgagttctatattggacagattccactgaaggaagtgacttttgcaaggctgaatgacaacgtgcgggagaccttcctgaaggatatgtgccgtaagtacggtgaggtggaagaggtagagatctccttcacccccgtacgcgcaagcacctgggcctggcccgtgtgctcttcaccagcactcggggcgccaaggaaacggtcaagaacctccaccttacctccgtcatgggcaacatcatccatgcccagcttgacatcaaaggacaacaacgaatgaaatactatgaactaattgtcaatggctcctacacccctcagactgtgcccactgggggcaaggccctgagtgagaagttccaaggctcgggtgcagccactgagacggccgaatcccgccgccgctcttcctctgacacagctgcctacccagcaggcaccactgcggtgggcactcctggcaacggcaccccctgctcccaggacacaagcttctccagcagccgacaagataccccatcttcctttggccagttcacacctcagtcctcccaaggaaccccctacacgtctcggggcagcaccccctactctcaggactctgcctactccagcagcaccacttcaacctccttcaagccccggcggtcagagaacagctaccaagatgccttttcccgccgccacttctctgcatcttcagcctccacaaccgcctccacggccatcgccgccaccactgcagccactgcctcatcctccgcctcttcctcctcattgtcctcgtcctcctcgtcatcctcttcctcctcgtcctctcagtttcgtagttctgatgcaaactacccagcgtattatgaaagctggaatcgctaccagcgccatacttcctacccaccacgccgggcacacgggaggaaccccctggagccccttttgctgaaaatacagctgagcgcttcccaccttcttacactcctaactggcccccgagcccagcggccacgacaggatacggctcctgctcagaggtcaccccggagctccagaactggtggaggcgggggtggaggagggcccagccctgagagagaagaagttcggacttccccccgcccagcctcccctgcccgctctggctccccagccccggagaccaccaatgagagtgtgcccttcgcccagcacagcagcctggattcccgcatcgagatgctgctgaaggagcagcgctccaagttttccttcttggcctctgacacagaggaggaggaagagaacagcagcatggtccttggggccagagatacagggagtgaggtgccttctgggtcagggcatgggccctgcacaccccctccggccccagctaattttgaggatgtggcacctacagggagcggggagccaggggctacccgggagtctcccaaggcaaatggacagaaccaggcttctccatgctcttctggagacgacatggagatctccgacgacgaccggggtggctcaccccctccggccccgacgccccctcagcagctccgccacctccccctcccccgccgcctcctcctccctacctggcgtcccttcctcttggttatcctccccaccaacctgcctacctcctcccacccagacctnatgggccgccgccccctgagtaccccccacctcctccaccacccccgcacatctatgactttgtgaactccttggagctcatggaccgacttggggctcagtggggagggatgcccatgtccttccagatgcagacccagatgttaactcggctccatcagctgcggcagggcaagggattgattgccgcctcagctggcccccccggtggggcctttggggaggccttcctcccgtttccacccccgcaggaggcagcctacggcttgccgtatgctctatatgcacaggggcaggagggcagaggggcatactcacgggaggcctaccacctgcccatgccaatggcagccgagcccctgccctcctcctcagtctcgggagaggaggcccggctgccacccagggaagaagcagagctggcagagggcaagaccctcccgacagcaggcaccgtgggccgtgtgctcgccatgctggtccaggagatgaagagcatcatgcagcgagacctcaaccgcaagatggtggagaacgtggccttcggagcctttgaccagtggtgggagagcaaggaggagaaggccaagccattccagaacgcggccaagcagcaagccaaggaggaggataaagagaagacgaagctgaaggagcctggcctgctgtccctcgtggactgggccaagagcgggggcactacgggcatcgaggctttcgcctttgggtcagggctgagaggggccctgcggctgccttcattcaaggtaaagcggaaagagccatcggaaatttccgaggccagtgaggaaaagaggcctcgtccctccactcctgctgaggaagatgaagacgaccctgaacaagagaaggaggctggagagccaggacgtccggggaccaagcccccgaagcgggacgaagagcgaggcaagacccagggcaagcaccgcaagtcctttgctctggacagcgaaggggaggaggcatcccaggagtcctcctcggagaaggatgaggaggatgacgaggaagatgaggaagatgaagatcgagaggaagctgtggataccacaaagaaggagacagaggtgtcggatggcgaggacgaggaaagcgattcgtcttccaaatgttctctgtatgctgactcagatggcgaaaatgacagcacatcagactccgagagcagcagctcttccagctcctcatcctcctcctcctcctcgtcctcatcctcctcgtcctcttcatcctctgagtcctcctctgaagatgaagaggaagaggagcggccagcagcccttccctcagcctccccgccccccagagaagtcccagtgcccacgccagcacctgtggaggtgccagtgccggaaagggttgcaggctccccagtcacacccctgcccgaacaggaggcgtctccagcaaggcctgcaggccccacggaggagtcaccccccagtgcgcctctgcgtcccccagaaccacctgctgggcccccggcccctgccccacgccccgatgagcgtccctcttctcccatccccctcctgcccccacccaagaaacgccggaaaactgtctccttctctgccatcgaggtggtgccagccccggagccccctccagccacaccgccgcaggccaagtttcccggcccagcctcccgcaaggctccccggggcgtggagcggaccatccgcaacctgcccctggaccacgcatctctggtcaagagttggcccgaggaggtgtcccgaggaggccggagccgggctggaggccgaggccgcctcaccgaggaagaggaggctgagccagggacagaggtggacctggcggtcctggccgacctggccctgacccctgcccggcgcgggctgcctgccctgcctgctgttgaagactcagaggccacagagacatcggacgaggccgagcgccctaggcccctgctcagccacatcctcctggagcacaactatgccctggccgtcaagcccacgccccctgcgccagccctgcggcccccggagccagtgcccgcacccgccgccctcttcagttccccagctgatgaggtcctggaggcccccgaggtggtggtggctgaggcggaggagcccaagccgcagcaactgcagcagcagcgggaggagggcgaagaggagggggaggaagagggggaggaagaggaggaggagtcctctgacagcagcagcagcagcgatggggagggcgccctccggaggcgcagcctccgctcccacgcccggcgccgccgccctccgcccccacccccgccgccaccgccccgcgcctacgagccacgcagtgagtttgaacagatgaccatcctgtatgacatttggaactcgggcctggactcagaggacatgagttacctgcggcttacgtacgagcggctgctgcagcagacaagcggggctgactggctcaacgacactcactgggtccatcacacaatcaccaacctgaccaccccaaaacgcaagcggcggccccaggatgggccccgggagcaccagacaggctcagcccgcagcgaaggctactaccccatcagcaagaaggagaaggacaagtacctggacgtgtgcccagtctcggcccggcagctggagggcgtggacactcaggggacgaaccgcgtgctgtccgagcgccggtccgagcagcggcggctgctgagcgccatcggtacctccgccatcatggacagtgacctgctgaaactcaaccagctcaagttccggaagaagaagctccgatttggccggagccggatccacgagtggggtctgtttgccatggaacccattgctgctgacgagatggtcatcgaatacgtgggtcagaacatccgtcagatggtggccgacatgcgggagaagcgctacgtgcaggagggcattggcagcagctacctgttccgggtggaccacgacaccatcatcgatgccaccaagtgtggcaacctggccagattcatcaaccactgctgcacgcctaactgctacgccaaggtcatcaccatcgagtcccagaagaagatcgtgatctactccaagcagcccattggcgtggacgaggagatcacctacgactacaagttcccactggaagacaacaagatcccgtgtctgtgtggcacagagagctgccggggctccctaaactgaggtggggcaggatgggtgcccacacccctatttattccccctggtgccctgagctcccagcacccccccagccttagtgggctcagcagggcccacatgcccccatctccaagcgtggggttgggggccccaagcccagcgagggagcctcagtccctggaggcagcttctgcctctcctgtcgcccctgcccaccaccccctgattgtttttctttgcggagaagaagctgtaaatgttttgtagcagccagcagctgtttcctgtggaaacctggggtgccggcctgtacagattctgtcctggggggctacacagtcctctcgctttgtgttaatggggacttccccttacgccctgcgtgtacccctccccagtttaggggtctctggggcagtggccatgttctccccctgggggggctctgcacccccagtcctggggactccgtgcctggaaccctgcctcatctgttcctgccagaccctgagggtcacccttccaccctggtgtcactccccggctcagccaggccaggatggcggggtgggtcccttttgctgggctggactgtacatatgttaatagcgcaaacccgacgccacatttttataattgtgattaaactttattgtaca

SEQ ID NO: 9857 - DNA, 6151 bp, Homo sapiens
  misc_feature (581)..(581): n is a, c, g, or t
  misc_feature (622)..(623): n is a, c, g, or t
  misc_feature (653)..(654): n is a, c, g, or t
  misc_feature (682)..(682): n is a, c, g, or t
  misc_feature (2575)..(2575): n is a, c, g, or t
atcctcagaattcctcgggtccctcgatactcggctgaaaattctcatcggactctgagaggagcgctgggctggaggcattttccccagggacagaagcgggctattctctcacttgggccagtaagaaaaatccaaaaaaagttgtcgactctgccagcagggattggctaacgggccgttattttcttgactccaccaaggcggatgaaggggaggctacggctgaggccgggaacagtggcgaatctgcagcctctcagaatttggcagtgcaaggaagggacggggaagagaagcaaagcggcgcgcatcctgtccagcgattcgccccgcccgcccggtgaatctgcgtctgcagaacgcgccactgaaggttccccagcgctggctggcctcctcccctccgccccgccccttttcctcagggactagtcgcagctttcgtcgccgccgattcgtcaaggtcccgggccgcagcatctagatcgtcgtggcgaacgactctccgggggatgcggccaatctccaagctccctgggccgcaacttccgagcctcccagggcgccggccgaggaancgctaccctcggccccgtgggtcccccggcagcgctgtggnnaagtgcgaatgagaccctgtgcccgctggnnctcgcgcagtgtaaatgagcaaagatgnatcaggaaggtgggggagatggcagaaggccccgagcttccagtggcggaactacaagctcatcgtggatcctgccttggaccctgccctgcgcaggccttctcagaaggtgtaccgctatgatggagtccacttcagtgtcaacgactcaaagtatataccagtcgaagacctccaagacccccgttgccatgtcaggtccaaaaacagagacttttccctcccagtccctaagtttaagctggacgagttctatattggacagattccactgaaggaagtgacttttgcaaggctgaatgacaacgtgcgggagaccttcctgaaggatatgtgccgtaagtacggtgaggtggaagaggtagagatctccttcacccccgtacgcgcaagcacctgggcctggcccgtgtgctcttcaccagcactcggggcgccaaggaaacggtcaagaacctccaccttacctccgtcatgggcaacatcatccatgcccagcttgacatcaaaggacaacaacgaatgaaatactatgaactaattgtcaatggctcctacacccctcagactgtgcccactgggggcaaggccctgagtgagaagttccaaggctcgggtgcagccactgagacggccgaatcccgccgccgctcttcctctgacacagctgcctacccagcaggcaccactgcggtgggcactcctggcaacggcaccccctgctcccaggacacaagcttctccagcagccgacaagataccccatcttcctttggccagttcacacctcagtcctcccaaggaaccccctacacgtctcggggcagcaccccctactctcaggactctgcctactccagcagcaccacttcaacctccttcaagccccggcggtcagagaacagctaccaagatgccttttcccgccgccacttctctgcatcttcagcctccacaaccgcctccacggccatcgccgccaccactgcagccactgcctcatcctccgcctcttcctcctcattgtcctcgtcctcctcgtcatcctcttcctcctcgtcctctcagtttcgtagttctgatgcaaactacccagcgtattatgaaagctggaatcgctaccagcgccatacttcctacccaccacgccgggcacacgggaggaaccccctggagccccttttgctgaaaatacagctgagcgcttcccaccttcttacactcctaactggcccccgagcccagcggccacgacaggatacggctcctgctcagaggtcaccccggagctccagaactggtggaggcgggggtggaggagggcccagccctgagagagaagaagttcggacttccccccgcccagcctcccctgcccgctctggctccccagccccggagaccaccaatgagagtgtgcccttcgcccagcacagcagcctggattcccgcatcgagatgctgctgaaggagcagcgctccaagttttccttcttggcctctgacacagaggaggaggaagagaacagcagcatggtccttggggccagagatacagggagtgaggtgccttctgggtcagggcatgggccctgcacaccccctccggccccagctaattttgaggatgtggcacctacagggagcggggagccaggggctacccgggagtctcccaaggcaaatggacagaaccaggcttctccatgctcttctggagacgacatggagatctccgacgacgaccggggtggctcaccccctccggccccgacgccccctcagcagctccgccacctccccctcccccgccgcctcctcctccctacctggcgtcccttcctcttggttatcctccccaccaacctgcctacctcctcccacccagacctnatgggccgccgccccctgagtaccccccacctcctccaccacccccgcacatctatgactttgtgaactccttggagctcatggaccgacttggggctcagtggggagggatgcccatgtccttccagatgcagacccagatgttaactcggctccatcagctgcggcagggcaagggattgattgccgcctcagctggcccccccggtggggcctttggggaggccttcctcccgtttccacccccgcaggaggcagcctacggcttgccgtatgctctatatgcacaggggcaggagggcagaggggcatactcacgggaggcctaccacctgcccatgccaatggcagccgagcccctgccctcctcctcagtctcgggagaggaggcccggctgccacccagggaagaagcagagctggcagagggcaagaccctcccgacagcaggcaccgtgggccgtgtgctcgccatgctggtccaggagatgaagagcatcatgcagcgagacctcaaccgcaagatggtggagaacgtggccttcggagcctttgaccagtggtgggagagcaaggaggagaaggccaagccattccagaacgcggccaagcagcaagccaaggaggaggataaagagaagacgaagctgaaggagcctggcctgctgtccctcgtggactgggccaagagcgggggcactacgggcatcgaggctttcgcctttgggtcagggctgagaggggccctgcggctgccttcattcaaggtaaagcggaaagagccatcggaaatttccgaggccagtgaggaaaagaggcctcgtccctccactcctgctgaggaagatgaagacgaccctgaacaagagaaggaggctggagagccaggacgtccggggaccaagcccccgaagcgggacgaagagcgaggcaagacccagggcaagcaccgcaagtcctttgctctggacagcgaaggggaggaggcatcccaggagtcctcctcggagaaggatgaggaggatgacgaggaagatgaggaagatgaagatcgagaggaagctgtggataccacaaagaaggagacagaggtgtcggatggcgaggacgaggaaagcgattcgtcttccaaatgttctctgtatgctgactcagatggcgaaaatgacagcacatcagactccgagagcagcagctcttccagctcctcatcctcctcctcctcctcgtcctcatcctcctcgtcctcttcatcctctgagtcctcctctgaagatgaagaggaagaggagcggccagcagcccttccctcagcctccccgccccccagagaagtcccagtgcccacgccagcacctgtggaggtgccagtgccggaaagggttgcaggctccccagtcacacccctgcccgaacaggaggcgtctccagcaaggcctgcaggccccacggaggagtcaccccccagtgcgcctctgcgtcccccagaaccacctgctgggcccccggcccctgccccacgccccgatgagcgtccctcttctcccatccccctcctgcccccacccaagaaacgccggaaaactgtctccttctctgccatcgaggtggtgccagccccggagccccctccagccacaccgccgcaggccaagtttcccggcccagcctcccgcaaggctccccggggcgtggagcggaccatccgcaacctgcccctggaccacgcatctctggtcaagagttggcccgaggaggtgtcccgaggaggccggagccgggctggaggccgaggccgcctcaccgaggaagaggaggctgagccagggacagaggtggacctggcggtcctggccgacctggccctgacccctgcccggcgcgggctgcctgccctgcctgctgttgaagactcagaggccacagagacatcggacgaggccgagcgccctaggcccctgctcagccacatcctcctggagcacaactatgccctggccgtcaagcccacgccccctgcgccagccctgcggcccccggagccagtgcccgcgcctacgagccacgcagtgagtttgaacagatgaccatcctgtatgacatttggaactcgggcctggactcagaggacatgagttacctgcggcttacgtacgagcggctgctgcagcagacaagcggggctgactggctcaacgacactcactgggtccatcacacaatcaccaacctgaccaccccaaaacgcaagcggcggccccaggatgggccccgggagcaccagacaggctcagcccgcagcgaaggctactaccccatcagcaagaaggagaaggacaagtacctggacgtgtgcccagtctcggcccggcagctggagggcgtggacactcaggggacgaaccgcgtgctgtccgagcgccggtccgagcagcggcggctgctgagcgccatcggtacctccgccatcatggacagtgacctgctgaaactcaaccagctcaagttccggaagaagaagctccgatttggccggagccggatccacgagtggggtctgtttgccatggaacccattgctgctgacgagatggtcatcgaatacgtgggtcagaacatccgtcagatggtggccgacatgcgggagaagcgctacgtgcaggagggcattggcagcagctacctgttccgggtggaccacgacaccatcatcgatgccaccaagtgtggcaacctggccagattcatcaaccactgctgcacgcctaactgctacgccaaggtcatcaccatcgagtcccagaagaagatcgtgatctactccaagcagcccattggcgtggacgaggagatcacctacgactacaagttcccactggaagacaacaagatcccgtgtctgtgtggcacagagagctgccggggctccctaaactgaggtggggcaggatgggtgcccacacccctatttattccccctggtgccctgagctcccagcacccccccagccttagtgggctcagcagggcccacatgcccccatctccaagcgtggggttgggggccccaagcccagcgagggagcctcagtccctggaggcagcttctgcctctcctgtcgcccctgcccaccaccccctgattgtttttctttgcggagaagaagctgtaaatgttttgtagcagccagcagctgtttcctgtggaaacctggggtgccggcctgtacagattctgtcctggggggctacacagtcctctcgctttgtgttaatggggacttccccttacgccctgcgtgtacccctccccagtttaggggtctctggggcagtggccatgttctccccctgggggggctctgcacccccagtcctggggactccgtgcctggaaccctgcctcatctgttcctgccagaccctgagggtcacccttccaccctggtgtcactccccggctcagccaggccaggatggcggggtgggtcccttttgctgggctggactgtacatatgttaatagcgcaaacccgacgccacatttttataattgtgattaaactttattgtaca

SEQ ID NO: 9858 - DNA, 3201 bp, Homo sapiens
tgcgggaactagtcgcgagtgaacacctcagaaacaccttgtgaggaaagaaacatggtatttaaaaaccatgagatttcacacaaaaacccaaatttctggcttgagtgcagtggcacgatgtaatctccgcctcccgggttcaagcgattctcctgcctcagcctcccgagtagctggggttacaggcacccgccaccacgcctggctaatttttgtatttttagtagagctggggtttcactgtgttggccaggctggtcttgaactcctaacctcaggtgatctacctgccttggcctcccaaagtgctgggattacaggagtgagccaccgtgctctgcctgagtgtttgagctctaaacaggccccatcttttccccatcccccaggtaaagcggaaagagccatcggaaatttccgaggccagtgaggaaaagaggcctcgtccctccactcctgctgaggaagatgaagacgaccctgaacaagagaaggaggctggagagccaggacgtccggggaccaagcccccgaagcgggacgaagagcgaggcaagacccagggcaagcaccgcaagtcctttgctctggacagcgaaggggaggaggcatcccaggagtcctcctcggagaaggatgaggaggatgacgaggaagatgaggaagatgaagatcgagaggaagctgtggataccacaaagaaggagacagaggtgtcggatggcgaggacgaggaaagcgattcgtcttccaaatgttctctgtatgctgactcagatggcgaaaatgacagcacatcagactccgagagcagcagctcttccagctcctcatcctcctcctcctcctcgtcctcatcctcctcgtcctcttcatcctctgagtcctcctctgaagatgaagaggaagaggagcggccagcagcccttccctcagcctccccgccccccagagaagtcccagtgcccacgccagcacctgtggaggtgccagtgccggaaagggttgcaggctccccagtcacacccctgcccgaacaggaggcgtctccagcaaggcctgcaggccccacggaggagtcaccccccagtgcgcctctgcgtcccccagaaccacctgctgggcccccggcccctgccccacgccccgatgagcgtccctcttctcccatccccctcctgcccccacccaagaaacgccggaaaactgtctccttctctgccatcgaggtggtgccagccccggagccccctccagccacaccgccgcaggccaagtttcccggcccagcctcccgcaaggctccccggggcgtggagcggaccatccgcaacctgcccctggaccacgcatctctggtcaagagttggcccgaggaggtgtcccgaggaggccggagccgggctggaggccgaggccgcctcaccgaggaagaggaggctgagccagggacagaggtggacctggcggtcctggccgacctggccctgacccctgcccggcgcgggctgcctgccctgcctgctgttgaagactcagaggccacagagacatcggacgaggccgagcgccctaggcccctgctcagccacatcctcctggagcacaactatgccctggccgtcaagcccacgccccctgcgccagccctgcggcccccggagccagtgcccgcgcctacgagccacgcagtgagtttgaacagatgaccatcctgtatgacatttggaactcgggcctggactcagaggacatgagttacctgcggcttacgtacgagcggctgctgcagcagacaagcggggctgactggctcaacgacactcactgggtccatcacacaatcaccaacctgaccaccccaaaacgcaagcggcggccccaggatgggccccgggagcaccagacaggctcagcccgcagcgaaggctactaccccatcagcaagaaggagaaggacaagtacctggacgtgtgcccagtctcggcccggcagctggagggcgtggacactcaggggacgaaccgcgtgctgtccgagcgccggtccgagcagcggcggctgctgagcgccatcggtacctccgccatcatggacagtgacctgctgaaactcaaccagctcaagttccggaagaagaagctccgatttggccggagccggatccacgagtggggtctgtttgccatggaacccattgctgctgacgagatggtcatcgaatacgtgggtcagaacatccgtcagatggtggccgacatgcgggagaagcgctacgtgcaggagggcattggcagcagctacctgttccgggtggaccacgacaccatcatcgatgccaccaagtgtggcaacctggccagattcatcaaccactgctgcacgcctaactgctacgccaaggtcatcaccatcgagtcccagaagaagatcgtgatctactccaagcagcccattggcgtggacgaggagatcacctacgactacaagttcccactggaagacaacaagatcccgtgtctgtgtggcacagagagctgccggggctccctaaactgaggtggggcaggatgggtgcccacacccctatttattccccctggtgccctgagctcccagcacccccccagccttagtgggctcagcagggcccacatgcccccatctccaagcgtggggttgggggccccaagcccagcgagggagcctcagtccctggaggcagcttctgcctctcctgtcgcccctgcccaccaccccctgattgtttttctttgcggagaagaagctgtaaatgttttgtagcagccagcagctgtttcctgtggaaacctggggtgccggcctgtacagattctgtcctggggggctacacagtcctctcgctttgtgttaatggggacttccccttacgccctgcgtgtacccctccccagtttaggggtctctggggcagtggccatgttctccccctgggggggctctgcacccccagtcctggggactccgtgcctggaaccctgcctcatctgttcctgccagaccctgagggtcacccttccaccctggtgtcactccccggctcagccaggccaggatggcggggtgggtcccttttgctgggctggactgtacatatgttaatagcgcaaacccgacgccacatttttataattgtgattaaactttattgtaca

SEQ ID NO: 9859 - DNA, 255 bp, Homo sapiens
atgcccagcttgacatcaaaggtgaggactcctctgcctgccactcaggcttggcctccagcggaggttgtacatgcaaatgcctgtcagggtcaggcaggcgcccagggtcatgatctgaaactgctggggccagttgtgtttctgaaatcagatcagattttagagtggaattatggtacatggatttttgtgtgtgtggtgtctccagcaaggtcgggcaataggccataatcaagcacataactatctgta

SEQ ID NO: 9860 - DNA, 6608 bp, Homo sapiens
  misc_feature (581)..(581): n is a, c, g, or t
  misc_feature (622)..(623): n is a, c, g, or t
  misc_feature (653)..(654): n is a, c, g, or t
  misc_feature (682)..(682): n is a, c, g, or t
  misc_feature (2575)..(2575): n is a, c, g, or t
atcctcagaattcctcgggtccctcgatactcggctgaaaattctcatcggactctgagaggagcgctgggctggaggcattttccccagggacagaagcgggctattctctcacttgggccagtaagaaaaatccaaaaaaagttgtcgactctgccagcagggattggctaacgggccgttattttcttgactccaccaaggcggatgaaggggaggctacggctgaggccgggaacagtggcgaatctgcagcctctcagaatttggcagtgcaaggaagggacggggaagagaagcaaagcggcgcgcatcctgtccagcgattcgccccgcccgcccggtgaatctgcgtctgcagaacgcgccactgaaggttccccagcgctggctggcctcctcccctccgccccgccccttttcctcagggactagtcgcagctttcgtcgccgccgattcgtcaaggtcccgggccgcagcatctagatcgtcgtggcgaacgactctccgggggatgcggccaatctccaagctccctgggccgcaacttccgagcctcccagggcgccggccgaggaancgctaccctcggccccgtgggtcccccggcagcgctgtggnnaagtgcgaatgagaccctgtgcccgctggnnctcgcgcagtgtaaatgagcaaagatgnatcaggaaggtgggggagatggcagaaggccccgagcttccagtggcggaactacaagctcatcgtggatcctgccttggaccctgccctgcgcaggccttctcagaaggtgtaccgctatgatggagtccacttcagtgtcaacgactcaaagtatataccagtcgaagacctccaagacccccgttgccatgtcaggtccaaaaacagagacttttccctcccagtccctaagtttaagctggacgagttctatattggacagattccactgaaggaagtgacttttgcaaggctgaatgacaacgtgcgggagaccttcctgaaggatatgtgccgtaagtacggtgaggtggaagaggtagagatctccttcacccccgtacgcgcaagcacctgggcctggcccgtgtgctcttcaccagcactcggggcgccaaggaaacggtcaagaacctccaccttacctccgtcatgggcaacatcatccatgcccagcttgacatcaaaggacaacaacgaatgaaatactatgaactaattgtcaatggctcctacacccctcagactgtgcccactgggggcaaggccctgagtgagaagttccaaggctcgggtgcagccactgagacggccgaatcccgccgccgctcttcctctgacacagctgcctacccagcaggcaccactgcggtgggcactcctggcaacggcaccccctgctcccaggacacaagcttctccagcagccgacaagataccccatcttcctttggccagttcacacctcagtcctcccaaggaaccccctacacgtctcggggcagcaccccctactctcaggactctgcctactccagcagcaccacttcaacctccttcaagccccggcggtcagagaacagctaccaagatgccttttcccgccgccacttctctgcatcttcagcctccacaaccgcctccacggccatcgccgccaccactgcagccactgcctcatcctccgcctcttcctcctcattgtcctcgtcctcctcgtcatcctcttcctcctcgtcctctcagtttcgtagttctgatgcaaactacccagcgtattatgaaagctggaatcgctaccagcgccatacttcctacccaccacgccgggcacacgggaggaaccccctggagccccttttgctgaaaatacagctgagcgcttcccaccttcttacactcctaactggcccccgagcccagcggccacgacaggatacggctcctgctcagaggtcaccccggagctccagaactggtggaggcgggggtggaggagggcccagccctgagagagaagaagttcggacttccccccgcccagcctcccctgcccgctctggctccccagccccggagaccaccaatgagagtgtgcccttcgcccagcacagcagcctggattcccgcatcgagatgctgctgaaggagcagcgctccaagttttccttcttggcctctgacacagaggaggaggaagagaacagcagcatggtccttggggccagagatacagggagtgaggtgccttctgggtcagggcatgggccctgcacaccccctccggccccagctaattttgaggatgtggcacctacagggagcggggagccaggggctacccgggagtctcccaaggcaaatggacagaaccaggcttctccatgctcttctggagacgacatggagatctccgacgacgaccggggtggctcaccccctccggccccgacgccccctcagcagctccgccacctccccctcccccgccgcctcctcctccctacctggcgtcccttcctcttggttatcctccccaccaacctgcctacctcctcccacccagacctnatgggccgccgccccctgagtaccccccacctcctccaccacccccgcacatctatgactttgtgaactccttggagctcatggaccgacttggggctcagtggggagggatgcccatgtccttccagatgcagacccagatgttaactcggctccatcagctgcggcagggcaagggattgattgccgcctcagctggcccccccggtggggcctttggggaggccttcctcccgtttccacccccgcaggaggcagcctacggcttgccgtatgctctatatgcacaggggcaggagggcagaggggcatactcacgggaggcctaccacctgcccatgccaatggcagccgagcccctgccctcctcctcagtctcgggagaggaggcccggctgccacccagggaagaagcagagctggcagagggcaagaccctcccgacagcaggcaccgtgggccgtgtgctcgccatgctggtccaggagatgaagagcatcatgcagcgagacctcaaccgcaagatggtggagaacgtggccttcggagcctttgaccagtggtgggagagcaaggaggagaaggccaagccattccagaacgcggccaagcagcaagccaaggaggaggataaagagaagacgaagctgaaggagcctggcctgctgtccctcgtggactgggccaagagcgggggcactacgggcatcgaggctttcgcctttgggtcagggctgagaggggccctgcggctgccttcattcaaggtaaagcggaaagagccatcggaaatttccgaggccagtgaggaaaagaggcctcgtccctccactcctgctgaggaagatgaagacgaccctgaacaagagaaggaggctggagagccaggacgtccggggaccaagcccccgaagcgggacgaagagcgaggcaagacccagggcaagcaccgcaagtcctttgctctggacagcgaaggggaggaggcatcccaggagtcctcctcggagaaggatgaggaggatgacgaggaagatgaggaagatgaagatcgagaggaagctgtggataccacaaagaaggagacagaggtgtcggatggcgaggacgaggaaagcgattcgtcttccaaatgttctctgtatgctgactcagatggcgaaaatgacagcacatcagactccgagagcagcagctcttccagctcctcatcctcctcctcctcctcgtcctcatcctcctcgtcctcttcatcctctgagtcctcctctgaagatgaagaggaagaggagcggccagcagcccttccctcagcctccccgccccccagagaagtcccagtgcccacgccagcacctgtggaggtgccagtgccggaaagggttgcaggctccccagtcacacccctgcccgaacaggaggcgtctccagcaaggcctgcaggccccacggaggagtcaccccccagtgcgcctctgcgtcccccagaaccacctgctgggcccccggcccctgccccacgccccgatgagcgtccctcttctcccatccccctcctgcccccacccaagaaacgccggaaaactgtctccttctctgccatcgaggtggtgccagccccggagccccctccagccacaccgccgcaggccaagtttcccggcccagcctcccgcaaggctccccggggcgtggagcggaccatccgcaacctgcccctggaccacgcatctctggtcaagagttggcccgaggaggtgtcccgaggaggccggagccgggctggaggccgaggccgcctcaccgaggaagaggaggctgagccagggacagaggtggacctggcggtcctggccgacctggccctgacccctgcccggcgcgggctgcctgccctgcctgctgttgaagactcagaggccacagagacatcggacgaggccgagcgccctaggcccctgctcagccacatcctcctggagcacaactatgccctggccgtcaagcccacgccccctgcgccagccctgcggcccccggagccagtgcccgcgcctacgagccacgcagtgagtttgaacagatgaccatcctgtatgacatttggaactcgggcctggactcagaggacatgagttacctgcggcttacgtacgagcggctgctgcagcagacaagcggggctgactggctcaacgacactcactgggtccatcacacaatcaccaacctgaccaccccaaaacgcaagcggcggccccaggatgggccccgggagcaccagacaggctcagcccgcagcgaaggctactaccccatcagcaagaaggagaaggacaagtacctggacgtgtgcccagtctcggcccggcagctggagggcgtggacactcaggggacgaaccgcgtgctgtccgagcgccggtccgagcagcggcggctgctgagcgccatcggtacctccgccatcatggacagtgacctgctgaaactcaaccagctcaagttccggaagaagaagctccgatttggccggagccggatccacgagtggggtctgtttgccatggaacccattgctgctgacgagatggtcatcgaatacgtgggtcagaacatccgtcagatggtggccgacatgcgggagaagcgctacgtgcaggagggcattggcagcagctacctgttccgggtggaccacgacaccatcatcgatgccaccaagtgtggcaacctggccagattcatcaaccactgctgcacgcctaactgctacgccaaggtcatcaccatcgagtcccagaagaagatcgtgatctactccaagcagcccattggcgtggacgaggagatcacctacgactacaagttcccactggaagacaacaagatcccgtgtctgtgtggcacagagagctgccggggctccctaaactgaggtggggcaggatgggtgcccacacccctatttattccccctggtgccctgagctcccagcacccccccagccttagtgggctcagcagggcccacatgcccccatctccaagcgtggggttgggggccccaagcccagcgagggagcctcagtccctggaggcagcttctgcctctcctgtcgcccctgcccaccaccccctgattgtttttctttgcggagaagaagctgtaaatgttttgtagcagccagcagctgtttcctgtggaaacctggggtgccggcctgtacagattctgtcctggggggctacacagtcctctcgctttgtgttaatggggacttccccttacgccctgcgtgtacccctccccagtttaggggtctctggggcagtggccatgttctccccctgggggggctctgcacccccagtcctggggactccgtgcctggaaccctgcctcatctgttcctgccagaccctgagggtcacccttccaccctggtgtcactccccggctcagccaggccaggatggcggggtgggtcccttttgctgggctggactgtacatatgttaatagcgcaaacccgacgccacatttttataattgtgattaaactttattgtacaaaagtgtttggtcggtgtatttgggcaggagcgaggggttgggggtagagggcacggagggttgtgcaagttgaagagagggaaaagtgggtacctgaagtgtggggcaggtaaagggcccttcaggcaagagcccagacctgcagagacagtccgagactgtctcggaccccctgacaggctgcagcagccgcacccgcaccaggaataccccaccagtgcccgccagggtggtgccaaggtcaggcctccccttcctacaatcacagctgcagctggacctccggcctcctgggaagcccagcaggagggaaggcctgaggtcacactgtgggatgaggtcaccgctggctccacccacagccccagaccccttcagcccactctgcaagttcgagcttcatccccaccaagttctccgctggacccagatgccagtggagcacagagcgccgcc

SEQ ID NO: 9861 - DNA, 741 bp, Homo sapiens
taaatatgttcatgattaatttgtaattttaaggagatggaatttgaaaatacctgagaatgttatggaatgttacagaattcggcttcataaattaagaaagatgtcctagctctgttagcttctattcataatggatataactacttaaactctttgaacttcaatttcaaagatacctcctgtctcaaaaagctgtgagaattggacacatttcagaagagtgctatgtgagctctaaagcattatattaaaaaagcctgttactttgtttttgttgttgttataatatttttatcccactcatcgtttgctggaaacggctccctttagatcaggaaggttgattttgtgcctttcaccactcgtaattcagtgacttgaaactggccatggcgggagtatttacacaaaggaagtcagtaaatattataaatcaggaccttggccgggcaccgtggctcatgcctatagtcccagcactttgggaggccgaggcgggcagatcacgaggttgggaaatcaagaccatcctggctaacacagtgaaaccctgtctctactaaacagaaaatgcaaagaattagccgggcgtggtggcacgtgcctgtggtcccagctactcgggaggctgaggcgggagaatcgtttgagcccgggagacagaggttgcagtgagctaagatcgtgccactgcactccagcctgggcgacagggcgagactctgtgtaaaaaaaaaa

SEQ ID NO: 9862 - DNA, 391 bp, Homo sapiens
aattgagatgtgctgtcaatgtgaaatgcacaatgtattttaaatagtctgaaaagtaaaatcttttacttagtacaaaagaaagtaatactttaaaaatagtgattggccgggcgcagtggctcaacacctgtaatcccagcactttgggaggccgaggcgggagatcatgaggtcaggagttcgagaccagcctgacgaacatggcaaaaccctgtctttactaaaaatataaaaatcagccaggcgtggtggcgcacgcctgtaatcccagctactggggaggctgaggcaggagaatcgcttgaacccgggaggcagaggttgcagtgagccaagatcacaccactgcactccagtctgggtgacagaacgagactctgtctcaaaa

SEQ ID NO: 9863 - DNA, 379 bp, Homo sapiens
aaaacatgttgtaagatcttcattattaaaatattaaaactcctatttatcaaattgtttttttattttcacagcctaagaaactaagttgtaaactatgtaaccatgtgggaaaagaagttatcattgaggaagtaaagagaaactaggaaatactggtttgtttccctttccaggaaaacattaaatagctgttgctatatgttatcccttttaacatcatctttctaaaagtgaaataactttatattgaataaaaatttatgaatttactcataaatagtgataacaattaggaatctacaagttgattttttaggtcaaaacaagaacaaccatccataatgctttgaggccttttcttgtattttgatgcagt

SEQ ID NO: 9864 - DNA, 189 bp, Homo sapiens
taataagtgcatactgagtaaagacatttcaaaatttattttttcaaaagcatcaaattatacattttgtagtaatcattgcagtgcataatggtaaagttgctgtcctttaataaataaacagttctggaagcacttagtgatgttttaaactcaatatttcttaatttcttccagtcacttttatgc

SEQ ID NO: 9865 - DNA, 224 bp, Homo sapiens
gtgaaaacgaagaagatatcacagtctgtccaggaaggaaacagaggagcaggtgaatgctcaggaaaccggattcgtagtatgcactaccccagaattggggctggcaaattctgctcttaaaacccccacctagagccaactgctgcccctaataatatgcccaaaatattaccaggacgaaggcctcatgcttcctggatgaaccacaaaaaaaaaggttg

SEQ ID NO: 9866 - DNA, 136 bp, Homo sapiens
tggggtctcactcatagctcactgcagcctcaatctccctggctcaagcaatcttcttgcctcagcttccacggtaactgggactacagataggcaccatgatacctggctaattcttttttatttttagtagaga

SEQ ID NO: 9867 - DNA, 503 bp, Homo sapiens
gacaattccaggtcacttcgatctgcctaatggactctttgagatttggccagtgaatttcatccagctacctccctatcaaggttataaaccatggtttgtgttttccgtttgggtagacgcactctcttgttgacaggccactacctcagcggtttcaaagctgttgttagaaaaggttatcctacatggggcaaaccctcagacttatatggtgactgaggaaatgcacctcactgggccatgaggaaagagcaaatttgccaagattggcccatatttcaaccctttccttgtgcttatctccaatcttccttattggcagaaagaacaaatggcattctcaaaacccaactggtgaaatttgaggaggcattacagctgccctgggacaaaggtacttgctctggtccttttgagtctaaggtatgcactttttggaaaacataactcgtcaccttttgaaattattactggatggccaatacatttagcccactctg

SEQ ID NO: 9868 - DNA, 295 bp, Homo sapiens
aacagcctccacccactcacttgatctgacttcctaataatacactctttggatcaaggtggggaataagtggagaagcattgaatcgctcattcgattctcacagagactgtagcaaggcaggacaaggtctaactgaatacactcagattctcctatttcccattgttttccattaaaagaaaaaaaggtataggtcattttatagtgagaataaacaacatgccacagtaagcgtttcacatattcgttcatgaatcagagaagctgcttcccgtgtgtgtcattgtctaaa

SEQ ID NO: 9869 - DNA, 320 bp, Homo sapiens
gtcccagggattaaggcatgaatgtctttggaggggatattatcctgcctaccataatactgcttttctttctccttataatagggatactgtgattttcctgacccacctcacagggctattatgagaatcaaatgcagtaatggacataaaaatgtttttacaaatggtaagagtcaatagatgtagaaggagttttatccttcttttactatggagagacagagggttcagagtaaaagaagcatcatggaatgaaacaataggaaaaaggtactaagagtaaaggttaaagggggaggttgtgtttaacctaaagg

SEQ ID NO: 9870 - DNA, 407 bp, Homo sapiens
cttcaccatctttcatgggacaaatgcttccagaatgaatgaataaatgaaggggagggcaagggtcttccaaggaaaggacctctgagttcagcctaggcgacagctacacactgtctgccggtggacacccaactctctatcttccccgaaatctgctcggctagttgtgctacctctctgtgcctcagcttcctcacctgtggaagggggacagtgccagctatctctcagatcgtggtggctggggtgccatgtgctctgccactccttgactgtaaggcctcaggccagcctcttcatctacccacctctgcctcctcgtccatcacacggatcggaaacaggacgtactgcttatcagctgctatgcaataaattgtgttccctaaaaggtatgttgaagc

SEQ ID NO: 9871 - DNA, 143 bp, Homo sapiens
taaatgattgattgttccatagaatatgaagagacattaaataaatcttaaaatatttataaagttttggttaaaatgagcacaatttcttctcaaaaaaattcactgccagcctgggcaacatagggagacactgtctctac

SEQ ID NO: 9872 - DNA, 710 bp, Homo sapiens
acagagtctgttacaaacgtaatatccaattgcagtgagatggaactgaagacttacaaagcagaggcacacttcctatgagacaggggccttgccacaaacgacacgtctggcttcttgagcagtttcactcagactatttaggagcccatcagaatattcagtggcagaacaaggtcagtaatggcaaacactcagaatgcagcctgtgtaagagctttgaaccaattcttccacaatacagctttactgagcgggatttgtgtggagaatggactacagcaggactcctaggcggccattgaatcgcaagctgaggtggggaaagcgcaagctgaggaggcagaaggaatgttgtctgagacctgctgcagtgcaccctgagcagtgaggtcacagcaggcccagccatgggcaagcagcctggcatccagctgggagggatgggattgctgttggtgagcagaggctctggctagctcttgagtctaaaaagcaggaccacaaagaaaacagactatttaaatagcaggtgaagccgcttacaaaagagcaaacttgatgcaaattctgtgtggaaaagattgttggtctcattttattgtctttggccatacccataaatctgactcaggaaagacatttatatgtacacaagtgtatacaaataaaagtaaagttttactctattactttccaccccttcatcc

SEQ ID NO: 9873 - DNA, 601 bp, Homo sapiens
acccgcttgggcagcgacagctgttccaggcactccgcgtcgagcaccggagtcccgagccgtggctgccacgggcggtgggcgggcggaggagagcaccggaccaccagtgcaggctgccgagtcggggcggccgcccacggggaagctgcgaggcgcgggagcacctgggggaccgcttgcagcggggacgcgaggacccgggctgggctttcctcacccgggtaccttgttatcccataactttggtatcctgaaatctgaggattccaccaagataatatgataagaactttcagtgatttggggccatatcctacttagactaatgtggaatttccagatttcctgagagcttggtacagcagcacacactgcttgctaatcagcacaggcaataatgccatctctgcctcaagaaggagttattcagggaccctctcccctggatttgaatacagaattaccttatcaaagcacaatgaaaaggaaagtcagaaagaagaaaaagaagggaaccattacagcaaatgttgccgggacaaagtttgaaattggtaggtttccttagaagcaatcatgggattctcataattgctgg

SEQ ID NO: 9874 - DNA, 862 bp, Homo sapiens
ataacttttttagataggttcttaatatgttgccttattacatttcagctcttactcacctgaatagcctgttttgttgctatccagttgtattggctctttgcatgaagcctgcatcttttgcagacttaagttttaacctctttctatctttagggaagaatcaatagaaaaacctcttctggttgggcgtggtggctgacacctgtaatcccagcattttgggaggccaaggcgggtggatcacgaggtcaagagattgagaccttccctggccaacatagtgaaaccccatctctactaaaaatacaaaaattagctgggtatggtggcacacgcctgtagtcccagctactcaggaggctgaggcaggagaattgcttaaacccgggaggtggaggctacagtgagctgagattgggccactgcactacagcttggtgacagcgagactccatctcaaaaaacaaacaacaaccatcaaaaaaaaaaacaaaacaaaaaaaacacctcttcctaagatggtgctttaaagatgtagagtagattgcatagggagaccaggatgcagaaatacttgtgatgtcagctatatgtaatctggtttcattcttttatttttagaacataatacaaacttatattcagaagaaaatagacctcaaactaaaaagccaaatataaggaattctagagagttgacagtttgtatagaccttattcatttattagtttagaaggtaatataaaattgactgtagtgaacaaataagtcatttttgccagtgcttatgtctgtgaatatagtgaatctagaataacaaaagtaatttggatattgaattatcactattcaacctag

SEQ ID NO: 9875 - DNA, 3332 bp, Homo sapiens
acccgcttgggcagcgacagctgttccaggcactccgcgtcgagcaccggagtcccgagccgtggctgccacgggcggtgggcgggcggaggagagcaccggaccaccagtgcaggctgccgagtcggggcggccgcccacggggaagctgcgaggcgcgggagcacctgggggaccgcttgcagcggggacgcgaggacccgggctgggctttcctcacccgggtaccttgttatcccataactttggtatcctgaaatctgaggattccaccaagataatatgataagaactttcagtgatttggggccatatcctacttagactaatgtggaatttccagatttcctgagagcttggtacagcagcacacactgcttgctaatcagcacaggcaataatgccatctctgcctcaagaaggagttattcagggaccctctcccctggatttgaatacagaattaccttatcaaagcacaatgaaaaggaaagtcagaaagaagaaaaagaagggaaccattacagcaaatgttgccgggacaaagtttgaaattgttcgtttagtaatagatgaaatgggatttatgaaaactccagatgaggatgaaacaagtaatcttatatggtgtgattctgctgttcagcaggagaaaatttcagagctgcaaaattatcagaggatcaaccattttccaggaatgggggagatctgtaggaaggatttcttagcaagaaatatgaccaaaatgatcaagtctcggcctctggattatacctttgttcctcgaacttggatctttcctgctgaatatactcaattccaaaattatgtgaaagaattgaagaaaaaacggaagcagaaaacttttatagtgaaaccagctaatggtgcaatgggtcatgggatttctttgataagaaatggtgacaaacttccatctcaggatcatttgattgttcaagaatacattgaaaagcctttcctaatggaaggttacaagtttgacttacgaatttatattctggttacatcgtgtgatccactaaaaatatttctctaccatgatgggcttgtgcgaatgggtacagagaagtacattccacctaatgagtccaatttgacccagttatacatgcatctgacaaactactccgtgaacaagcataatgagcattttgaacgggatgaaactgagaacaaaggcagcaaacgttccatcaaatggtttacagaattccttcaagcaaatcaacatgatgttgctaagttttggagtgatatttcagaattggtggtaaagaccctgattgtagcagaacctcatgtcctgcatgcctatcgaatgtgtagacctggtcaacctccaggaagcgaaagtgtctgctttgaagtcctgggatttgatattttgttggatagaaaactaaagccatggcttctggagattaaccgagccccaagctttggaactgatcagaaaatagactatgatgtaaaaaggggagtgctgctaaatgcgttgaagctactaaacataaggaccagtgacaaaagaagaaacttggccaaacaaaaagctgaggctcaaaggaggctctatggtcaaaattcaattaaaaggctcttaccaggctcctcagactgggaacagcagagacaccagttggagaggcggaaagaagagttgaaagagagactcgctcaagtacgaaagcagatctcacgagaagaacatgaaaatcgacatatggggaattatagacgaatttatcctcctgaagataaagcattacttgaaaagtatgaaaatttgttagctgttgcctttcagaccttcctttcaggaagagcagcttcattccagcgagagttgaataatcctttgaaaaggatgaaggaagaagatattttggatcttctggagcaatgtgaaattgatgatgaaaagttgatgggaaaaactaccaagactcgaggaccaaagcctctgtgttctatgcctgagagtactgagataatgaaaagaccaaagtactgcagcagtgacagcagttatgatagtagcagcagctcttcagaatctgacgaaaatgaaaaagaagagtaccaaaataagaaaagagaaaagcaagttacatataatcttaaaccctccaaccactacaaattaattcaacaacccagctccataagacgttcagtcagctgccctcggtccatctctgctcaatcaccttccagtggggacacccgcccattttctgctcaacaaatgatatctgtgtcacggccaacttctgcatctcggtcacattccttaaaccgtgcttcctcctacatgaggcatctgcctcacagtaatgatgcctgctctaccaactctcaagtgagtgagtctttgcggcaactgaaaacaaaagaacaagaagatgatctaacaagtcagaccttatttgttctcaaagacatgaagatccggtttccaggaaagtcagatgcagaatcagaacttctgatagaagatatcattgataactggaagtatcataaaaccaaagtggcttcatattggctcataaaattggactctgtaaaacaacgaaaagttttggacatagtgaaaacaagtattcgtacagttcttccacgcatctggaaggtgcctgatgttgaagaagtaaatttatatcggattttcaaccgggtttttaatcgcttactctggagtcgtggccaagggctgtggaactgtttctgtgattcaggatcctcttgggagagtatattcaataaaagcccggaggtggtgactcctttgcagctccagtgttgccagcgcctagtggagctttgtaaacagtgcctgctagtggtttacaaatatgcaactgacaaaagaggatcactttcaggcattggtcctgactggggtaattccaggtatttactaccagggagcacccaattcttcttgagaacaccaacctacaacttgaagtacaattcacctggaatgactcgctccaatgttttgtttacatccagatatggccatctgtgaaacagaagggaagatcgccattggttatacataacagcaattcatttttttcctctgaagttgaacatgcaaagaacatgaccattaagtgctgttttatgtatataagacatatatatgtgtgaaaatatatgcacatatgcaccctaataacatatatttattatattaaatgatatatgaaagaagaattagcagaaaatggaatataagacttaacctttctggaaacgtaataaaccatgttaaaattgtttacaaaaaaaaa

SEQ ID NO: 9876 - DNA, 3147 bp, Homo sapiens
gctttgcgtgactgactctcttaatttccaccgctacacgtaccttgttatcccataactttggtatcctgaaatctgaggattccaccaagataatatgataagaactttcagtgatttggggccatatcctacttagactaatgtggaatttccagatttcctgagagcttggtacagcagcacacactgcttgctaatcagcacaggcaataatgccatctctgcctcaagaaggagttattcagggaccctctcccctggatttgaatacagaattaccttatcaaagcacaatgaaaaggaaagtcagaaagaagaaaaagaagggaaccattacagcaaatgttgccgggacaaagtttgaaattgttcgtttagtaatagatgaaatgggatttatgaaaactccagatgaggatgaaacaagtaatcttatatggtgtgattctgctgttcagcaggagaaaatttcagagctgcaaaattatcagaggatcaaccattttccaggaatgggggagatctgtaggaaggatttcttagcaagaaatatgaccaaaatgatcaagtctcggcctctggattatacctttgttcctcgaacttggatctttcctgctgaatatactcaattccaaaattatgtgaaagaattgaagaaaaaacggaagcagaaaacttttatagtgaaaccagctaatggtgcaatgggtcatgggatttctttgataagaaatggtgacaaacttccatctcaggatcatttgattgttcaagaatacattgaaaagcctttcctaatggaaggttacaagtttgacttacgaatttatattctggttacatcgtgtgatccactaaaaatatttctctaccatgatgggcttgtgcgaatgggtacagagaagtacattccacctaatgagtccaatttgacccagttatacatgcatctgacaaactactccgtgaacaagcataatgagcattttgaacgggatgaaactgagaacaaaggcagcaaacgttccatcaaatggtttacagaattccttcaagcaaatcaacatgatgttgctaagttttggagtgatatttcagaattggtggtaaagaccctgattgtagcagaacctcatgtcctgcatgcctatcgaatgtgtagacctggtcaacctccaggaagcgaaagtgtctgctttgaagtcctgggatttgatattttgttggatagaaaactaaagccatggcttctggagattaaccgagccccaagctttggaactgatcagaaaatagactatgatgtaaaaaggggagtgctgctaaatgcgttgaagctactaaacataaggaccagtgacaaaagaagaaacttggccaaacaaaaagctgaggctcaaaggaggctctatggtcaaaattcaattaaaaggctcttaccaggctcctcagactgggaacagcagagacaccagttggagaggcggaaagaagagttgaaagagagactcgctcaagtacgaaagcagatctcacgagaagaacatgaaaatcgacatatggggaattatagacgaatttatcctcctgaagataaagcattacttgaaaagtatgaaaatttgttagctgttgcctttcagaccttcctttcaggaagagcagcttcattccagcgagagttgaataatcctttgaaaaggatgaaggaagaagatattttggatcttctggagcaatgtgaaattgatgatgaaaagttgatgggaaaaactaccaagactcgaggaccaaagcctctgtgttctatgcctgagagtactgagataatgaaaagaccaaagtactgcagcagtgacagcagttatgatagtagcagcagctcttcagaatctgacgaaaatgaaaaagaagagtaccaaaataagaaaagagaaaagcaagttacatataatcttaaaccctccaaccactacaaattaattcaacaacccagctccataagacgttcagtcagctgccctcggtccatctctgctcaatcaccttccagtggggacacccgcccattttctgctcaacaaatgatatctgtgtcacggccaacttctgcatctcggtcacattccttaaaccgtgcttcctcctacatgaggcatctgcctcacagtaatgatgcctgctctaccaactctcaagtgagtgagtctttgcggcaactgaaaacaaaagaacaagaagatgatctaacaagtcagaccttatttgttctcaaagacatgaagatccggtttccaggaaagtcagatgcagaatcagaacttctgatagaagatatcattgataactggaagtatcataaaaccaaagtggcttcatattggctcataaaattggactctgtaaaacaacgaaaagttttggacatagtgaaaacaagtattcgtacagttcttccacgcatctggaaggtgcctgatgttgaagaagtaaatttatatcggattttcaaccgggtttttaatcgcttactctggagtcgtggccaagggctgtggaactgtttctgtgattcaggatcctcttgggagagtatattcaataaaagcccggaggtggtgactcctttgcagctccagtgttgccagcgcctagtggagctttgtaaacagtgcctgctagtggtttacaaatatgcaactgacaaaagaggatcactttcaggcattggtcctgactggggtaattccaggtatttactaccagggagcacccaattcttcttgagaacaccaacctacaacttgaagtacaattcacctggaatgactcgctccaatgttttgtttacatccagatatggccatctgtgaaacagaagggaagatcgccattggttatacataacagcaattcatttttttcctctgaagttgaacatgcaaagaacatgaccattaagtgctgttttatgtatataagacatatatatgtgtgaaaatatatgcacatatgcaccctaataacatatatttattatattaaatgatatatgaaagaagaattagcagaaaatggaatataagacttaacctttctggaaacgtaataaaccatgttaaaattgtttacaaaaaaaaa

SEQ ID NO: 9877 - DNA, 2851 bp, Homo sapiens
acccgcttgggcagcgacagctgttccaggcactccgcgtcgagcaccggagtcccgagccgtggctgccacgggcggtgggcgggcggaggagagcaccggaccaccagtgcaggctgccgagtcggggcggccgcccacggggaagctgcgaggcgcgggagcacctgggggaccgcttgcagcggggacgcgaggacccgggctgggctttcctcacccgggtaccttgttatcccataactttggtatcctgaaatctgaggattccaccaagataatatgataagaactttcagtgatttggggccatatcctacttagactaatgtggaatttccagatttcctgagagcttggtacagcagcacacactgcttgctaatcagcacaggcaataatgccatctctgcctcaagaaggagttattcagggaccctctcccctggatttgaatacagaattaccttatcaaagcacaatgaaaaggaaagtcagaaagaagaaaaagaagggaaccattacagcaaatgttgccgggacaaagtttgaaattgttcgtttagtaatagatgaaatgggatttatgaaaactccagatgaggatgaaacaagtaatcttatatggtgtgattctgctgttcagcaggagaaaatttcagagctgcaaaattatcagaggatcaaccattttccaggaatgggggagatctgtaggaaggatttcttagcaagaaatatgaccaaaatgatcaagtctcggcctctggattatacctttgttcctcgaacttggatctttcctgctgaatatactcaattccaaaattatgtgaaagaattgaagaaaaaacggaagcagaaaacttttatagtgaaaccagctaatggtgcaatgggtcatgggatttctttgataagaaatggtgacaaacttccatctcaggatcatttgattgttcaagaatacattgaaaagcctttcctaatggaaggttacaagtttgacttacgaatttatattctggttacatcgtgtgatccactaaaaatatttctctaccatgatgggcttgtgcgaatgggtacagagaagtacattccacctaatgagtccaatttgacccagttatacatgcatctgacaaactactccgtgaacaagcataatgagcattttgaacgggatgaaactgagaacaaaggcagcaaacgttccatcaaatggtttacagaattccttcaagcaaatcaacatgatgttgctaagttttggagtgatatttcagaattggtggtaaagaccctgattgtagcagaacctcatgtcctgcatgcctatcgaatgtgtagacctggtcaacctccaggaagcgaaagtgtctgctttgaagtcctgggatttgatattttgttggatagaaaactaaagccatggcttctggagattaaccgagccccaagctttggaactgatcagaaaatagactatgatgtaaaaaggggagtgctgctaaatgcgttgaagctactaaacataaggaccagtgacaaaagaagaaacttggccaaacaaaaagctgaggctcaaaggaggctctatggtcaaaattcaattaaaaggctcttaccaggctcctcagactgggaacagcagagacaccagttggagaggcggaaagaagagttgaaagagagactcgctcaagtacgaaagcagatctcacgagaagaacatgaaaatcgacatatggggaattatagacgaatttatcctcctgaagataaagcattacttgaaaagtatgaaaatttgttagctgttgcctttcagaccttcctttcaggaagagcagcttcattccagcgagagttgaataatcctttgaaaaggatgaaggaagaagatattttggatcttctggagcaatgtgaaattgatgatgaaaagttgatgggaaaaactaccaagactcgaggaccaaagcctctgtgttctatgcctgagagtactgagataatgaaaagaccaaagtactgcagcagtgacagcagttatgatagtagcagcagctcttcagaatctgacgaaaatgaaaaagaagagtaccaaaataagaaaagagaaaagcaagttacatataatcttaaaccctccaaccactacaaattaattcaacaacccagctccataagacgttcagtcagctgccctcggtccatctctgctcaatcaccttccagtggggacacccgcccattttctgctcaacaaatgatatctgtgtcacggccaacttctgcatctcggtcacattccttaaaccgtgcttcctcctacatgaggcatctgcctcacagtaatgatgcctgctctaccaactctcaagtgagtgagtctttgcggcaactgaaaacaaaagaacaagaagatgatctaacaagtcagaccttatttgttctcaaagacatgaagatccggtttccaggaaagtcagatgcagaatcagaacttctgatagaagatatcattgataactggaagtatcataaaaccaaagtggcttcatattggctcataaaattggactctgtaaaacaacgaaaaatgaagatgttttcagtttgtatgatgatgagaatgatttagaagagaggaatggcccaggaaagagaggtgttaaaaagttcttgagtaagtaagctgtgagagggggagggttttcctaatcaagagcatttattctaacaggggggaaggcaggtgcatgggaatgtggtgggaagatgggaaagttttcttctggtggggagggcttctggagattggggagagagtctccgtcgaact

SEQ ID NO: 9878 - DNA, 3155 bp, Homo sapiens
acccgcttgggcagcgacagctgttccaggcactccgcgtcgagcaccggagtcccgagccgtggctgccacgggcggtgggcgggcggaggagagcaccggaccaccagtgcaggctgccgagtcggggcggccgcccacggggaagctgcgaggcgcgggagcacctgggggaccgcttgcagcggggacgcgaggacccgggctgggctttcctcacccgggtaccttgttatcccataactttggtatcctgaaatctgaggattccaccaagataatatgataagaactttcagtgatttggggccatatcctacttagactaatgtggaatttccagatttcctgagagcttggtacagcagcacacactgcttgctaatcagcacaggcaataatgccatctctgcctcaagaaggagttattcagggaccctctcccctggatttgaatacagaattaccttatcaaagcacaatgaaaaggaaagtcagaaagaagaaaaagaagggaaccattacagcaaatgttgccgggacaaagtttgaaattgttcgtttagtaatagatgaaatgggatttatgaaaactccagatgaggatgaaacaagtaatcttatatggtgtgattctgctgttcagcaggagaaaatttcagagctgcaaaattatcagaggatcaaccattttccaggaatgggggagatctgtaggaaggatttcttagcaagaaatatgaccaaaatgatcaagtctcggcctctggattatacctttgttcctcgaacttggatctttcctgctgaatatactcaattccaaaattatgtgaaagaattgaagaaaaaacggaagcagaaaacttttatagtgaaaccagctaatggtgcaatgggtcatgggatttctttgataagaaatggtgacaaacttccatctcaggatcatttgattgttcaagaatacattgaaaagcctttcctaatggaaggttacaagtttgacttacgaatttatattctggttacatcgtgtgatccactaaaaatatttctctaccatgatgggcttgtgcgaatgggtacagagaagtacattccacctaatgagtccaatttgacccagttatacatgcatctgacaaactactccgtgaacaagcataatgagcattttgaacgggatgaaactgagaacaaaggcagcaaacgttccatcaaatggtttacagaattccttcaagcaaatcaacatgatgttgctaagttttggagtgatatttcagaattggtggtaaagaccctgattgtagcagaacctcatgtcctgcatgcctatcgaatgtgtagacctggtcaacctccaggaagcgaaagtgtctgctttgaagtcctgggatttgatattttgttggatagaaaactaaagccatggcttctggagattaaccgagccccaagctttggaactgatcagaaaatagactatgatgtaaaaaggggagtgctgctaaatgcgttgaagctactaaacataaggaccagtgacaaaagaagaaacttggccaaacaaaaagctgaggctcaaaggaggctctatggtcaaaattcaattaaaaggctcttaccaggctcctcagactgggaacagcagagacaccagttggagaggcggaaagaagagttgaaagagagactcgctcaagtacgaaagcagatctcacgagaagaacatgaaaatcgacatatggggaattatagacgaatttatcctcctgaagataaagcattacttgaaaagtatgaaaatttgttagctgttgcctttcagaccttcctttcaggaagagcagcttcattccagcgagagttgaataatcctttgaaaaggatgaaggaagaagatattttggatcttctggagcaatgtgaaattgatgatgaaaagttgatgggaaaaactaccaagactcgaggaccaaagcctctgtgttctatgcctgagagtactgagataatgaaaagaccaaagtactgcagcagtgacagcagttatgatagtagcagcagctcttcagaatctgacgaaaatgaaaaagaagagtaccaaaataagaaaagagaaaagcaagttacatataatcttaaaccctccaaccactacaaattaattcaacaacccagctccataagacgttcagtcagctgccctcggtccatctctgctcaatcaccttccagtggggacacccgcccattttctgctcaacaaatgatatctgtgtcacggccaacttctgcatctcggtcacattccttaaaccgtgcttcctcctacatgaggcatctgcctcacagtaatgatgcctgctctaccaactctcaagtgagtgagtctttgcggcaactgaaaacaaaagaacaagaagatgatctaacaagtcagaccttatttgttctcaaagacatgaagatccggtttccaggaaagtcagatgcagaatcagaacttctgatagaagatatcattgataactggaagtatcataaaaccaaagtggcttcatattggctcataaaattggactctgtaaaacaacgaaaagttttggacatagtgaaaacaagtattcgtacagttcttccacgcatctggaaggtgcctgatgttgaagaagtaaatttatatcggattttcaaccgggtttttaatcgcttactctggagtcgtggccaagggctgtggaactgtttctgtgattcaggtttactaccagggagcacccaattcttcttgagaacaccaacctacaacttgaagtacaattcacctggaatgactcgctccaatgttttgtttacatccagatatggccatctgtgaaacagaagggaagatcgccattggttatacataacagcaattcatttttttcctctgaagttgaacatgcaaagaacatgaccattaagtgctgttttatgtatataagacatatatatgtgtgaaaatatatgcacatatgcaccctaataacatatatttattatattaaatgatatatgaaagaagaattagcagaaaatggaatataagacttaacctttctggaaacgtaataaaccatgttaaaattgtttacaaaaaaaaa

SEQ ID NO: 9879 - DNA, 2566 bp, Homo sapiens
acccgcttgggcagcgacagctgttccaggcactccgcgtcgagcaccggagtcccgagccgtggctgccacgggcggtgggcgggcggaggagagcaccggaccaccagtgcaggctgccgagtcggggcggccgcccacggggaagctgcgaggcgcgggagcacctgggggaccgcttgcagcggggacgcgaggacccgggctgggctttcctcacccgggtaccttgttatcccataactttggtatcctgaaatctgaggattccaccaagataatatgataagaactttcagtgatttggggccatatcctacttagactaatgtggaatttccagatttcctgagagcttggtacagcagcacacactgcttgctaatcagcacaggcaataatgccatctctgcctcaagaaggagttattcagggaccctctcccctggatttgaatacagaattaccttatcaaagcacaatgaaaaggaaagtcagaaagaagaaaaagaagggaaccattacagcaaatgttgccgggacaaagtttgaaattgttcgtttagtaatagatgaaatgggatttatgaaaactccagatgaggatgaaacaagtaatcttatatggtgtgattctgctgttcagcaggagaaaatttcagagctgcaaaattatcagaggatcaaccattttccaggaatgggggagatctgtaggaaggatttcttagcaagaaatatgaccaaaatgatcaagtctcggcctctggattatacctttgttcctcgaacttggatctttcctgctgaatatactcaattccaaaattatgtgaaagaattgaagaaaaaacggaagcagaaaacttttatagtgaaaccagctaatggtgcaatgggtcatgggatttctttgataagaaatggtgacaaacttccatctcaggatcatttgattgttcaagaatacattgaaaagcctttcctaatggaaggttacaagtttgacttacgaatttatattctggttacatcgtgtgatccactaaaaatatttctctaccatgatgggcttgtgcgaatgggtacagagaagtacattccacctaatgagtccaatttgacccagttatacatgcatctgacaaactactccgtgaacaagcataatgagcattttgaacgggatgaaactgagaacaaaggcagcaaacgttccatcaaatggtttacagaattccttcaagcaaatcaacatgatgttgctaagttttggagtgatatttcagaattggtggtaaagaccctgattgtagcagaacctcatgtcctgcatgcctatcgaatgtgtagacctggtcaacctccaggaagcgaaagtgtctgctttgaagtcctgggatttgatattttgttggatagaaaactaaagccatggcttctggagattaaccgagccccaagctttggaactgatcagaaaatagactatgatgtaaaaaggggagtgctgctaaatgcgttgaagctactaaacataaggaccagtgacaaaagaagaaacttggccaaacaaaaagctgaggctcaaaggaggctctatggtcaaaattcaattaaaaggctcttaccaggctcctcagactgggaacagcagagacaccagttggagaggcggaaagaagagttgaaagagagactcgctcaagtacgaaagcagatctcacgagaagaacatgaaaatcgacatatggggaattatagacgaatttatcctcctgaagataaagcattacttgaaaagtatgaaaatttgttagctgttgcctttcagaccttcctttcaggaagagcagcttcattccagcgagagttgaataatcctttgaaaaggatgaaggaagaagatattttggatcttctggagcaatgtgaaattgatgatgaaaagttgatgggaaaaactaccaagactcgaggaccaaagcctctgtgttctatgcctgagagtactgagataatgaaaagaccaaagtactgcagcagtgacagcagttatgatagtagcagcagctcttcagaatctgacgaaaatgaaaaagaagagtaccaaaataagaaaagagaaaagcaagttacatataatcttaaaccctccaaccactacaaattaattcaacaacccagtaagtcaatttcttctaatttagatgttatataaagaattatggaactgaaattattaaactcagtaaaaggtccttgggccaaatgaaccctgttgtgtgtgaggagacctggattccatcccacttccttccctaaccagactcgggcacatcccttaattaagccctttcaagatctgcaaatagaaaacgaaagggctggattaaggatctattctatatttcatcgtttttgttaggtgccagatttttgcctgggttttgtaaaatgtgcctcatggctgatctgatgattatgtgtctcttaagccaatatattctctctcattcaatttctgcctctctacttccttcacccactttgttttatactatca

SEQ ID NO: 9880 - DNA, 2109 bp, Homo sapiens
acccgcttgggcagcgacagctgttccaggcactccgcgtcgagcaccggagtcccgagccgtggctgccacgggcggtgggcgggcggaggagagcaccggaccaccagtgcaggctgccgagtcggggcggccgcccacggggaagctgcgaggcgcgggagcacctgggggaccgcttgcagcggggacgcgaggacccgggctgggctttcctcacccggattaaccgagccccaagctttggaactgatcagaaaatagactatgatgtaaaaaggggagtgctgctaaatgcgttgaagctactaaacataaggaccagtgacaaaagaagaaacttggccaaacaaaaagctgaggctcaaaggaggctctatggtcaaaattcaattaaaaggctcttaccaggctcctcagactgggaacagcagagacaccagttggagaggcggaaagaagagttgaaagagagactcgctcaagtacgaaagcagatctcacgagaagaacatgaaaatcgacatatggggaattatagacgaatttatcctcctgaagataaagcattacttgaaaagtatgaaaatttgttagctgttgcctttcagaccttcctttcaggaagagcagcttcattccagcgagagttgaataatcctttgaaaaggatgaaggaagaagatattttggatcttctggagcaatgtgaaattgatgatgaaaagttgatgggaaaaactaccaagactcgaggaccaaagcctctgtgttctatgcctgagagtactgagataatgaaaagaccaaagtactgcagcagtgacagcagttatgatagtagcagcagctcttcagaatctgacgaaaatgaaaaagaagagtaccaaaataagaaaagagaaaagcaagttacatataatcttaaaccctccaaccactacaaattaattcaacaacccagctccataagacgttcagtcagctgccctcggtccatctctgctcaatcaccttccagtggggacacccgcccattttctgctcaacaaatgatatctgtgtcacggccaacttctgcatctcggtcacattccttaaaccgtgcttcctcctacatgaggcatctgcctcacagtaatgatgcctgctctaccaactctcaagtgagtgagtctttgcggcaactgaaaacaaaagaacaagaagatgatctaacaagtcagaccttatttgttctcaaagacatgaagatccggtttccaggaaagtcagatgcagaatcagaacttctgatagaagatatcattgataactggaagtatcataaaaccaaagtggcttcatattggctcataaaattggactctgtaaaacaacgaaaagttttggacatagtgaaaacaagtattcgtacagttcttccacgcatctggaaggtgcctgatgttgaagaagtaaatttatatcggattttcaaccgggtttttaatcgcttactctggagtcgtggccaagggctgtggaactgtttctgtgattcaggatcctcttgggagagtatattcaataaaagcccggaggtggtgactcctttgcagctccagtgttgccagcgcctagtggagctttgtaaacagtgcctgctagtggtttacaaatatgcaactgacaaaagaggatcactttcaggcattggtcctgactggggtaattccaggtatttactaccagggagcacccaattcttcttgagaacaccaacctacaacttgaagtacaattcacctggaatgactcgctccaatgttttgtttacatccagatatggccatctgtgaaacagaagggaagatcgccattggttatacataacagcaattcatttttttcctctgaagttgaacatgcaaagaacatgaccattaagtgctgttttatgtatataagacatatatatgtgtgaaaatatatgcacatatgcaccctaataacatatatttattatattaaatgatatatgaaagaagaattagcagaaaatggaatataagacttaacctttctggaaacgtaataaaccatgttaaaattgtttacaaaaaaaaa

SEQ ID NO: 9881 - DNA, 2268 bp, Homo sapiens
acccgcttgggcagcgacagctgttccaggcactccgcgtcgagcaccggagtcccgagccgtggctgccacgggcggtgggcgggcggaggagagcaccggaccaccagtgcaggctgccgagtcggggcggccgcccacggggaagctgcgaggcgcgggagcacctgggggaccgcttgcagcggggacgcgaggacccgggctgggctttcctcacccgggaattggtggtaaagaccctgattgtagcagaacctcatgtcctgcatgcctatcgaatgtgtagacctggtcaacctccaggaagcgaaagtgtctgctttgaagtcctgggatttgatattttgttggatagaaaactaaagccatggcttctggagattaaccgagccccaagctttggaactgatcagaaaatagactatgatgtaaaaaggggagtgctgctaaatgcgttgaagctactaaacataaggaccagtgacaaaagaagaaacttggccaaacaaaaagctgaggctcaaaggaggctctatggtcaaaattcaattaaaaggctcttaccaggctcctcagactgggaacagcagagacaccagttggagaggcggaaagaagagttgaaagagagactcgctcaagtacgaaagcagatctcacgagaagaacatgaaaatcgacatatggggaattatagacgaatttatcctcctgaagataaagcattacttgaaaagtatgaaaatttgttagctgttgcctttcagaccttcctttcaggaagagcagcttcattccagcgagagttgaataatcctttgaaaaggatgaaggaagaagatattttggatcttctggagcaatgtgaaattgatgatgaaaagttgatgggaaaaactaccaagactcgaggaccaaagcctctgtgttctatgcctgagagtactgagataatgaaaagaccaaagtactgcagcagtgacagcagttatgatagtagcagcagctcttcagaatctgacgaaaatgaaaaagaagagtaccaaaataagaaaagagaaaagcaagttacatataatcttaaaccctccaaccactacaaattaattcaacaacccagctccataagacgttcagtcagctgccctcggtccatctctgctcaatcaccttccagtggggacacccgcccattttctgctcaacaaatgatatctgtgtcacggccaacttctgcatctcggtcacattccttaaaccgtgcttcctcctacatgaggcatctgcctcacagtaatgatgcctgctctaccaactctcaagtgagtgagtctttgcggcaactgaaaacaaaagaacaagaagatgatctaacaagtcagaccttatttgttctcaaagacatgaagatccggtttccaggaaagtcagatgcagaatcagaacttctgatagaagatatcattgataactggaagtatcataaaaccaaagtggcttcatattggctcataaaattggactctgtaaaacaacgaaaagttttggacatagtgaaaacaagtattcgtacagttcttccacgcatctggaaggtgcctgatgttgaagaagtaaatttatatcggattttcaaccgggtttttaatcgcttactctggagtcgtggccaagggctgtggaactgtttctgtgattcaggatcctcttgggagagtatattcaataaaagcccggaggtggtgactcctttgcagctccagtgttgccagcgcctagtggagctttgtaaacagtgcctgctagtggtttacaaatatgcaactgacaaaagaggatcactttcaggcattggtcctgactggggtaattccaggtatttactaccagggagcacccaattcttcttgagaacaccaacctacaacttgaagtacaattcacctggaatgactcgctccaatgttttgtttacatccagatatggccatctgtgaaacagaagggaagatcgccattggttatacataacagcaattcatttttttcctctgaagttgaacatgcaaagaacatgaccattaagtgctgttttatgtatataagacatatatatgtgtgaaaatatatgcacatatgcaccctaataacatatatttattatattaaatgatatatgaaagaagaattagcagaaaatggaatataagacttaacctttctggaaacgtaataaaccatgttaaaattgtttacaaaaaaaaa

SEQ ID NO: 9882 - DNA, 1393 bp, Homo sapiens
gaaggaaggcactactagcaagcctgattgtgccactctttcttctggcctctgtgttctatgcctgagagtactgagataatgaaaagaccaaagtactgcagcagtgacagcagttatgatagtagcagcagctcttcagaatctgacgaaaatgaaaaagaagagtaccaaaataagaaaagagaaaagcaagttacatataatcttaaaccctccaaccactacaaattaattcaacaacccagctccataagacgttcagtcagctgccctcggtccatctctgctcaatcaccttccagtggggacacccgcccattttctgctcaacaaatgatatctgtgtcacggccaacttctgcatctcggtcacattccttaaaccgtgcttcctcctacatgaggcatctgcctcacagtaatgatgcctgctctaccaactctcaagtgagtgagtctttgcggcaactgaaaacaaaagaacaagaagatgatctaacaagtcagaccttatttgttctcaaagacatgaagatccggtttccaggaaagtcagatgcagaatcagaacttctgatagaagatatcattgataactggaagtatcataaaaccaaagtggcttcatattggctcataaaattggactctgtaaaacaacgaaaagttttggacatagtgaaaacaagtattcgtacagttcttccacgcatctggaaggtgcctgatgttgaagaagtaaatttatatcggattttcaaccgggtttttaatcgcttactctggagtcgtggccaagggctgtggaactgtttctgtgattcaggatcctcttgggagagtatattcaataaaagcccggaggtggtgactcctttgcagctccagtgttgccagcgcctagtggagctttgtaaacagtgcctgctagtggtttacaaatatgcaactgacaaaagaggatcactttcaggcattggtcctgactggggtaattccaggtatttactaccagggagcacccaattcttcttgagaacaccaacctacaacttgaagtacaattcacctggaatgactcgctccaatgttttgtttacatccagatatggccatctgtgaaacagaagggaagatcgccattggttatacataacagcaattcatttttttcctctgaagttgaacatgcaaagaacatgaccattaagtgctgttttatgtatataagacatatatatgtgtgaaaatatatgcacatatgcaccctaataacatatatttattatattaaatgatatatgaaagaagaattagcagaaaatggaatataagacttaacctttctggaaacgtaataaaccatgttaaaattgtttacaaaaaaaaa

SEQ ID NO: 9883 - DNA, 1429 bp, Homo sapiens
aggctaggtagaggcggggttgcaggttttttgaaacactcagtgggggacattttggtgaagatgcaatatttttatgtcatgtgatgctctttcctcacttgaccttggccgctttgtcctaacagtccacagtcctgccccgacccaccccatcccttttctctggcactccagtcccaggccttgggcctgaactactggaaaaggtctggcggctggggaggagtgccagcaatagttcataataaaaatctgttagctctcaaagctaattttttactaaagtttttatacagcctcaaattgttttattaaaaaaaagatttaaaatggtgatgcttacagcagtttgtacgagctcttaagtgttgattccatggaactgacggctttgcttgttttgattcttttccccctacttttcctaatggtttaaattctggaattacactggggttcttttgccttttttagcagaacatccgtccgtccatctgcatctctgtcccatgactcaggggcgcccactctgcttcgattctcctcctgtggaagaaaccattttgagcatgacttttcttgatgtctgaagcgttattttgggtactttttagggaggaatgcctttcgcaataatgtatccattccctgattgagggtgggtgggtggacccaggctccctttgcacacagagcagctacttctaagccatatcgactgttttgcagaggatttgtgtgtgctgcctcaggaggggagggctggtaggagggcggggagaggtctctgtcctactgctctccagagggcatttccccttgcgccttctcccacagggcccagcccctctcccctgccccagtccccagggggtactctggagtgagcagtgcccctgtgggggagcctgtaaatgcgggctcagtggaccactggtgactgggctcatgcctccaagtcagagtttccctggtgccccagagacaggagccacaagtgggatctgacctggtgagattatttctgatgacctcatcaaaaaaataaacaattcccaatgttccaggtgagggctttgaaaggccttccaaacagctccgtcgcccctagcaactccaccattgggcactgccatgcagagacgtggctggcccagaatggcctgttgccatagcaactggaggcgatggggcagtgaacagaataacaacagcaacaatcctttgcaggcagcctgctcccctgagcgctgggctggtgatggccgttggactctgtgagatggagagccaatctcacattcaagtgttcaccaaccactgatgtgtttttatttccttctatatgattttaagatgtgttttctgcattctgtaaagaaacatatcaaactaaataaaagcagtgtctttattacaacgccgt

SEQ ID NO: 9884 - DNA, 1681 bp, Homo sapiens
gccaggggctggaagctggaggggtctcttgggccatggacatccccacttccagcccatgtacactagtggcccacgaccaaggggtcttcatttccatgaaaaagggactccaagaggcagtggtggctgtggcccccaactttggtgctccagggtgggccagctgcttgtgggggcacctgggaggtcaaaggtctccaccacatcaacctattttgttttaccctttttctgtgcattgttttttttttttcctcctaaaaggaatatcacggttttttgaaacactcagtgggggacattttggtgaagatgcaatatttttatgtcatgtgatgctctttcctcacttgaccttggccgctttgtcctaacagtccacagtcctgccccgacccaccccatcccttttctctggcactccagtcccaggccttgggcctgaactactggaaaaggtctggcggctggggaggagtgccagcaatagttcataataaaaatctgttagctctcaaagctaattttttactaaagtttttatacagcctcaaattgttttattaaaaaaaagatttaaaatggtgatgcttacagcagtttgtacgagctcttaagtgttgattccatggaactgacggctttgcttgttttgattcttttccccctacttttcctaatggtttaaattctggaattacactggggttcttttgccttttttagcagaacatccgtccgtccatctgcatctctgtcccatgactcaggggcgcccactctgcttcgattctcctcctgtggaagaaaccattttgagcatgacttttcttgatgtctgaagcgttattttgggtactttttagggaggaatgcctttcgcaataatgtatccattccctgattgagggtgggtgggtggacccaggctccctttgcacacagagcagctacttctaagccatatcgactgttttgcagaggatttgtgtgtgctgcctcaggaggggagggctggtaggagggcggggagaggtctctgtcctactgctctccagagggcatttccccttgcgccttctcccacagggcccagcccctctcccctgccccagtccccagggggtactctggagtgagcagtgcccctgtgggggagcctgtaaatgcgggctcagtggaccactggtgactgggctcatgcctccaagtcagagtttccctggtgccccagagacaggagccacaagtgggatctgacctggtgagattatttctgatgacctcatcaaaaaaataaacaattcccaatgttccaggtgagggctttgaaaggccttccaaacagctccgtcgcccctagcaactccaccattgggcactgccatgcagagacgtggctggcccagaatggcctgttgccatagcaactggaggcgatggggcagtgaacagaataacaacagcaacaatcctttgcaggcagcctgctcccctgagcgctgggctggtgatggccgttggactctgtgagatggagagccaatctcacattcaagtgttcaccaaccactgatgtgtttttatttccttctatatgattttaagatgtgttttctgcattctgtaaagaaacatatcaaactaaataaaagcagtgtctttattacaacgccgt

SEQ ID NO: 9885 - DNA, 318 bp, Homo sapiens
ccactctcactactcctattcaacacaatactggaagttctagccagagcaatcaggcaagagaaacaaataaaaggcatccacataggaaaagaagaagtcaaactacctctcttcacaggtaatattattctatacctacagaaccctaaagatcaacccaaacagctcctggaactgataaactacttcagtaatatttcaagatgtacaaaaatcagtagaatttctacacaccaataacgttcaagctgagagccaaaacaagaatgcaatcccatttacaatgccacacaaaaaaaatgaaactacctagga

SEQ ID NO: 9886 - DNA, 419 bp, Homo sapiens
gcaaccaaccattactgagcattctcgattttccaaggaaggtgctcatatatttttggtgaatcccatgaagcccatatttgtagcggacatatgctgtaatcccagaagcagaagggacctggtcctcctttctccactctccccacactgtggaagcttcagggcacagaggcgattgagagttgctcagcagcagtggtgctgagcatttagctctggccacaatatccggtggccagtgcagttgatgtcaacatcagtttcccaaccagaccaaccctgaggctttgccctgcatgactttccctgctccctgagctcccttaggttctgctaagcctggttctatagccttcccttctattgtgtgaattgtccaaaactgattcaataaattcctcttttgcctaagcaag

SEQ ID NO: 9887 - DNA, 1059 bp, Homo sapiens
gcactctggatatagttggtgttttcccattactgtattattaagcaaaatttagaatgaaatttttagggtactggctggtgattcaggatgcttgggatctagactttcattagcccctacctgcaagtttgctgatgggaggaaccttgtcttgttggtcatggtgtccctagtgctagcatggagtctgcacataatacttgttcacagagtaagtcagagctgaccaagttctctgttttctggagtagaggacttctatgtttcctgcaagctcagcacttccacctcctgtggctgcactaatacgaaatcagagaccactcgctgtacttcactttgaatcactcagtcaccaaaaagatagtgcttgccatgtgtcaggaacttggctaggcagggagaaattcatatgatttatataaatccataaatccatatgatttacataaatccataaattcatgtgatatatacgtatatgtgtgtgtatatatatattagagaatgtttgacatatacacaagtacatgttaccgacaccagcctatagaatagttttcgtgcatctccatatatctatcactggttccaacagccatcaatccatgttagctgccccatccaaatgccaccatcaccctcctcctgactatcatgttattttgaagcaatagcctgtaaatatttcagaatgctctccaaaatataaagactcctgtaaaaacatatgacaacaatgccattattactttctttgaatcaacattttttccttaatataatcaaatatttagaaatcaaatttgaataaaacatgggtcaatcttcaaagaatttatagcttaatggaacagatcaaggaaagcagggatgacactacagtagggtagcatcatatgcccatgtaacttatgtgacttaaactatcctgtaagggtgtgggggagaaagagaggaagagatggagagaagaaaaaggaagagaaggaggaggagaaggaggcagaggagaaggtggacggggaaggtagagaggaggaggaggggaattag

SEQ ID NO: 9888 - DNA, 3709 bp, Homo sapiens
  misc_feature (5)..(5): n is a, c, g, or t
cgcgncctgattgagaaatccgcgcgcagcctccgccgctgcacactgcagcctctgctgaacccctgccgcgccgccgccttcgccagcccggaccggaccggcccgccttcccttcctccgctccagccggcctccggccccgcaacctcctcctcggcgaagtctccctggccgccccatgtcggccgcccccgcctacagcgaagacaagggcggctccgctggccccggggagcccgagtacggccacgaccccgcgagcggcggcatcttctcctccgactacaagcggcatgatgacctgaaggagatgctggacaccaacaaggattctctcaagctggaggccatgaagaggattgtggcgatgattgcccgaggaaagaatgcttcagacctgtttcccgcggtggtgaagaacgtggcctgtaagaacatagaggtgaagaagcttgtctatgtgtacctggtacgctacgctgaggagcagcaagacctggccctgctgtccatctccaccttccaacgtggcctaaaggatcccaaccagctgattcgtgccagtgccctccgtgtcctctctagcatccgtgtgcccatcatagtgcccatcatgatgctagctatcaaggaagccgcctcggacatgtcaccctatgtgcggaaaacagctgcccacgccatccctaaactctacagtttggactctgaccagaaggatcagctgatagaagtcattgagaagcttctggctgacaagaccacgctggtggcgggcagtgtggtgatggcctttgaggaggtctgcccggagcgcatcgacctgattcacaaaaactaccggaaactctgtaacctgctgatcgacgtggaggagtggggccaggtggtcatcatcagcatgctcacccgctacgcccgcacgcagttcctgagccccacccagaacgaatccctactagaggagaacgcggaaaaagccttctacggctcagaggaggacgaggccaagggcgcggggtctgaggagacggccgccgcggccgccccctcccgaaagccctatgtcatggaccccgaccaccggctgctgctgcgcaacaccaaacccctgctgcagagccgcagcgccgcggtggtgatggcggtggcgcagctctacttccacctggcgcccaaggcggaagtgggcgtcatcgccaaggcgctggtgcgcctgctgcgcagccacagtgaggtgcagtacgttgtgctccagaacgtggccaccatgtccatcaagcgccggggtatgtttgagccctacctgaagagcttctacatcaggtccaccgaccccacccagattaagatcctgaagctggaagtgctgaccaacctggccaatgagaccaacattcctactgtcctacgggaattccagacctatattcgcagcatggacaaggactttgtggcagccacaatccaggccattggacgctgtgcaactaacatcggccgagtccgtgacacctgcctcaatggcctggtgcagctgctgtccaaccgtgatgagcttgtggttgcagagtcagtggtcgtcattaagaaattgctacagatgcagccagcacaacatggagagatcatcaaacacttggcaaagcttacagacaacatccaggtgcccatggcccgagccagcatcctgtggctcatcggagagtactgtgagcatgtccccaggattgcacctgatgtcttaagaaaaatggccaagtcattcacagcagaggaggatattgtcaagctgcaggtcatcaacctggcagccaagctctacctgaccaactctaaacagaccaagctgctgacccagtatgtgctgagtctggccaaatatgaccagaactatgatattcgcgaccgggcgcgcttcacccggcagctcatcgtcccttccgagcagggtggggccctcagccgccatgccaagaagctcttcctggcacccaaaccagctccagtcttggagtcatccttcaaagaccgggaccacttccagctgggctcactgtcccacctgcttaatgccaaggccacaggctaccaggagctcccagactggccggaggaagccccagacccatctgtgcgcaacgtggaggtacctgaatggaccaagtgctcaaatcgggagaagagaaaggagaaggaaaaacccttctactcggactctgagggggagtcaggccccacggagtccgcagacagtgaccctgagtctgagagtgaatcggacagtaagagcagcagtgagagcggctctggggagtccagcagtgagtccgacaatgaagaccaggatgaggatgaggagaaagggagaggcagtgagagtgaacagagtgaggaggatggtaagaggaagacaaagaagaaggtgccagagagaaaaggagaagcgtcatcctctgatgagggcagcgattccagcagtagctcatcagagtccgagatgacatcggagtccgaggaggagcagttagaacctgcctcctggagcaggaaaacacctcccagcagcaaaagtgctcctgcaaccaaggagatctccctgcttgatctagaggatttcacccctcccagtgtccagcctgtgtctcccccagcaattgtgtctaccagtctggctgctgacctggagggcctgacactcacagactccaccctggtaccgtcgcttctgagtccagtatcgggtgttgggcggcaggagctgctgcaccgggtagctggcgaggggctggctgtggactacaccttcagccgccaacctttctccggggatccccacatggtgtccgtgcacatccacttctccaacagctctgatacccccatcaagggcctgcatgtgggcactcccaaactgcctgctggcatcagcatccaagaatttcccgaaattgagtccctggcacctggagaatctgccactgctgtaatgggcattaatttctgtgactcaacccaggcagccaacttccagctgtgcacccagacccgacagttctacgtctccattcagccacctgttggggagctgatggcccctgtgttcatgagtgaaaatgagtttaagaaggaacagggaaagctgatgggcatgaatgagatcacagagaaactcatgctgccagacacctgtcggagtgaccacattgtggtgcagaaagtgactgccactgccaacctgggtcgtgttccttgtgggacatctgatgagtacaggtttgcagggaggacactgactggtggaagcctcgttctgctgaccctggatgcccggccagctggagctgcccagctgactgtcaacagcgagaaaatggtgattggcaccatgctggtaaaggatgtgatacaggctctgacccagtgacttccaaatgctgtgacctgtttggctcccatctatacctccccatgacacctaggctgtcagtctctctcatctttctctctctctctcatcatcctcctcatgccagatagcattcagggtgtcctctctccctctggaggaccaagccctcccctaatgccctccccatggattccttagtgatctgtgcagagagagatggcagccactcccttcagtcctcccagatttctgtagctatttatgtagcaggctcaataaaatgtcttctctcta

SEQ ID NO: 9889 - DNA, 448 bp, Homo sapiens
atctagtaggatcccctaatctgtactcatttccctgagtgtctaaccgtgatgatcagagggtgtctgcctgcaggtctgactctgctggccactggatatccaccagtctgcctagacacaatgtgtatccattggtctgtctgtcttgatcagggcccaagtgttcctacacctctgagggctgctagagaactgaagggggttgagagaaagagccaagggcctggggcactgcaggtgtgtctgtccacctgagtgtggccatctgactgtcttggggtccacacactcatttttgttctgtagagcttgtggttgcagagtcagtggtcgtcattaagaaattgctacagatgcagccagcacaacatggagagatcatcaaacacttggcaaagcttacagacaacatccaggtgagggagaagccatattttcactcccc

SEQ ID NO: 9890 - DNA, 446 bp, Homo sapiens
taggggcacagagatagcatctaacatgatcaacactctggtggacaagacagatgatgaaataagcaagttcacatcagggcgggaggtgcttgcagcagcagatttgggccttggttgtttcaggactaacttaaatgtggtgagggtgagtgggggaaagggtgcttagagttcaggaggaaaccaggaacagtctccagcagccaagaaagccaagattctgtagagggctggtcagctgtgacagtggagaggagagtagggctaggctgggttctagacctatcaggtgatggtggccctccctctccccttcactgccttataccacttcagagtccctggcacctggagaatctgccactgctgtaatgggcattaatttctgtgactcaacccaggcagccaacttccagctgtgcacccagacccgacgttctctt

SEQ ID NO: 9891 - DNA, 4310 bp, Homo sapiens
  misc_feature (5)..(5): n is a, c, g, or t
cgcgncctgattgagaaatccgcgcgcagcctccgccgctgcacactgcagcctctgctgaacccctgccgcgccgccgccttcgccagcccggaccggaccggcccgccttcccttcctccgctccagccggcctccggccccgcaacctcctcctcggcgaagtctccctggccgccccatgtcggccgcccccgcctacagcgaagacaagggcggctccgctggccccggggagcccgagtacggccacgaccccgcgagcggcggcatcttctcctccgactacaagcggcatgatgacctgaaggagatgctggacaccaacaaggattctctcaagctggaggccatgaagaggattgtggcgatgattgcccgaggaaagaatgcttcagacctgtttcccgcggtggtgaagaacgtggcctgtaagaacatagaggtgaagaagcttgtctatgtgtacctggtacgctacgctgaggagcagcaagacctggccctgctgtccatctccaccttccaacgtggcctaaaggatcccaaccagctgattcgtgccagtgccctccgtgtcctctctagcatccgtgtgcccatcatagtgcccatcatgatgctagctatcaaggaagccgcctcggacatgtcaccctatgtgcggaaaacagctgcccacgccatccctaaactctacagtttggactctgaccagaaggatcagctgatagaagtcattgagaagcttctggctgacaagaccacgctggtggcgggcagtgtggtgatggcctttgaggaggtctgcccggagcgcatcgacctgattcacaaaaactaccggaaactctgtaacctgctgatcgacgtggaggagtggggccaggtggtcatcatcagcatgctcacccgctacgcccgcacgcagttcctgagccccacccagaacgaatccctactagaggagaacgcggaaaaagccttctacggctcagaggaggacgaggccaagggcgcggggtctgaggagacggccgccgcggccgccccctcccgaaagccctatgtcatggaccccgaccaccggctgctgctgcgcaacaccaaacccctgctgcagagccgcagcgccgcggtggtgatggcggtggcgcagctctacttccacctggcgcccaaggcggaagtgggcgtcatcgccaaggcgctggtgcgcctgctgcgcagccacagtgaggtgcagtacgttgtgctccagaacgtggccaccatgtccatcaagcgccggggtatgtttgagccctacctgaagagcttctacatcaggtccaccgaccccacccagattaagatcctgaagctggaagtgctgaccaacctggccaatgagaccaacattcctactgtcctacgggaattccagacctatattcgcagcatggacaaggactttgtggcagccacaatccaggccattggacgctgtgcaactaacatcggccgagtccgtgacacctgcctcaatggcctggtgcagctgctgtccaaccgtgatgagcttgtggttgcagagtcagtggtcgtcattaagaaattgctacagatgcagccagcacaacatggagagatcatcaaacacttggcaaagcttacagacaacatccaggtgcccatggcccgagccagcatcctgtggctcatcggagagtactgtgagcatgtccccaggattgcacctgatgtcttaagaaaaatggccaagtcattcacagcagaggaggatattgtcaagctgcaggtcatcaacctggcagccaagctctacctgaccaactctaaacagaccaagctgctgacccagtatgtgctgagtctggccaaatatgaccagaactatgatattcgcgaccgggcgcgcttcacccggcagctcatcgtcccttccgagcagggtggggccctcagccgccatgccaagaagctcttcctggcacccaaaccagctccagtcttggagtcatccttcaaagaccgggaccacttccagctgggctcactgtcccacctgcttaatgccaaggccacaggctaccaggagctcccagactggccggaggaagccccagacccatctgtgcgcaacgtggaggtacctgaatggaccaagtgctcaaatcgggagaagagaaaggagaaggaaaaacccttctactcggactctgagggggagtcaggccccacggagtccgcagacagtgaccctgagtctgagagtgaatcggacagtaagagcagcagtgagagcggctctggggagtccagcagtgagtccgacaatgaagaccaggatgaggatgaggagaaagggagaggcagtgagagtgaacagagtgaggaggatggtaagaggaagacaaagaagaaggtgccagagagaaaaggagaagcgtcatcctctgatgagggcagcgattccagcagtagctcatcagagtccgagatgacatcggagtccgaggaggagcagttagaacctgcctcctggagcaggaaaacacctcccagcagcaaaagtgctcctgcaaccaaggagatctccctgcttgatctagaggatttcacccctcccagtgtccagcctgtgtctcccccagcaattgtgtctaccagtctggctgctgacctggagggcctgacactcacagactccaccctggtaccgtcgcttctgagtccagtatcgggtgttgggcggcaggagctgctgcaccgggtagctggcgaggggctggctgtggactacaccttcagccgccaacctttctccggggatccccacatggtgtccgtgcacatccacttctccaacagctctgatacccccatcaagggcctgcatgtgggcactcccaaactgcctgctggcatcagcatccaagaatttcccgaaattgagtccctggcacctggagaatctgccactgctgtaatgggcattaatttctgtgactcaacccaggcagccaacttccagctgtgcacccagacccgacagttctacgtctccattcagccacctgttggggagctgatggcccctgtgttcatgagtgaaaatgagtttaagaaggaacagggaaagctgatgggcatgaatgagatcacagagaaactcatgctgccagacacctgtcggagtgaccacattgtggtgcagaaagtgactgccactgccaacctgggtcgtgttccttgtgggacatctgatgagtacaggtttgcagggaggacactgactggtggaagcctcgttctgctgaccctggatgcccggccagctggagctgcccagctgactgtcaacagcgagaaaatggtgattggcaccatgctggtaaaggatgtgatacaggctctgacccagtgacttccaaatgctgtgacctgtttggctcccatctatacctccccatgacacctaggctgtcagtctctctcatctttctctctctctctcatcatcctcctcatgccagatagcattcagggtgtcctctctccctctggaggaccaagccctcccctaatgccctccccatggattccttagtgatctgtgcagagagagatggcagccactcccttcagtcctcccagatttctgtagctatttatgtagcaggctcaataaaatgtcttctctctaaaaaaaaaaaaaaaaaaaaaaaaaaaaaaaaaaaaaaaaaaaaaaaaaaaaaaaaaaaaaaaaaggggggggggcgcacaaataagaaaccacccgcggggggcgcccaaaccatacgaggcgcaccaccgacgtcgttgtgtggaacacagagggggacccacaagaagagggacgagcgctatctaaaaacgcagcgagccgcgggcgacgcgtatataaaacacggacacggagtgggggagaacaaaggggacccccgagggggagactcacgtgtggcagaagagaggccccccttctcatccacggggggcgggggcgaaacccaaaagcaggggcggcccacacacaccccaccaccgacggagccacctatatcgcaaccagcacccccgaggggaggagacacacacataccgcaaactgatgaagcaggcggcatcaaaacagcgggggcaaccaaacgagacagcggggacaatgagcgggagcgccccagcagcaaacaagcaggtggcgaacgaagcaggaggagcctccagctgatggcgagcccaaccactacctcagaacacgaggaggcccacgacgagcaaca

SEQ ID NO: 9892 - DNA, 4164 bp, Homo sapiens
tgacagcgaggtgtatatcaagggaggccctcggtgctgcccacgcctacccagctcaatggtctgtacctatgaccatgcccctggtgtcctgagctcagcctcctacccactaagaaactcaacagtctggtctgtgtttggcagggcatgatgacctgaaggagatgctggacaccaacaaggattctctcaagctggaggccatgaagaggattgtggcgatgattgcccgaggaaagaatgcttcagacctgtttcccgcggtggtgaagaacgtggcctgtaagaacatagaggtgaagaagcttgtctatgtgtacctggtacgctacgctgaggagcagcaagacctggccctgctgtccatctccaccttccaacgtggcctaaaggatcccaaccagctgattcgtgccagtgccctccgtgtcctctctagcatccgtgtgcccatcatagtgcccatcatgatgctagctatcaaggaagccgcctcggacatgtcaccctatgtgcggaaaacagctgcccacgccatccctaaactctacagtttggactctgaccagaaggatcagctgatagaagtcattgagaagcttctggctgacaagaccacgctggtggcgggcagtgtggtgatggcctttgaggaggtctgcccggagcgcatcgacctgattcacaaaaactaccggaaactctgtaacctgctgatcgacgtggaggagtggggccaggtggtcatcatcagcatgctcacccgctacgcccgcacgcagttcctgagccccacccagaacgaatccctactagaggagaacgcggaaaaagccttctacggctcagaggaggacgaggccaagggcgcggggtctgaggagacggccgccgcggccgccccctcccgaaagccctatgtcatggaccccgaccaccggctgctgctgcgcaacaccaaacccctgctgcagagccgcagcgccgcggtggtgatggcggtggcgcagctctacttccacctggcgcccaaggcggaagtgggcgtcatcgccaaggcgctggtgcgcctgctgcgcagccacagtgaggtgcagtacgttgtgctccagaacgtggccaccatgtccatcaagcgccggggtatgtttgagccctacctgaagagcttctacatcaggtccaccgaccccacccagattaagatcctgaagctggaagtgctgaccaacctggccaatgagaccaacattcctactgtcctacgggaattccagacctatattcgcagcatggacaaggactttgtggcagccacaatccaggccattggacgctgtgcaactaacatcggccgagtccgtgacacctgcctcaatggcctggtgcagctgctgtccaaccgtgatgagcttgtggttgcagagtcagtggtcgtcattaagaaattgctacagatgcagccagcacaacatggagagatcatcaaacacttggcaaagcttacagacaacatccaggtgcccatggcccgagccagcatcctgtggctcatcggagagtactgtgagcatgtccccaggattgcacctgatgtcttaagaaaaatggccaagtcattcacagcagaggaggatattgtcaagctgcaggtcatcaacctggcagccaagctctacctgaccaactctaaacagaccaagctgctgacccagtatgtgctgagtctggccaaatatgaccagaactatgatattcgcgaccgggcgcgcttcacccggcagctcatcgtcccttccgagcagggtggggccctcagccgccatgccaagaagctcttcctggcacccaaaccagctccagtcttggagtcatccttcaaagaccgggaccacttccagctgggctcactgtcccacctgcttaatgccaaggccacaggctaccaggagctcccagactggccggaggaagccccagacccatctgtgcgcaacgtggaggtacctgaatggaccaagtgctcaaatcgggagaagagaaaggagaaggaaaaacccttctactcggactctgagggggagtcaggccccacggagtccgcagacagtgaccctgagtctgagagtgaatcggacagtaagagcagcagtgagagcggctctggggagtccagcagtgagtccgacaatgaagaccaggatgaggatgaggagaaagggagaggcagtgagagtgaacagagtgaggaggatggtaagaggaagacaaagaagaaggtgccagagagaaaaggagaagcgtcatcctctgatgagggcagcgattccagcagtagctcatcagagtccgagatgacatcggagtccgaggaggagcagttagaacctgcctcctggagcaggaaaacacctcccagcagcaaaagtgctcctgcaaccaaggagatctccctgcttgatctagaggatttcacccctcccagtgtccagcctgtgtctcccccagcaattgtgtctaccagtctggctgctgacctggagggcctgacactcacagactccaccctggtaccgtcgcttctgagtccagtatcgggtgttgggcggcaggagctgctgcaccgggtagctggcgaggggctggctgtggactacaccttcagccgccaacctttctccggggatccccacatggtgtccgtgcacatccacttctccaacagctctgatacccccatcaagggcctgcatgtgggcactcccaaactgcctgctggcatcagcatccaagaatttcccgaaattgagtccctggcacctggagaatctgccactgctgtaatgggcattaatttctgtgactcaacccaggcagccaacttccagctgtgcacccagacccgacagttctacgtctccattcagccacctgttggggagctgatggcccctgtgttcatgagtgaaaatgagtttaagaaggaacagggaaagctgatgggcatgaatgagatcacagagaaactcatgctgccagacacctgtcggagtgaccacattgtggtgcagaaagtgactgccactgccaacctgggtcgtgttccttgtgggacatctgatgagtacaggtttgcagggaggacactgactggtggaagcctcgttctgctgaccctggatgcccggccagctggagctgcccagctgactgtcaacagcgagaaaatggtgattggcaccatgctggtaaaggatgtgatacaggctctgacccagtgacttccaaatgctgtgacctgtttggctcccatctatacctccccatgacacctaggctgtcagtctctctcatctttctctctctctctcatcatcctcctcatgccagatagcattcagggtgtcctctctccctctggaggaccaagccctcccctaatgccctccccatggattccttagtgatctgtgcagagagagatggcagccactcccttcagtcctcccagatttctgtagctatttatgtagcaggctcaataaaatgtcttctctctaaaaaaaaaaaaaaaaaaaaaaaaaaaaaaaaaaaaaaaaaaaaaaaaaaaaaaaaaaaaaaaaaggggggggggcgcacaaataagaaaccacccgcggggggcgcccaaaccatacgaggcgcaccaccgacgtcgttgtgtggaacacagagggggacccacaagaagagggacgagcgctatctaaaaacgcagcgagccgcgggcgacgcgtatataaaacacggacacggagtgggggagaacaaaggggacccccgagggggagactcacgtgtggcagaagagaggccccccttctcatccacggggggcgggggcgaaacccaaaagcaggggcggcccacacacaccccaccaccgacggagccacctatatcgcaaccagcacccccgaggggaggagacacacacataccgcaaactgatgaagcaggcggcatcaaaacagcgggggcaaccaaacgagacagcggggacaatgagcgggagcgccccagcagcaaacaagcaggtggcgaacgaagcaggaggagcctccagctgatggcgagcccaaccactacctcagaacacgaggaggcccacgacgagcaaca

SEQ ID NO: 9893 - DNA, 4195 bp, Homo sapiens
gaacagcagcttttgcaatgatttctgggaaaaaggagtgtaaggttgaactccggaagggagaccagcttgcatctgctgggcggtcacctcaggcattaaaacaggcccctccaaaaaaacccttacaaggaacaggaagtgtttcaggtgtttcagcaattttaggtgttctgaaagtttttcagtgtttctggaagtgaagctacccattgcaacacctgttcaggtgtcagatttctgcaaccagagccaaaattaagtgtcccccagatacccatcactggcacaccatccaggctccagtcaagcggcagggaagcaagagctagtggtcgctggggacagtgacttccaaaggtgtggcctccccccatcagggcacctggtgccctttcatagctctgcctccacctctgcctttaggatcccaaccagctgattcgtgccagtgccctccgtgtcctctctagcatccgtgtgcccatcatagtgcccatcatgatgctagctatcaaggaagccgcctcggacatgtcaccctatgtgcggaaaacagctgcccacgccatccctaaactctacagtttggactctgaccagaaggatcagctgatagaagtcattgagaagcttctggctgacaagaccacgctggtggcgggcagtgtggtgatggcctttgaggaggtctgcccggagcgcatcgacctgattcacaaaaactaccggaaactctgtaacctgctgatcgacgtggaggagtggggccaggtggtcatcatcagcatgctcacccgctacgcccgcacgcagttcctgagccccacccagaacgaatccctactagaggagaacgcggaaaaagccttctacggctcagaggaggacgaggccaagggcgcggggtctgaggagacggccgccgcggccgccccctcccgaaagccctatgtcatggaccccgaccaccggctgctgctgcgcaacaccaaacccctgctgcagagccgcagcgccgcggtggtgatggcggtggcgcagctctacttccacctggcgcccaaggcggaagtgggcgtcatcgccaaggcgctggtgcgcctgctgcgcagccacagtgaggtgcagtacgttgtgctccagaacgtggccaccatgtccatcaagcgccggggtatgtttgagccctacctgaagagcttctacatcaggtccaccgaccccacccagattaagatcctgaagctggaagtgctgaccaacctggccaatgagaccaacattcctactgtcctacgggaattccagacctatattcgcagcatggacaaggactttgtggcagccacaatccaggccattggacgctgtgcaactaacatcggccgagtccgtgacacctgcctcaatggcctggtgcagctgctgtccaaccgtgatgagcttgtggttgcagagtcagtggtcgtcattaagaaattgctacagatgcagccagcacaacatggagagatcatcaaacacttggcaaagcttacagacaacatccaggtgcccatggcccgagccagcatcctgtggctcatcggagagtactgtgagcatgtccccaggattgcacctgatgtcttaagaaaaatggccaagtcattcacagcagaggaggatattgtcaagctgcaggtcatcaacctggcagccaagctctacctgaccaactctaaacagaccaagctgctgacccagtatgtgctgagtctggccaaatatgaccagaactatgatattcgcgaccgggcgcgcttcacccggcagctcatcgtcccttccgagcagggtggggccctcagccgccatgccaagaagctcttcctggcacccaaaccagctccagtcttggagtcatccttcaaagaccgggaccacttccagctgggctcactgtcccacctgcttaatgccaaggccacaggctaccaggagctcccagactggccggaggaagccccagacccatctgtgcgcaacgtggaggtacctgaatggaccaagtgctcaaatcgggagaagagaaaggagaaggaaaaacccttctactcggactctgagggggagtcaggccccacggagtccgcagacagtgaccctgagtctgagagtgaatcggacagtaagagcagcagtgagagcggctctggggagtccagcagtgagtccgacaatgaagaccaggatgaggatgaggagaaagggagaggcagtgagagtgaacagagtgaggaggatggtaagaggaagacaaagaagaaggtgccagagagaaaaggagaagcgtcatcctctgatgagggcagcgattccagcagtagctcatcagagtccgagatgacatcggagtccgaggaggagcagttagaacctgcctcctggagcaggaaaacacctcccagcagcaaaagtgctcctgcaaccaaggagatctccctgcttgatctagaggatttcacccctcccagtgtccagcctgtgtctcccccagcaattgtgtctaccagtctggctgctgacctggagggcctgacactcacagactccaccctggtaccgtcgcttctgagtccagtatcgggtgttgggcggcaggagctgctgcaccgggtagctggcgaggggctggctgtggactacaccttcagccgccaacctttctccggggatccccacatggtgtccgtgcacatccacttctccaacagctctgatacccccatcaagggcctgcatgtgggcactcccaaactgcctgctggcatcagcatccaagaatttcccgaaattgagtccctggcacctggagaatctgccactgctgtaatgggcattaatttctgtgactcaacccaggcagccaacttccagctgtgcacccagacccgacagttctacgtctccattcagccacctgttggggagctgatggcccctgtgttcatgagtgaaaatgagtttaagaaggaacagggaaagctgatgggcatgaatgagatcacagagaaactcatgctgccagacacctgtcggagtgaccacattgtggtgcagaaagtgactgccactgccaacctgggtcgtgttccttgtgggacatctgatgagtacaggtttgcagggaggacactgactggtggaagcctcgttctgctgaccctggatgcccggccagctggagctgcccagctgactgtcaacagcgagaaaatggtgattggcaccatgctggtaaaggatgtgatacaggctctgacccagtgacttccaaatgctgtgacctgtttggctcccatctatacctccccatgacacctaggctgtcagtctctctcatctttctctctctctctcatcatcctcctcatgccagatagcattcagggtgtcctctctccctctggaggaccaagccctcccctaatgccctccccatggattccttagtgatctgtgcagagagagatggcagccactcccttcagtcctcccagatttctgtagctatttatgtagcaggctcaataaaatgtcttctctctaaaaaaaaaaaaaaaaaaaaaaaaaaaaaaaaaaaaaaaaaaaaaaaaaaaaaaaaaaaaaaaaaggggggggggcgcacaaataagaaaccacccgcggggggcgcccaaaccatacgaggcgcaccaccgacgtcgttgtgtggaacacagagggggacccacaagaagagggacgagcgctatctaaaaacgcagcgagccgcgggcgacgcgtatataaaacacggacacggagtgggggagaacaaaggggacccccgagggggagactcacgtgtggcagaagagaggccccccttctcatccacggggggcgggggcgaaacccaaaagcaggggcggcccacacacaccccaccaccgacggagccacctatatcgcaaccagcacccccgaggggaggagacacacacataccgcaaactgatgaagcaggcggcatcaaaacagcgggggcaaccaaacgagacagcggggacaatgagcgggagcgccccagcagcaaacaagcaggtggcgaacgaagcaggaggagcctccagctgatggcgagcccaaccactacctcagaacacgaggaggcccacgacgagcaaca

SEQ ID NO: 9894 - DNA, 4393 bp, Homo sapiens
  misc_feature (5)..(5): n is a, c, g, or t
cgcgncctgattgagaaatccgcgcgcagcctccgccgctgcacactgcagcctctgctgaacccctgccgcgccgccgccttcgccagcccggaccggaccggcccgccttcccttcctccgctccagccggcctccggccccgcaacctcctcctcggcgaagtctccctggccgccccatgtcggccgcccccgcctacagcgaagacaagggcggctccgctggccccggggagcccgagtacggccacgaccccgcgagcggcggcatcttctcctccgactacaagcggcatgatgacctgaaggagatgctggacaccaacaaggattctctcaagctggaggccatgaagaggattgtggcgatgattgcccgaggaaagaatgcttcagacctgtttcccgcggtggtgaagaacgtggcctgtaagaacatagaggtgaagaagcttgtctatgtgtacctggtacgctacgctgaggagcagcaagacctggccctgctgtccatctccaccttccaacgtggcctaaaggatcccaaccagctgattcgtgccagtgccctccgtgtcctctctagcatccgtgtgcccatcatagtgcccatcatgatgctagctatcaaggaagccgcctcggacatgtcaccctatgtgcggaaaacagctgcccacgccatccctaaactctacagtttggactctgaccagaaggatcagctgatagaagtcattgagaagcttctggctgacaagaccacgctggtggcgggcagtgtggtgatggcctttgaggaggtctgcccggagcgcatcgacctgattcacaaaaactaccggaaactctgtaacctgctgatcgacgtggaggagtggggccaggtggtcatcatcagcatgctcacccgctacgcccgcacgcagttcctgagccccacccagaacacgtaagtgggcccagcccaggcagagcgggccgaagtgtgtcccggggaggcgcccacagacccgtcggtctccccgtccaggaatccctactagaggagaacgcggaaaaagccttctacggctcagaggaggacgaggccaagggcgcggggtctgaggagacggccgccgcggccgccccctcccgaaagccctatgtcatggaccccgaccaccggctgctgctgcgcaacaccaaacccctgctgcagagccgcagcgccgcggtggtgatggcggtggcgcagctctacttccacctggcgcccaaggcggaagtgggcgtcatcgccaaggcgctggtgcgcctgctgcgcagccacagtgaggtgcagtacgttgtgctccagaacgtggccaccatgtccatcaagcgccggggtatgtttgagccctacctgaagagcttctacatcaggtccaccgaccccacccagattaagatcctgaagctggaagtgctgaccaacctggccaatgagaccaacattcctactgtcctacgggaattccagacctatattcgcagcatggacaaggactttgtggcagccacaatccaggccattggacgctgtgcaactaacatcggccgagtccgtgacacctgcctcaatggcctggtgcagctgctgtccaaccgtgatgagcttgtggttgcagagtcagtggtcgtcattaagaaattgctacagatgcagccagcacaacatggagagatcatcaaacacttggcaaagcttacagacaacatccaggtgcccatggcccgagccagcatcctgtggctcatcggagagtactgtgagcatgtccccaggattgcacctgatgtcttaagaaaaatggccaagtcattcacagcagaggaggatattgtcaagctgcaggtcatcaacctggcagccaagctctacctgaccaactctaaacagaccaagctgctgacccagtatgtgctgagtctggccaaatatgaccagaactatgatattcgcgaccgggcgcgcttcacccggcagctcatcgtcccttccgagcagggtggggccctcagccgccatgccaagaagctcttcctggcacccaaaccagctccagtcttggagtcatccttcaaagaccgggaccacttccagctgggctcactgtcccacctgcttaatgccaaggccacaggctaccaggagctcccagactggccggaggaagccccagacccatctgtgcgcaacgtggaggtacctgaatggaccaagtgctcaaatcgggagaagagaaaggagaaggaaaaacccttctactcggactctgagggggagtcaggccccacggagtccgcagacagtgaccctgagtctgagagtgaatcggacagtaagagcagcagtgagagcggctctggggagtccagcagtgagtccgacaatgaagaccaggatgaggatgaggagaaagggagaggcagtgagagtgaacagagtgaggaggatggtaagaggaagacaaagaagaaggtgccagagagaaaaggagaagcgtcatcctctgatgagggcagcgattccagcagtagctcatcagagtccgagatgacatcggagtccgaggaggagcagttagaacctgcctcctggagcaggaaaacacctcccagcagcaaaagtgctcctgcaaccaaggagatctccctgcttgatctagaggatttcacccctcccagtgtccagcctgtgtctcccccagcaattgtgtctaccagtctggctgctgacctggagggcctgacactcacagactccaccctggtaccgtcgcttctgagtccagtatcgggtgttgggcggcaggagctgctgcaccgggtagctggcgaggggctggctgtggactacaccttcagccgccaacctttctccggggatccccacatggtgtccgtgcacatccacttctccaacagctctgatacccccatcaagggcctgcatgtgggcactcccaaactgcctgctggcatcagcatccaagaatttcccgaaattgagtccctggcacctggagaatctgccactgctgtaatgggcattaatttctgtgactcaacccaggcagccaacttccagctgtgcacccagacccgacagttctacgtctccattcagccacctgttggggagctgatggcccctgtgttcatgagtgaaaatgagtttaagaaggaacagggaaagctgatgggcatgaatgagatcacagagaaactcatgctgccagacacctgtcggagtgaccacattgtggtgcagaaagtgactgccactgccaacctgggtcgtgttccttgtgggacatctgatgagtacaggtttgcagggaggacactgactggtggaagcctcgttctgctgaccctggatgcccggccagctggagctgcccagctgactgtcaacagcgagaaaatggtgattggcaccatgctggtaaaggatgtgatacaggctctgacccagtgacttccaaatgctgtgacctgtttggctcccatctatacctccccatgacacctaggctgtcagtctctctcatctttctctctctctctcatcatcctcctcatgccagatagcattcagggtgtcctctctccctctggaggaccaagccctcccctaatgccctccccatggattccttagtgatctgtgcagagagagatggcagccactcccttcagtcctcccagatttctgtagctatttatgtagcaggctcaataaaatgtcttctctctaaaaaaaaaaaaaaaaaaaaaaaaaaaaaaaaaaaaaaaaaaaaaaaaaaaaaaaaaaaaaaaaaggggggggggcgcacaaataagaaaccacccgcggggggcgcccaaaccatacgaggcgcaccaccgacgtcgttgtgtggaacacagagggggacccacaagaagagggacgagcgctatctaaaaacgcagcgagccgcgggcgacgcgtatataaaacacggacacggagtgggggagaacaaaggggacccccgagggggagactcacgtgtggcagaagagaggccccccttctcatccacggggggcgggggcgaaacccaaaagcaggggcggcccacacacaccccaccaccgacggagccacctatatcgcaaccagcacccccgaggggaggagacacacacataccgcaaactgatgaagcaggcggcatcaaaacagcgggggcaaccaaacgagacagcggggacaatgagcgggagcgccccagcagcaaacaagcaggtggcgaacgaagcaggaggagcctccagctgatggcgagcccaaccactacctcagaacacgaggaggcccacgacgagcaaca

SEQ ID NO: 9895 - DNA, 270 bp, Homo sapiens
tcccagtgtccagcctgtgtctcccccagcaattgtgtctaccagtctggctgctgacctggagggcctgacactcacagactccaccctggtaccgtcggtgagtgggatggaggaggggaccgggctggggcagggacacatccctgtgctgcatcctatggtgtggatgtgtgtggggggtgggtgtgatggaggatgtgatagctttgagtcccagctgctggatggccctaggggacaatgctgggacaggctctctccatcttg

SEQ ID NO: 9896 - DNA, 300 bp, Homo sapiens
ctgagagggcagcagggctgacctccccaggtctggggttgaggtctaggaatgggtattttgcgagagcctccaggcagccatgtgccccgctgtccatggtgctgaaatgcgtgctccttgatccctaggctccctgctcaacccaagccacctccactttgcctcctcatagtcttatctactcccacagtcacccctcccagtgtccagcctgtgtctcccccagcaattgtgtctaccagtctggctgctgacctggagggcctgacactcacagactccaccctggtaccgtcg

SEQ ID NO: 9897 - DNA, 1001 bp, Homo sapiens
  misc_feature (5)..(5): n is a, c, g, or t
cgcgncctgattgagaaatccgcgcgcagcctccgccgctgcacactgcagcctctgctgaacccctgccgcgccgccgccttcgccagcccggaccggaccggcccgccttcccttcctccgctccagccggcctccggccccgcaacctcctcctcggcgaagtctccctggccgccccatgtcggccgcccccgcctacagcgaagacaagggcggctccgctggccccggggagcccgagtacggccacgaccccgcgagcggcggcatcttctcctccgactacaagcggcatgatgacctgaaggagatgctggacaccaacaaggattctctcaagctggaggccatgaagaggattgtggcgatgattgcccgaggaaagaatgcttcagacctgtttcccgcggtggtgaagaacgtggcctgtaagaacatagaggtgaagaagcttgtctatgtgtacctggtacgctacgctgaggagcagcaagacctggccctgctgtccatctccaccttccaacgtggcctaaaggatcccaaccagctgattcgtgccagtgccctccgtgtcctctctagcatccgtgtgcccatcatagtgcccatcatgatgctagctatcaaggaagccgcctcggacatgtcaccctatgtgcggaaaacagctgcccacgccatccctaaactctacagtttggactctgaccagaaggatcagctgatagaagtcattgagaagcttctggctgacaagaccacgctggtggcgggcagtgtggtgatggcctttgaggaggtctgcccggagcgcatcgacctgattcacaaaaactaccggaaactctgtaacctgctgatcgacgtggaggagtggggccaggtggtcatcatcagcatgctcacccgctacgcccgcacgcagttcctgagccccacccagaacatttctgtagctatttatgtagcaggctcaataaaatgtcttctctcta

SEQ ID NO: 9898 - DNA, 4636 bp, Homo sapiens
  misc_feature (5)..(5): n is a, c, g, or t
cgcgncctgattgagaaatccgcgcgcagcctccgccgctgcacactgcagcctctgctgaacccctgccgcgccgccgccttcgccagcccggaccggaccggcccgccttcccttcctccgctccagccggcctccggccccgcaacctcctcctcggcgaagtctccctggccgccccatgtcggccgcccccgcctacagcgaagacaagggcggctccgctggccccggggagcccgagtacggccacgaccccgcgagcggcggcatcttctcctccgactacaagcggcatgatgacctgaaggagatgctggacaccaacaaggattctctcaagctggaggccatgaagaggattgtggcgatgattgcccgaggaaagaatgcttcagacctgtttcccgcggtggtgaagaacgtggcctgtaagaacatagaggtgagcactacctggtgagggattgcttgtccccacctcccccaggaccacactcaagcttggggtgaggaaggaaatgatttagcccctgggggcccgacctgctgagaaatgtctctgagccaggagaagacactgtctccatgtccctgaactggatgtggatcaaggtaaaggacccggatacactcaggggtgctctcccccactgggagagtttgtccccatggaccgcagctggctggggagatgacatcccaggggtaggggggtgggcacaggtgcctgctgagaagcgttctgctgagaaacgtgctctccccaaggtgaagaagcttgtctatgtgtacctggtacgctacgctgaggagcagcaagacctggccctgctgtccatctccaccttccaacgtggcctaaaggatcccaaccagctgattcgtgccagtgccctccgtgtcctctctagcatccgtgtgcccatcatagtgcccatcatgatgctagctatcaaggaagccgcctcggacatgtcaccctatgtgcggaaaacagctgcccacgccatccctaaactctacagtttggactctgaccagaaggatcagctgatagaagtcattgagaagcttctggctgacaagaccacgctggtggcgggcagtgtggtgatggcctttgaggaggtctgcccggagcgcatcgacctgattcacaaaaactaccggaaactctgtaacctgctgatcgacgtggaggagtggggccaggtggtcatcatcagcatgctcacccgctacgcccgcacgcagttcctgagccccacccagaacgaatccctactagaggagaacgcggaaaaagccttctacggctcagaggaggacgaggccaagggcgcggggtctgaggagacggccgccgcggccgccccctcccgaaagccctatgtcatggaccccgaccaccggctgctgctgcgcaacaccaaacccctgctgcagagccgcagcgccgcggtggtgatggcggtggcgcagctctacttccacctggcgcccaaggcggaagtgggcgtcatcgccaaggcgctggtgcgcctgctgcgcagccacagtgaggtgcagtacgttgtgctccagaacgtggccaccatgtccatcaagcgccggggtatgtttgagccctacctgaagagcttctacatcaggtccaccgaccccacccagattaagatcctgaagctggaagtgctgaccaacctggccaatgagaccaacattcctactgtcctacgggaattccagacctatattcgcagcatggacaaggactttgtggcagccacaatccaggccattggacgctgtgcaactaacatcggccgagtccgtgacacctgcctcaatggcctggtgcagctgctgtccaaccgtgatgagcttgtggttgcagagtcagtggtcgtcattaagaaattgctacagatgcagccagcacaacatggagagatcatcaaacacttggcaaagcttacagacaacatccaggtgcccatggcccgagccagcatcctgtggctcatcggagagtactgtgagcatgtccccaggattgcacctgatgtcttaagaaaaatggccaagtcattcacagcagaggaggatattgtcaagctgcaggtcatcaacctggcagccaagctctacctgaccaactctaaacagaccaagctgctgacccagtatgtgctgagtctggccaaatatgaccagaactatgatattcgcgaccgggcgcgcttcacccggcagctcatcgtcccttccgagcagggtggggccctcagccgccatgccaagaagctcttcctggcacccaaaccagctccagtcttggagtcatccttcaaagaccgggaccacttccagctgggctcactgtcccacctgcttaatgccaaggccacaggctaccaggagctcccagactggccggaggaagccccagacccatctgtgcgcaacgtggaggtacctgaatggaccaagtgctcaaatcgggagaagagaaaggagaaggaaaaacccttctactcggactctgagggggagtcaggccccacggagtccgcagacagtgaccctgagtctgagagtgaatcggacagtaagagcagcagtgagagcggctctggggagtccagcagtgagtccgacaatgaagaccaggatgaggatgaggagaaagggagaggcagtgagagtgaacagagtgaggaggatggtaagaggaagacaaagaagaaggtgccagagagaaaaggagaagcgtcatcctctgatgagggcagcgattccagcagtagctcatcagagtccgagatgacatcggagtccgaggaggagcagttagaacctgcctcctggagcaggaaaacacctcccagcagcaaaagtgctcctgcaaccaaggagatctccctgcttgatctagaggatttcacccctcccagtgtccagcctgtgtctcccccagcaattgtgtctaccagtctggctgctgacctggagggcctgacactcacagactccaccctggtaccgtcgcttctgagtccagtatcgggtgttgggcggcaggagctgctgcaccgggtagctggcgaggggctggctgtggactacaccttcagccgccaacctttctccggggatccccacatggtgtccgtgcacatccacttctccaacagctctgatacccccatcaagggcctgcatgtgggcactcccaaactgcctgctggcatcagcatccaagaatttcccgaaattgagtccctggcacctggagaatctgccactgctgtaatgggcattaatttctgtgactcaacccaggcagccaacttccagctgtgcacccagacccgacagttctacgtctccattcagccacctgttggggagctgatggcccctgtgttcatgagtgaaaatgagtttaagaaggaacagggaaagctgatgggcatgaatgagatcacagagaaactcatgctgccagacacctgtcggagtgaccacattgtggtgcagaaagtgactgccactgccaacctgggtcgtgttccttgtgggacatctgatgagtacaggtttgcagggaggacactgactggtggaagcctcgttctgctgaccctggatgcccggccagctggagctgcccagctgactgtcaacagcgagaaaatggtgattggcaccatgctggtaaaggatgtgatacaggctctgacccagtgacttccaaatgctgtgacctgtttggctcccatctatacctccccatgacacctaggctgtcagtctctctcatctttctctctctctctcatcatcctcctcatgccagatagcattcagggtgtcctctctccctctggaggaccaagccctcccctaatgccctccccatggattccttagtgatctgtgcagagagagatggcagccactcccttcagtcctcccagatttctgtagctatttatgtagcaggctcaataaaatgtcttctctctaaaaaaaaaaaaaaaaaaaaaaaaaaaaaaaaaaaaaaaaaaaaaaaaaaaaaaaaaaaaaaaaaggggggggggcgcacaaataagaaaccacccgcggggggcgcccaaaccatacgaggcgcaccaccgacgtcgttgtgtggaacacagagggggacccacaagaagagggacgagcgctatctaaaaacgcagcgagccgcgggcgacgcgtatataaaacacggacacggagtgggggagaacaaaggggacccccgagggggagactcacgtgtggcagaagagaggccccccttctcatccacggggggcgggggcgaaacccaaaagcaggggcggcccacacacaccccaccaccgacggagccacctatatcgcaaccagcacccccgaggggaggagacacacacataccgcaaactgatgaagcaggcggcatcaaaacagcgggggcaaccaaacgagacagcggggacaatgagcgggagcgccccagcagcaaacaagcaggtggcgaacgaagcaggaggagcctccagctgatggcgagcccaaccactacctcagaacacgaggaggcccacgacgagcaaca

SEQ ID NO: 9899 - DNA, 4372 bp, Homo sapiens
  misc_feature (5)..(5): n is a, c, g, or t
cgcgncctgattgagaaatccgcgcgcagcctccgccgctgcacactgcagcctctgctgaacccctgccgcgccgccgccttcgccagcccggaccggaccggcccgccttcccttcctccgctccagccggcctccggccccgcaacctcctcctcggcgaagtctccctggccgccccatgtcggccgcccccgcctacagcgaagacaagggcggctccgctggccccggggagcccgagtacggccacgaccccgcgagcggcggcatcttctcctccgactacaagcggcatgatgacctgaaggagatgctggacaccaacaaggattctctcaagctggaggccatgaagaggattgtggcgatgattgcccgaggaaagaatgcttcagacctgtttcccgcggtggtgaagaacgtggcctgtaagaacatagaggtgaagaagcttgtctatgtgtacctggtacgctacgctgaggagcagcaagacctggccctgctgtccatctccaccttccaacgtggcctaaaggatcccaaccagctgattcgtgccagtgccctccgtgtcctctctagcatccgtgtgcccatcatagtgcccatcatgatgctagctatcaaggaagccgcctcggacatgtcaccctatgtgcggaaaacagctgcccacgccatccctaaactctacagtttggactctgaccagaaggatcagctgatagaagtcattgagaagcttctggctgacaagaccacgctggtggcgggcagtgtggtgatggcctttgaggaggtctgcccggagcgcatcgacctgattcacaaaaactaccggaaactctgtaacctgctgatcgacgtggaggagtggggccaggtggtcatcatcagcatgctcacccgctacgcccgcacgcagttcctgagccccacccagaacgaatccctactagaggagaacgcggaaaaagccttctacggctcagaggaggacgaggccaagggcgcggggtctgaggagacggccgccgcggccgccccctcccgaaagccctatgtcatggaccccgaccaccggctgctgctgcgcaacaccaaacccctgctgcagagccgcagcgccgcggtggtgatggcggtggcgcagctctacttccacctggcgcccaaggcggaagtgggcgtcatcgccaaggcgctggtgcgcctgctgcgcagccacagtgaggtgcagtacgttgtgctccagaacgtggccaccatgtccatcaagcgccggggtatgtttgagccctacctgaagagcttctacatcaggtccaccgaccccacccagattaagatcctgaagctggaagtgctgaccaacctggccaatgagaccaacattcctactgtcctacgggaattccagacctatattcgcagcatggacaaggactttgtggcagccacaatccaggccattggacgctgtgcaactaacatcggccgagtccgtgacacctgcctcaatggcctggtgcagctgctgtccaaccgtgatgagcttgtggttgcagagtcagtggtcgtcattaagaaattgctacagatgcagccagcacaacatggagagatcatcaaacacttggcaaagcttacagacaacatccaggtgcccatggcccgagccagcatcctgtggctcatcggagagtactgtgagcatgtccccaggattgcacctgatgtcttaagaaaaatggccaagtcattcacagcagaggaggatattgtcaagctgcaggtcatcaacctggcagccaagctctacctgaccaactctaaacagaccaagctgctgacccagtatgtgctgagtctggccaaatatgaccagaactatgatattcgcgaccgggcgcgcttcacccggcagctcatcgtcccttccgagcagggtggggccctcagccgccatgccaagaagctcttcctggcacccaaaccagctccagtcttggagtcatccttcaaagaccgggaccacttccagctgggctcactgtcccacctgcttaatgccaaggccacaggctaccaggagctcccagactggccggaggaagccccagacccatctgtgcgcaacgtggaggtacctgaatggaccaagtgctcaaatcgggagaagagaaaggagaaggaaaaacccttctactcggactctgagggggagtcaggccccacggagtccgcagacagtgaccctgagtctgagagtgaatcggacagtaagagcagcagtgagagcggctctggggagtccagcagtgagtccgacaatgaagaccaggatgaggatgaggagaaagggagaggcagtgagagtgaacagagtgaggaggatggtaagaggaagacaaagaagaaggtgccagagagaaaaggagaagcgtcatcctctgatgagggcagcgattccagcagtagctcatcagagtccgagatgacatcggagtccgaggaggagcagttagaacctgcctcctggagcaggaaaacacctcccagcagcaaaagtgctcctgcaaccaaggagatctccctgcttgatctagaggattgctccctgctcaacccaagccacctccactttgcctcctcatagtcttatctactcccacagtcacccctcccagtgtccagcctgtgtctcccccagcaattgtgtctaccagtctggctgctgacctggagggcctgacactcacagactccaccctggtaccgtcgcttctgagtccagtatcgggtgttgggcggcaggagctgctgcaccgggtagctggcgaggggctggctgtggactacaccttcagccgccaacctttctccggggatccccacatggtgtccgtgcacatccacttctccaacagctctgatacccccatcaagggcctgcatgtgggcactcccaaactgcctgctggcatcagcatccaagaatttcccgaaattgagtccctggcacctggagaatctgccactgctgtaatgggcattaatttctgtgactcaacccaggcagccaacttccagctgtgcacccagacccgacagttctacgtctccattcagccacctgttggggagctgatggcccctgtgttcatgagtgaaaatgagtttaagaaggaacagggaaagctgatgggcatgaatgagatcacagagaaactcatgctgccagacacctgtcggagtgaccacattgtggtgcagaaagtgactgccactgccaacctgggtcgtgttccttgtgggacatctgatgagtacaggtttgcagggaggacactgactggtggaagcctcgttctgctgaccctggatgcccggccagctggagctgcccagctgactgtcaacagcgagaaaatggtgattggcaccatgctggtaaaggatgtgatacaggctctgacccagtgacttccaaatgctgtgacctgtttggctcccatctatacctccccatgacacctaggctgtcagtctctctcatctttctctctctctctcatcatcctcctcatgccagatagcattcagggtgtcctctctccctctggaggaccaagccctcccctaatgccctccccatggattccttagtgatctgtgcagagagagatggcagccactcccttcagtcctcccagatttctgtagctatttatgtagcaggctcaataaaatgtcttctctctaaaaaaaaaaaaaaaaaaaaaaaaaaaaaaaaaaaaaaaaaaaaaaaaaaaaaaaaaaaaaaaaaggggggggggcgcacaaataagaaaccacccgcggggggcgcccaaaccatacgaggcgcaccaccgacgtcgttgtgtggaacacagagggggacccacaagaagagggacgagcgctatctaaaaacgcagcgagccgcgggcgacgcgtatataaaacacggacacggagtgggggagaacaaaggggacccccgagggggagactcacgtgtggcagaagagaggccccccttctcatccacggggggcgggggcgaaacccaaaagcaggggcggcccacacacaccccaccaccgacggagccacctatatcgcaaccagcacccccgaggggaggagacacacacataccgcaaactgatgaagcaggcggcatcaaaacagcgggggcaaccaaacgagacagcggggacaatgagcgggagcgccccagcagcaaacaagcaggtggcgaacgaagcaggaggagcctccagctgatggcgagcccaaccactacctcagaacacgaggaggcccacgacgagcaaca

SEQ ID NO: 9900 - DNA, 2424 bp, Homo sapiens
  misc_feature (5)..(5): n is a, c, g, or t
cgcgncctgattgagaaatccgcgcgcagcctccgccgctgcacactgcagcctctgctgaacccctgccgcgccgccgccttcgccagcccggaccggaccggcccgccttcccttcctccgctccagccggcctccggccccgcaacctcctcctcggcgaagtctccctggccgccccatgtcggccgcccccgcctacagcgaagacaagggcggctccgctggccccggggagcccgagtacggccacgaccccgcgagcggcggcatcttctcctccgactacaagcggcatgatgacctgaaggagatgctggacaccaacaaggattctctcaagctggaggccatgaagaggattgtggcgatgattgcccgaggaaagaatgcttcagacctgtttcccgcggtggtgaagaacgtggcctgtaagaacatagaggtgaagaagcttgtctatgtgtacctggtacgctacgctgaggagcagcaagacctggccctgctgtccatctccaccttccaacgtggcctaaaggatcccaaccagctgattcgtgccagtgccctccgtgtcctctctagcatccgtgtgcccatcatagtgcccatcatgatgctagctatcaaggaagccgcctcggacatgtcaccctatgtgcggaaaacagctgcccacgccatccctaaactctacagtttggactctgaccagaaggatcagctgatagaagtcattgagaagcttctggctgacaagaccacgctggtggcgggcagtgtggtgatggcctttgaggaggtctgcccggagcgcatcgacctgattcacaaaaactaccggaaactctgtaacctgctgatcgacgtggaggagtggggccaggtggtcatcatcagcatgctcacccgctacgcccgcacgcagttcctgagccccacccagaacgaatccctactagaggagaacgcggaaaaagccttctacggctcagaggaggacgaggccaagggcgcggggtctgaggagacggccgccgcggccgccccctcccgaaagccctatgtcatggaccccgaccaccggctgctgctgcgcaacaccaaacccctgctgcagagccgcagcgccgcggtggtgatggcggtggcgcagctctacttccacctggcgcccaaggcggaagtgggcgtcatcgccaaggcgctggtgcgcctgctgcgcagccacagtgaggtgcagtacgttgtgctccagaacgtggccaccatgtccatcaagcgccggggtatgtttgagccctacctgaagagcttctacatcaggtccaccgaccccacccagattaagatcctgaagctggaagtgctgaccaacctggccaatgagaccaacattcctactgtcctacgggaattccagacctatattcgcagcatggacaaggactttgtggcagccacaatccaggccattggacgctgtgcaactaacatcggccgagtccgtgacacctgcctcaatggcctggtgcagctgctgtccaaccgtgatgagcttgtggttgcagagtcagtggtcgtcattaagaaattgctacagatgcagccagcacaacatggagagatcatcaaacacttggcaaagcttacagacaacatccaggtgcccatggcccgagccagcatcctgtggctcatcggagagtactgtgagcatgtccccaggattgcacctgatgtcttaagaaaaatggccaagtcattcacagcagaggaggatattgtcaagctgcaggtcatcaacctggcagccaagctctacctgaccaactctaaacagaccaagctgctgacccagtatgtgctgagtctggccaaatatgaccagaactatgatattcgcgaccgggcgcgcttcacccggcagctcatcgtcccttccgagcagggtggggccctcagccgccatgccaagaagctcttcctggcacccaaaccagctccagtcttggagtcatccttcaaagaccgggaccacttccagctgggctcactgtcccacctgcttaatgccaaggccacaggctaccaggagctcccagactggccggaggaagccccagacccatctgtgcgcaacgtggaggtacctgaatggaccaagtgctcaaatcgggagaagagaaaggagaaggaaaaacccttctactcggactctgagggggaaactgaggctcgagggtgacctatgcaaagcctgcgaagctaattagtggcaggacctgaactggaatttagggttagtgattcacctgtccagaccagtgcagtcatacctaccttagctcgagagaacgaatgagtgcagcaagggaagtaagagtatcatacatgcatagtggtgcgcagaggtcatgt

SEQ ID NO: 9901 - DNA, 419 bp, Homo sapiens
ggcagccggccttccacccttcgcgttcaccctctcgtctttgttctttccccagctggtggcgggcagtgtggtgatggcctttgaggaggtctgcccggagcgcatcgacctgattcacaaaaactaccggaaactctgtaacctgctgatcgacgtggaggagtggggccaggtggtcatcatcagcatgctcacccgctacgcccgcacgcagttcctgagccccacccagaacacgtaagtgggcccagcccaggcagagcgggccgaagtgtgtcccggggaggcgcccacagacccgtcggtctccccgtccaggaatccctactagaggagaacgcggaaaaagccttctacggctcagaggaggacgaggccaagggcgcggggtctgaggagacggccgccgcggccgc

SEQ ID NO: 9902 - DNA, 2786 bp, Homo sapiens
ggaaaacgacacctagaagtaggagtgagattcgctgaagttcccttctgaggaagacccacccctccgcctggagagccggggctggcggtgcctgaggaccccttcggcctggacagcccacgcgggcttggggggcctcgctctgccctcatggggcggccatcggttcccgaagcggcgagtgaaaattcaaatggccagtagggggcgcactcggaagtggccgccccgcatgaggcagttcagcggccccgagagtccggggagggaggtttattctccgcctgcacgagactgtgaaatccgcaaccatgagcaggagaggcggccctggtggggaagaggccaccaacatctggacggcaggtacccagagagtgagcagctccacgcgggactgtgcacggtggccgacacccgcagggacgcccgccggacgagcacgcggagggccctcgcctccacggatgcaccatgccggtgtgaggagcatctgttcttcccactctctgcagttaacaaacccaacccaaaccaccacaggtgctcctcctggggagtttcctgtctgacaaatgccaggctcacttcaaggagaatcacgcttctttctaaagatggattcaccatttaaaacagagctctgggagcctttcggcaaatcttgaaagctgcacggcgcagagacatggatgtgacttcccaagcccggggcgtgggcctggagatgtacccaggcaccgcgcagcctgcggcccccaacaccacctcccccgagctcaacctgtcccacccgctcctgggcaccgccctggccaatgggacaggtgagctctcggagcaccagcagtacgtgatcggcctgttcctctcgtgcctctacaccatcttcctcttccccatcggctttgtgggcaacatcctgatcctggtggtgaacatcagcttccgcgagaagatgaccatccccgacctgtacttcatcaacctggcggtggcggacctcatcctggtggccgactccctcattgaggtgttcaacctgcacgagcggtactacgacatcgccgtcctgtgcaccttcatgtcgctcttcctgcaggtcaacatgtacagcagcgtcttcttcctcacctggatgagcttcgaccgctacatcgccctggccagggccatgcgctgcagcctgttccgcaccaagcaccacgcccggctgagctgtggcctcatctggatggcatccgtgtcagccacgctggtgcccttcaccgccgtgcacctgcagcacaccgacgaggcctgcttctgtttcgcggatgtccgggaggtgcagtggctcgaggtcacgctgggcttcatcgtgcccttcgccatcatcggcctgtgctactccctcattgtccgggtgctggtcagggcgcaccggcaccgtgggctgcggccccggcggcagaaggcgctccgcatgatcctcgcggtggtgctggtcttcttcgtctgctggctgccggagaacgtcttcatcagcgtgcacctcctgcagcggacgcagcctggggccgctccctgcaagcagtctttccgccatgcccaccccctcacgggccacattgtcaacctcgccgccttctccaacagctgcctaaaccccctcatctacagctttctcggggagaccttcagggacaagctgaggctgtacattgagcagaaaacaaatttgccggccctgaaccgcttctgtcacgctgccctgaaggccgtcattccagacagcaccgagcagtcggatgtgaggttcagcagtgccgtgtagacagccttggccgcataggcccagccagggtgtgactcgggagctgcacacacctgggtggacacaaggcacggccacgtcatgtctctaaactgcggtcagatgtggcttctggctcctcggggcctcgcgagggtcacgcttgcctggtcaccctggggctgcttaggaaacctcacgactggtcaccttgcactcctcacacagaattgctacaatcccaaagcgctcgccccgcagggtccaaaggccagcggtgaccagcctgtcacccagctcctccccgccaaccctgcctgccgctgcacctgcctgccgctgcaggaaacatttctgacaccgtcgaccaggaaagccacacggagaggccactgtgggtgaagcgcctcagttacacaggaaccctaaagcaaatctgccaccgtgggggaactgacgctggagatgcaaggtgctggtgggtctgagctggacgtcgcggtgtgtcctctgtgcccacggtctgagctagctagcgcaccgccgagttaaagaggagaaggaaaacatgctgctctggtgcacgcctgagcgtcctccatcttccaggatggcagcaatggcgctgtgcggcctcaccaggcccacgaggagcagcagcgctcggcccggagcagcaggaaggcccctctgtggagcgcccgccgtctgctccggggtggttcagtcactgcttgttgacatcaacatggcaattgcactcatgtggactgggaccgtgcgagctgccgtgtgggttagtcgggtgccaggacaatgaaatactccagcacgtgtggctgacgaatttgtttctacagaaataacagctggggacaactgcggtgatgatgtaaaaaccttcccataaaatgtaagaaaagctgatgaggctggtgacgttcagcctttgtcaataaacctgtcatgtgcggatccttacggaggc

SEQ ID NO: 9903 - DNA, 2636 bp, Homo sapiens
gggcactgtggccaatgtgaaccctggacgcacccgccagccagccgggaaccttccctcgcgggctcccagggcgggtctcttcctctctctagccctgctcaggcattcggcaggtccagcagaggtacacctcctgcagcgggttccaagtgcacctccagcctgatgggcctgaccaaggaggcttccaggagcacagaaggggctgcaacccaggtacccagagagtgagcagctccacgcgggactgtgcacggtggccgacacccgcagggacgcccgccggacgagcacgcggagggccctcgcctccacggatgcaccatgccggtgtgaggagcatctgttcttcccactctctgcagttaacaaacccaacccaaaccaccacaggtgctcctcctggggagtttcctgtctgacaaatgccaggctcacttcaaggagaatcacgcttctttctaaagatggattcaccatttaaaacagagctctgggagcctttcggcaaatcttgaaagctgcacggcgcagagacatggatgtgacttcccaagcccggggcgtgggcctggagatgtacccaggcaccgcgcagcctgcggcccccaacaccacctcccccgagctcaacctgtcccacccgctcctgggcaccgccctggccaatgggacaggtgagctctcggagcaccagcagtacgtgatcggcctgttcctctcgtgcctctacaccatcttcctcttccccatcggctttgtgggcaacatcctgatcctggtggtgaacatcagcttccgcgagaagatgaccatccccgacctgtacttcatcaacctggcggtggcggacctcatcctggtggccgactccctcattgaggtgttcaacctgcacgagcggtactacgacatcgccgtcctgtgcaccttcatgtcgctcttcctgcaggtcaacatgtacagcagcgtcttcttcctcacctggatgagcttcgaccgctacatcgccctggccagggccatgcgctgcagcctgttccgcaccaagcaccacgcccggctgagctgtggcctcatctggatggcatccgtgtcagccacgctggtgcccttcaccgccgtgcacctgcagcacaccgacgaggcctgcttctgtttcgcggatgtccgggaggtgcagtggctcgaggtcacgctgggcttcatcgtgcccttcgccatcatcggcctgtgctactccctcattgtccgggtgctggtcagggcgcaccggcaccgtgggctgcggccccggcggcagaaggcgctccgcatgatcctcgcggtggtgctggtcttcttcgtctgctggctgccggagaacgtcttcatcagcgtgcacctcctgcagcggacgcagcctggggccgctccctgcaagcagtctttccgccatgcccaccccctcacgggccacattgtcaacctcgccgccttctccaacagctgcctaaaccccctcatctacagctttctcggggagaccttcagggacaagctgaggctgtacattgagcagaaaacaaatttgccggccctgaaccgcttctgtcacgctgccctgaaggccgtcattccagacagcaccgagcagtcggatgtgaggttcagcagtgccgtgtagacagccttggccgcataggcccagccagggtgtgactcgggagctgcacacacctgggtggacacaaggcacggccacgtcatgtctctaaactgcggtcagatgtggcttctggctcctcggggcctcgcgagggtcacgcttgcctggtcaccctggggctgcttaggaaacctcacgactggtcaccttgcactcctcacacagaattgctacaatcccaaagcgctcgccccgcagggtccaaaggccagcggtgaccagcctgtcacccagctcctccccgccaaccctgcctgccgctgcacctgcctgccgctgcaggaaacatttctgacaccgtcgaccaggaaagccacacggagaggccactgtgggtgaagcgcctcagttacacaggaaccctaaagcaaatctgccaccgtgggggaactgacgctggagatgcaaggtgctggtgggtctgagctggacgtcgcggtgtgtcctctgtgcccacggtctgagctagctagcgcaccgccgagttaaagaggagaaggaaaacatgctgctctggtgcacgcctgagcgtcctccatcttccaggatggcagcaatggcgctgtgcggcctcaccaggcccacgaggagcagcagcgctcggcccggagcagcaggaaggcccctctgtggagcgcccgccgtctgctccggggtggttcagtcactgcttgttgacatcaacatggcaattgcactcatgtggactgggaccgtgcgagctgccgtgtgggttagtcgggtgccaggacaatgaaatactccagcacgtgtggctgacgaatttgtttctacagaaataacagctggggacaactgcggtgatgatgtaaaaaccttcccataaaatgtaagaaaagctgatgaggctggtgacgttcagcctttgtcaataaacctgtcatgtgcggatccttacggaggc

SEQ ID NO: 9904 - DNA, 2632 bp, Homo sapiens
agactcactggctcagagggaggacgcacccgccagccagccgggaaccttccctcgcgggctcccagggcgggtctcttcctctctctagccctgctcaggcattcggcaggtccagcagaggtacacctcctgcagcgggttccaagtgcacctccagcctgatgggcctgaccaaggaggcttccaggagcacagaaggggctgcaacccaggtacccagagagtgagcagctccacgcgggactgtgcacggtggccgacacccgcagggacgcccgccggacgagcacgcggagggccctcgcctccacggatgcaccatgccggtgtgaggagcatctgttcttcccactctctgcagttaacaaacccaacccaaaccaccacaggtgctcctcctggggagtttcctgtctgacaaatgccaggctcacttcaaggagaatcacgcttctttctaaagatggattcaccatttaaaacagagctctgggagcctttcggcaaatcttgaaagctgcacggcgcagagacatggatgtgacttcccaagcccggggcgtgggcctggagatgtacccaggcaccgcgcagcctgcggcccccaacaccacctcccccgagctcaacctgtcccacccgctcctgggcaccgccctggccaatgggacaggtgagctctcggagcaccagcagtacgtgatcggcctgttcctctcgtgcctctacaccatcttcctcttccccatcggctttgtgggcaacatcctgatcctggtggtgaacatcagcttccgcgagaagatgaccatccccgacctgtacttcatcaacctggcggtggcggacctcatcctggtggccgactccctcattgaggtgttcaacctgcacgagcggtactacgacatcgccgtcctgtgcaccttcatgtcgctcttcctgcaggtcaacatgtacagcagcgtcttcttcctcacctggatgagcttcgaccgctacatcgccctggccagggccatgcgctgcagcctgttccgcaccaagcaccacgcccggctgagctgtggcctcatctggatggcatccgtgtcagccacgctggtgcccttcaccgccgtgcacctgcagcacaccgacgaggcctgcttctgtttcgcggatgtccgggaggtgcagtggctcgaggtcacgctgggcttcatcgtgcccttcgccatcatcggcctgtgctactccctcattgtccgggtgctggtcagggcgcaccggcaccgtgggctgcggccccggcggcagaaggcgctccgcatgatcctcgcggtggtgctggtcttcttcgtctgctggctgccggagaacgtcttcatcagcgtgcacctcctgcagcggacgcagcctggggccgctccctgcaagcagtctttccgccatgcccaccccctcacgggccacattgtcaacctcgccgccttctccaacagctgcctaaaccccctcatctacagctttctcggggagaccttcagggacaagctgaggctgtacattgagcagaaaacaaatttgccggccctgaaccgcttctgtcacgctgccctgaaggccgtcattccagacagcaccgagcagtcggatgtgaggttcagcagtgccgtgtagacagccttggccgcataggcccagccagggtgtgactcgggagctgcacacacctgggtggacacaaggcacggccacgtcatgtctctaaactgcggtcagatgtggcttctggctcctcggggcctcgcgagggtcacgcttgcctggtcaccctggggctgcttaggaaacctcacgactggtcaccttgcactcctcacacagaattgctacaatcccaaagcgctcgccccgcagggtccaaaggccagcggtgaccagcctgtcacccagctcctccccgccaaccctgcctgccgctgcacctgcctgccgctgcaggaaacatttctgacaccgtcgaccaggaaagccacacggagaggccactgtgggtgaagcgcctcagttacacaggaaccctaaagcaaatctgccaccgtgggggaactgacgctggagatgcaaggtgctggtgggtctgagctggacgtcgcggtgtgtcctctgtgcccacggtctgagctagctagcgcaccgccgagttaaagaggagaaggaaaacatgctgctctggtgcacgcctgagcgtcctccatcttccaggatggcagcaatggcgctgtgcggcctcaccaggcccacgaggagcagcagcgctcggcccggagcagcaggaaggcccctctgtggagcgcccgccgtctgctccggggtggttcagtcactgcttgttgacatcaacatggcaattgcactcatgtggactgggaccgtgcgagctgccgtgtgggttagtcgggtgccaggacaatgaaatactccagcacgtgtggctgacgaatttgtttctacagaaataacagctggggacaactgcggtgatgatgtaaaaaccttcccataaaatgtaagaaaagctgatgaggctggtgacgttcagcctttgtcaataaacctgtcatgtgcggatccttacggaggc

SEQ ID NO: 9905 - DNA, 2150 bp, Homo sapiens
gggcactgtggccaatgtgaaccctggacgcacccgccagccagccgggaaccttccctcgcgggctcccagggcgggtctcttcctctctctagccctgctcaggcattcggcaggtccagcagaggtacacctcctgcagcgggttccaagtgcacctccagcctgatgggcctgaccaaggaggcttccaggagcacagaaggggctgcaacccaggtacccagagagtgagcagctccacgcgggactgtgcacggtggccgacacccgcagggacgcccgccggacgagcacgcggagggccctcgcctccacggatgcaccatgccggtgtgaggagcatctgttcttcccactctctgcagttaacaaacccaacccaaaccaccacaggtgctcctcctggggagtttcctgtctgacaaatgccaggctcacttcaaggagaatcacgcttctttctaaagatggattcaccatttaaaacagagctctgggagcctttcggcaaatcttgaaagctgcacggcgcagagacatggatgtgacttcccaagcccggggcgtgggcctggagatgtacccaggcaccgcgcagcctgcggcccccaacaccacctcccccgagctcaacctgtcccacccgctcctgggcaccgccctggccaatgggacaggtgagctctcggagcaccagcagtacgtgatcggcctgttcctctcgtgcctctacaccatcttcctcttccccatcggctttgtgggcaacatcctgatcctggtggtgaacatcagcttccgcgagaagatgaccatccccgacctgtacttcatcaacctggcggtggcggacctcatcctggtggccgactccctcattgaggtgttcaacctgcacgagcggtactacgacatcgccgtcctgtgcaccttcatgtcgctcttcctgcaggtcaacatgtacagcagcgtcttcttcctcacctggatgagcttcgaccgctacatcgccctggccagggccatgcgctgcagcctgttccgcaccaagcaccacgcccggctgagctgtggcctcatctggatggcatccgtgtcagccacgctggtgcccttcaccgccgtgcacctgcagcacaccgacgaggcctgcttctgtttcgcggatgtccgggaggtgcagtggctcgaggtcacgctgggcttcatcgtgcccttcgccatcatcggcctgtgctactccctcattgtccgggtgctggtcagggcgcaccggcaccgtgggctgcggccccggcggcagaaggcgctccgcatgatcctcgcggtggtgctggtcttcttcgtctgctggctgccggagaacgtcttcatcagcgtgcacctcctgcagcggacgcagcctggggccgctccctgcaagcagtctttccgccatgcccaccccctcacgggccacattgtcaacctcgccgccttctccaacagctgcctaaaccccctcatctacagctttctcggggagaccttcagggacaagctgaggctgtacattgagcagaaaacaaatttgccggccctgaaccgcttctgtcacgctgccctgaaggccgtcattccagacagcaccgagcagtcggatgtgaggttcagcagtgccgtgtagacagccttggccgcataggcccagccagggtgtgactcgggagctgcacacacctgggtggacacaaggcacggccacgtcatgtctctaaactgcggtcagatgtggcttctggctcctcggggcctcgcgagggtcacgcttgcctggtcaccctggggctgcttaggaaacctcacgactggtcaccttgcactcctcacacagaattgctacaatcccaaagcgctcgccccgcagggtccaaaggccagcggtgaccagcctgtcacccagctcctccccgccaaccctgcctgccgctgcacctgcctgccgctgcaggaaacattttgacgaatttgtttctacagaaataacagctggggacaactgcggtgatgatgtaaaaaccttcccataaaatgtaagaaaagctgatgaggctggtgacgttcagcctttgtcaataaacctgtcatgtgcggatccttacggaggc

SEQ ID NO: 9906 - DNA, 898 bp, Homo sapiens
agactcactggctcagagggaggacgcacccgccagccagccgggaaccttccctcgcgggctcccagggcgggtctcttcctctctctagccctgctcaggcattcggcaggtccagcagaggtacacctcctgcagcgggttccaagtgcacctccagcctgatgggcctgaccaaggaggcttccaggagcacagaaggggctgcaacccaggtacccagagagtgagcagctccacgcgggactgtgcacggtggccgacacccgcagggacgcccgccggacgagcacgcggagggccctcgcctccacggatgcaccatgccggtgtgaggagcatctgttcttcccactctctgcagttaacaaacccaacccaaaccaccacaggtgctcctcctggggagtttcctgtctgacaaatgccaggctcacttcaaggagaatcacgcttctttctaaagatggattcaccatttaaaacagagctctgggagcctttcggcaaatcttgaaagctgcacggcgcagagacatggatgtgacttcccaagcccggggcgtgggcctggagatgtacccaggcaccgcgcagcctgcggcccccaacaccacctcccccgagctcaacctgtcccacccgctcctgggcaccgccctggccaatgggacaggtgagctctcggagcaccagcagtacgtgatcggcctgttcctctcgtgcctctacaccatcttcctcttccccatcggctttgtgggcaacatcctgatcctggtggtgaacatcagcttccgcgagaagatgaccatccgaactgacttataaactggggtgggacccaaccggggcgaccccctgcacggtcacccgacaaccgcatcaaagccccgga

SEQ ID NO: 9907 - DNA, 2910 bp, Homo sapiens
ggaaaacgacacctagaagtaggagtgagattcgctgaagttcccttctgaggaagacccacccctccgcctggagagccggggctggcggtgcctgaggaccccttcggcctggacagcccacgcgggcttggggggcctcgctctgccctcatggggcggccatcggttcccgaagcggcgagtgaaaattcaaatggccagtagggggcgcactcggaagtggccgccccgcatgaggcagttcagcggccccgagagtccggggagggaggtttattctccgcctgcacgagactgtgaaatccgcaaccatgagcaggagaggcggccctggtggggaagaggccaccaacatctggacggcagccctgctcaggcattcggcaggtccagcagaggtacacctcctgcagcgggttccaagtgcacctccagcctgatgggcctgaccaaggaggcttccaggagcacagaaggggctgcaacccaggtacccagagagtgagcagctccacgcgggactgtgcacggtggccgacacccgcagggacgcccgccggacgagcacgcggagggccctcgcctccacggatgcaccatgccggtgtgaggagcatctgttcttcccactctctgcagttaacaaacccaacccaaaccaccacaggtgctcctcctggggagtttcctgtctgacaaatgccaggctcacttcaaggagaatcacgcttctttctaaagatggattcaccatttaaaacagagctctgggagcctttcggcaaatcttgaaagctgcacggcgcagagacatggatgtgacttcccaagcccggggcgtgggcctggagatgtacccaggcaccgcgcagcctgcggcccccaacaccacctcccccgagctcaacctgtcccacccgctcctgggcaccgccctggccaatgggacaggtgagctctcggagcaccagcagtacgtgatcggcctgttcctctcgtgcctctacaccatcttcctcttccccatcggctttgtgggcaacatcctgatcctggtggtgaacatcagcttccgcgagaagatgaccatccccgacctgtacttcatcaacctggcggtggcggacctcatcctggtggccgactccctcattgaggtgttcaacctgcacgagcggtactacgacatcgccgtcctgtgcaccttcatgtcgctcttcctgcaggtcaacatgtacagcagcgtcttcttcctcacctggatgagcttcgaccgctacatcgccctggccagggccatgcgctgcagcctgttccgcaccaagcaccacgcccggctgagctgtggcctcatctggatggcatccgtgtcagccacgctggtgcccttcaccgccgtgcacctgcagcacaccgacgaggcctgcttctgtttcgcggatgtccgggaggtgcagtggctcgaggtcacgctgggcttcatcgtgcccttcgccatcatcggcctgtgctactccctcattgtccgggtgctggtcagggcgcaccggcaccgtgggctgcggccccggcggcagaaggcgctccgcatgatcctcgcggtggtgctggtcttcttcgtctgctggctgccggagaacgtcttcatcagcgtgcacctcctgcagcggacgcagcctggggccgctccctgcaagcagtctttccgccatgcccaccccctcacgggccacattgtcaacctcgccgccttctccaacagctgcctaaaccccctcatctacagctttctcggggagaccttcagggacaagctgaggctgtacattgagcagaaaacaaatttgccggccctgaaccgcttctgtcacgctgccctgaaggccgtcattccagacagcaccgagcagtcggatgtgaggttcagcagtgccgtgtagacagccttggccgcataggcccagccagggtgtgactcgggagctgcacacacctgggtggacacaaggcacggccacgtcatgtctctaaactgcggtcagatgtggcttctggctcctcggggcctcgcgagggtcacgcttgcctggtcaccctggggctgcttaggaaacctcacgactggtcaccttgcactcctcacacagaattgctacaatcccaaagcgctcgccccgcagggtccaaaggccagcggtgaccagcctgtcacccagctcctccccgccaaccctgcctgccgctgcacctgcctgccgctgcaggaaacatttctgacaccgtcgaccaggaaagccacacggagaggccactgtgggtgaagcgcctcagttacacaggaaccctaaagcaaatctgccaccgtgggggaactgacgctggagatgcaaggtgctggtgggtctgagctggacgtcgcggtgtgtcctctgtgcccacggtctgagctagctagcgcaccgccgagttaaagaggagaaggaaaacatgctgctctggtgcacgcctgagcgtcctccatcttccaggatggcagcaatggcgctgtgcggcctcaccaggcccacgaggagcagcagcgctcggcccggagcagcaggaaggcccctctgtggagcgcccgccgtctgctccggggtggttcagtcactgcttgttgacatcaacatggcaattgcactcatgtggactgggaccgtgcgagctgccgtgtgggttagtcgggtgccaggacaatgaaatactccagcacgtgtggctgacgaatttgtttctacagaaataacagctggggacaactgcggtgatgatgtaaaaaccttcccataaaatgtaagaaaagctgatgaggctggtgacgttcagcctttgtcaataaacctgtcatgtgcggatccttacggaggc

SEQ ID NO: 9908 - DNA, 2581 bp, Homo sapiens
gggcactgtggccaatgtgaaccctggacgcacccgccagccagccgggaaccttccctcgcgggctcccagggcgggtctcttcctctctctagccctgctcaggcattcggcaggtccagcagaggtacacctcctgcagcgggttccaagtgcacctccagcctgatgggcctgaccaaggaggcttccaggagcacagaaggggctgcaacccaggtacccagagagtgagcagctccacgcgggactgtgcacggtggccgacacccgcagggacgcccgccggacgagcacgcggagggccctcgcctccacggatgcaccatgccggtgtgaggagcatctgttcttcccactctctgcagttaacaaacccaacccaaaccaccacaggtgctcctcctggggagtttcctgtctgacaaatgccaggctcacttcaaggagaatcacgcttctttctaaagatggattcaccatttaaaacagagctctgggagcctttcggcaaatcttgaaagctgcacggcgcagagacatggatgtgacttcccaagcccggggcgtgggcctggagatgtacccaggcaccgcgcagcctgcggcccccaacaccacctcccccgactctcggagcaccagcagtacgtgatcggcctgttcctctcgtgcctctacaccatcttcctcttccccatcggctttgtgggcaacatcctgatcctggtggtgaacatcagcttccgcgagaagatgaccatccccgacctgtacttcatcaacctggcggtggcggacctcatcctggtggccgactccctcattgaggtgttcaacctgcacgagcggtactacgacatcgccgtcctgtgcaccttcatgtcgctcttcctgcaggtcaacatgtacagcagcgtcttcttcctcacctggatgagcttcgaccgctacatcgccctggccagggccatgcgctgcagcctgttccgcaccaagcaccacgcccggctgagctgtggcctcatctggatggcatccgtgtcagccacgctggtgcccttcaccgccgtgcacctgcagcacaccgacgaggcctgcttctgtttcgcggatgtccgggaggtgcagtggctcgaggtcacgctgggcttcatcgtgcccttcgccatcatcggcctgtgctactccctcattgtccgggtgctggtcagggcgcaccggcaccgtgggctgcggccccggcggcagaaggcgctccgcatgatcctcgcggtggtgctggtcttcttcgtctgctggctgccggagaacgtcttcatcagcgtgcacctcctgcagcggacgcagcctggggccgctccctgcaagcagtctttccgccatgcccaccccctcacgggccacattgtcaacctcgccgccttctccaacagctgcctaaaccccctcatctacagctttctcggggagaccttcagggacaagctgaggctgtacattgagcagaaaacaaatttgccggccctgaaccgcttctgtcacgctgccctgaaggccgtcattccagacagcaccgagcagtcggatgtgaggttcagcagtgccgtgtagacagccttggccgcataggcccagccagggtgtgactcgggagctgcacacacctgggtggacacaaggcacggccacgtcatgtctctaaactgcggtcagatgtggcttctggctcctcggggcctcgcgagggtcacgcttgcctggtcaccctggggctgcttaggaaacctcacgactggtcaccttgcactcctcacacagaattgctacaatcccaaagcgctcgccccgcagggtccaaaggccagcggtgaccagcctgtcacccagctcctccccgccaaccctgcctgccgctgcacctgcctgccgctgcaggaaacatttctgacaccgtcgaccaggaaagccacacggagaggccactgtgggtgaagcgcctcagttacacaggaaccctaaagcaaatctgccaccgtgggggaactgacgctggagatgcaaggtgctggtgggtctgagctggacgtcgcggtgtgtcctctgtgcccacggtctgagctagctagcgcaccgccgagttaaagaggagaaggaaaacatgctgctctggtgcacgcctgagcgtcctccatcttccaggatggcagcaatggcgctgtgcggcctcaccaggcccacgaggagcagcagcgctcggcccggagcagcaggaaggcccctctgtggagcgcccgccgtctgctccggggtggttcagtcactgcttgttgacatcaacatggcaattgcactcatgtggactgggaccgtgcgagctgccgtgtgggttagtcgggtgccaggacaatgaaatactccagcacgtgtggctgacgaatttgtttctacagaaataacagctggggacaactgcggtgatgatgtaaaaaccttcccataaaatgtaagaaaagctgatgaggctggtgacgttcagcctttgtcaataaacctgtcatgtgcggatccttacggaggc

SEQ ID NO: 9909 - DNA, 423 bp, Homo sapiens
ctgaattaaaataaattgaatctctttatataaagttattactcttttatattttacaaacttaaaacaataataaaaagagtttatatttattgtctactatgttccaagtactctacatggattagcttacgtaattcttaaaagagctctataaggcaggaattattattagcccccatgtaccagtatgaaagcagattaactctcatatgcccaacatcctaataagtggcactcttaaccactaacatttgcaaaagccaatgaaatcaacattaaagttataaatgaaacaaacactggcaggatttttcgagggacattctatatgtataacacattgggaaagataaacacatctcaaaatgtgttgaaagcattgaaatcatccatcacacttcagaaaaacaaagcattctt

SEQ ID NO: 9910 - DNA, 415 bp, Homo sapiens
ctcactaccacagaaaagtgctccagtgtctctcagtaaagacagagagagagagggagagagagagagagagaaagagagaaatgtacctctctggccttgacattcctttcatcttatacccacccccccccccaaattattatagattaatcacattagcctgagaattgggacagctgtgtcagatgagcagtgcttctaacactgtaagtcatgggagggaaagaaaggtctgcactgttaggttagaggggaaacgtcaggtcaggcacagctagaaatgagacagaggactgagacagtgtctacctgaggactttgggaagaagcgggatttgaaatgaacttcagaattacatatctagaagagctttatgggaagggataatggggcttttcctaccaataggta

SEQ ID NO: 9911 - DNA, 285 bp, Homo sapiens
gaattaattaatgttcctcattccttaatgtttaaagcatttttaaaatatgaggcctgctagagtacctgatgatgcaaaaatcataaaaagaaattaataaggtcacatgccccaaactgacaataacaatattcaatgacttcacctatagttaatgcatagtctatgaatcttttccatgcaaggtaataaatttctttggtatatttagatatggctaacttaatatcttaagaacataatttaatattttatctctctgacacttaggcataacttaat

SEQ ID NO: 9912 - DNA, 219 bp, Homo sapiens
gactatgtggttcctggtgaaagaacacaatatcacctatagtctgttaaagggatcaaattcattgtgatcaaacttctggatccagccatcaagtttcaggaaatacaaatagcaggacgattttgagttgcattacatatgtaatcagtaacatttagactgtgggaaactcgacaattcaaacaccccaggttcttcatcagataaattattagg

SEQ ID NO: 9913 - DNA, 490 bp, Homo sapiens
gtcacacctccgtgagcggcctcgggctcgcggttgaggctgattgaggaagtgggttcaggcggcccgccgtgcctggcacacggtcagagtcccctgacaggactttcccctttctctgagatgacaatcaggccgctttgctttgcactgccctcagagaagcagtgtgcccagaagtcaagtgtgagctcttgagtcaaaatgcttggatttgaattccaactctgctgcttaccagctgtgtgacatggggtgagtgagttacctgacctctctgtacctctatgtcatcatctttaaaatggagcccacagcaaccagggaaatctaacagaagcctaggatgaagaatttcgggaaagaagaaacgtccagcaaggccaagtccctttgtgtgtcagtctgctttctctctcacacatacgtgcacacaggctcgtacacacaaagatgttaagcaaaatataaagctcctccactgataaat

SEQ ID NO: 9914 - DNA, 417 bp, Homo sapiens
ctacttcctcatgccatcacattgggattagatttcaacatataaattttgtgagggacacaaacattcagtccataacctcccctaggctttaagagatgaggggaagaaacatttatcagagcctggaaggaggccaagtactgtggctcatgcctgtaatcccagaattttgggaggccgaagcagacagatcatttgaggccaggcattcaagatcagcctggccaacatggcaaaaccccatctctactaaaaggacaaaaattagctgagtgtggtggggcacgcctgtagtcccagctactcagcaggctgaggcaggggatcacttgagcttgggaggcagaggctgcagtcagctgagattgtgccactgcaccccagcctgggtgacagagtgagactccatctcaa

SEQ ID NO: 9915 - DNA, 535 bp, Homo sapiens
catacacagaggatagctctgaagagagatacctgtgtagtgcagcttctaaatttcataataaaggtaaaaatgggaaatgttttcagttcagataaggttgactgtgcagctcacatctgtatgtgaagcatagtacggatattcataaggatttttagttatcaaaataggttaaattatattctgtatacttaagatgccagaaatacttctatggaaagagttaaaatctcctatctaaactgttaatattaggtgtttaaagaactcacatagtatgactagtttctctcttaagagttaataaataaggaatctgcactgagaaccattgcaaaggaagctggagacgggtggctttcatagagactgggaatgtgagtgctctctttaaaaaaaaaaataccctccttaaaatattataggtgttcctgcatactcatacagtatttcagtatgattttgtccatagactcaaagagactgttttaaagtatagttctgatcatgtcagacctcttttaaaaaaaaa

SEQ ID NO: 9916 - DNA, 363 bp, Homo sapiens
ggaatcagggcatggaaataaaattcaaaatttgtcatgagaaacacttaatctttaatttttattttgcaaaaacaaccccctctcaaagtgttgacctagtctaaggagtgaactcgaatcccagataaatatttcttttaagcaagtcaaacttttattaaaaagcttggccaaattgaaataaagcctttgcaatacatcttctaatttagcaccttgtaagttcttcagatcagaattatgaaagaatagttcttaaagtatcttattgaagcaatagaatttaaaacaaatagagcaggcattaagactttggaaagatagagaaaagctttcatgagtatttatcacctattaatt

SEQ ID NO: 9917 - DNA, 652 bp, Homo sapiens
cctgatggacatttcagaaatgttctattgatgtttctaacgcaacaagcctcatgatattatccttgtgttaacatcattgtgacatcctccacacacccaagtcaacttggacttatttttctgtctcctacaagcaatggctgctaagtcctgttgattctggctttgaaatgtctagagaataccctctcatgtagtcacttctatttttgttgccctagttcaggccgtactctctcttgcttgcctggaccatgacaagtagctgtctagttggtctcatgggctgctatcgatttcctctcaagagtacccttgaagttgccccagagtgctcttcctaaagaatgacttggtgatgtccctttcctactgaaaaaacttgtggtaagtcccaactgcctactgaatctgtttccaactttactcttcagcctcattttctgcaactccctgtcatctccccatgctgaaccccaagagacaactcacgattgctcgatgagatgtccaatttcattcctttgtgctgttgcttgggttgtttaatgcctagaaactttagcaagacaacatgcaaatattctgcagcttctctgtgccccctcacacctgcctgctccaagcgtcattcttcctttgcagttaa

SEQ ID NO: 9918 - DNA, 357 bp, Homo sapiens
ctggtggctcgcagtaatccagtgaagcaggagatccatcaactcccatgagaagagggctgaagccagggagccaagcagacccactcccacagaaccccacaagctaagacccactggcatggaatccccactggctagcacagcacttggagtctgcctaagaagaccaagttcctggggggaagggtgaccaccattactgcgggtctagccggtggttttcccccaccagtgctagggagactgggtggtttgcgctgggcagaattccccacagtgcagtacagaggctgtggcagatataccattattgcatatccaaaggaatataaatcattctattacaaagataca

SEQ ID NO: 9919 - DNA, 450 bp, Homo sapiens
gtggccgaagaatggtttagaagcagcagtgggatgagggagaatcccgaccccgtctcaaaaggccctcagattggacagtgctcacccacactggtgtgggtgggtcttctgtacgcagtttactatactaattcaagtgccaacttcttccagaaacgccctcacagacacacccagaaatcacatttaccagctatctgggcacccccttgcccagtcaagttgacataaaattaaccatccaccatgtgacaactgaggcagagctcgaagtgctgcagcttcaagctgaggaaagcaggactgtgaccccacaccagatgctgctaggagagcagcgagggaggggcctcctctcagccttcagaggaagcgcagccctgtggcaccttgccatccggcctccagagctgtgtgaatgcatttctgccatttgtagcatgcaat

SEQ ID NO: 9920 - DNA, 363 bp, Homo sapiens
cgccaggggccgcgggcacatccaggaacccgccacactgcagccttgaagctgccgctccttccgaggtggccggcgggaggcgagacggcggcgcgcgccaggtagtccagggactgcgcaggccgcaagtacaggcaggcgggcaggccgggcgccaggctgctgcgctgggtcgcggcgccgcgttgcgaagggccgcacagggagctggcgcggcctcggggctccgcgggggtgctgtcggggcccgctgccgccgccgcgctcacaagccggtagtcgtaggtgagcggctcgggggccgaggggactgttggggggacctggcggcgcggcagtggcaggttgtctcgtccgggc

SEQ ID NO: 9921 - DNA, 567 bp, Homo sapiens
cctgagagaaaggctatttggaaaacactattttagcctttcattgttgccaccaaccctctagtaaaatagtccttgaaagctcaatacataaaagaaaggcagagtgctttggttgcatgggaatgcaccctaccctcctgctcagtctcctcctccctgccctcagcccggggctccacacacagccaaatgtggaaatcagtgacgcattctccccaagtcccacagagccaagggagtgttgactttgttcttttttcattgtaagtgtcttttattttggctggatgtggtggctcacacctgtaaccccagcactttaggaggccaaggcgagtggatcacctgaggccagtagttcgagaccagcctggccaacgtggtgaaaccccatctctactaaaaatacaaaaattagccagatgtggtggcgggtgcctatagtcccagctactcaggaggctgaggcaggagaatggcatgaacccaggaggtggagcttgtagtgagctgagatcgcgccactgcactccagcctgggcgacagagcgagactccgtctca

SEQ ID NO: 9922 - DNA, 544 bp, Homo sapiens
ttttttgagagagagtctcactctgtcacccaggctggagtacagtgctggcacccgcctccatgcccagctaatttttttgtattttttagtagagacggggtttcaccgtgttagccaggatggtctctatctcctgacctcatgatccgcccgcctcggcctcccaaagtgctgggattacaggcgtgagccaccatgcctggccagtccagtttttttttaaatgtagtaccccaaggccccaggcctatccttgattttgcatttacttctcatgaactctgcttgggatccatgaggctactgaagagttagtatactaagtgcccttttatttccaggagaccaggcataaggagaaaagagagttgggtttcttgaggtttctattatctcagtcagagtagaaactacagtcctcattcaccagacagcaagagggaataataaaaagccctagtgaaatgtctgacaatagccaggccctttcctgctgaagatagaaaggaaagtacgcaggcatacaggctcaggttctgag

SEQ ID NO: 9923 - DNA, 675 bp, Homo sapiens
tcctgtgtttcatttcaggctttataaatcctggatcaggacagcctgttgaactcagaaaaaacactatcaaaacacaggggaatacgacaagccccaagtataccttctaaaggaacaggcacagtaaactagatgtgcagacattattgcttccttctattgttttgtgcatcattaatatgttacctttatcttagtgtcgcaacctgtgatcctgagcgtttgtgcgtagtatttagggagcagtagagtggattggttaagaccattgcagggagttagtaatgccaaacctcatagattgcaagaattgtatctggtaaagctccaaacatattccctggcataagtaggctcttgataaatgttagctgctattattactgttgttattagtcgctattgttaaaattcaccagatgtggatggaagaggagcttttgcttaagcctggtgagatgtgcttaccatctagttctaatagttcattcccaccaagcaaatctgttgtgccttctgatgactataaaaaggcagcctctcccagcctcatatcctgctgtctctagatcaccagtttgtgaatctctgcaggtggcagatttcccttggcaacttccttgttcctcaagtccagaattgaagtagatttattcagaggttgttcattca

SEQ ID NO: 9924 - DNA, 389 bp, Homo sapiens
aggacaggtgatggccattccctctctcccccccagggcaaacaatgtggcaaggaactggcccagtgataaggggtctcaacaatcagatatggagccatggagggttcttgagcacagacagagcaaaagtggtatttgtggaacactggttttgaagaaatacataactgaactaaaggggagaccaatgggcaaatatgacactcgaaaaagaagaaaacagaacactcctttaggctagaaatatatatgagtgtcttattttagtctacttggcctcatttttccccatggttgtctgacatgttgcctgggggaacacttacagtcacatgagtaatgacaagaatctctttacgtgctacagggtccttaggcttttcttt

SEQ ID NO: 9925 - DNA, 580 bp, Homo sapiens
ccaataaacgcaatgtggagttctgaattaaatgttggaacagaaaaaaagggggcaaaaggagaaaaactggcagaatatgaataagctctgtggcgtaattaatggtattataccaatattaatttaccagttattaaatattgaaagtgttcccctaaaatcagaaacaaagcaaggatgtatgctgtctctgcctctataccatatggcaatgaagttcctagagagtgcaataaggcaagaacaagaaaaataattagagggaagaataaaaattttcttgataaacatactgaccgagtcaaaaatcctaaggaacctacaaaaaaagtaataagtgaacttagagaggtcaaaggacaaaatagataaaatatattatacttctttacatgctagcaggagacaattggaaagtttttaacttctgctcttcacaagacgccattaagaaaatggaaaggcaagccacagactgggagaaaatatttgtaataactcctctgacaaaggatttacatcctaaacatataaagaacgctcacaatcaaataaaaagaaaacaacctaatgaaaa

SEQ ID NO: 9926 - DNA, 461 bp, Homo sapiens
tgtggtagcaataaaaatggtgagagtggtggaattccggccatattttgaaggcaaagtcaataggatttgctaatgaattaagcagtatgcaatgtaatagttgtctcccaagactatgggtaagaacactacccactgaaacactggcagtgctttttaaaagcccagtgttgggccaggcattgtggctcatgcctgtaatcctagcactttgggaggccgaggcagtggatcacctgaagtcaggacttcgagaccagcctggccaacattgtgaaaccccatctctactaaaaaatacaaaaattagccaggcatggtggcaggcacctataatcccagctactcaggaggctgaggcaggagaatcacttgaaccctgggggcggaggttgcagtgagcagagattgcaccacttcactctagcctgggcaacaaagtgaaactccatctcaaa

SEQ ID NO: 9927 - DNA, 376 bp, Homo sapiens
ggattgcgcagaacagtttgtaacacgtggtaggaggaagtttaagggatcacaaatggggaagggatatccttttctcagcgggccccacaattgaaacatttcaaagtatggctcagagaaaatgcgttttaacatgagtttgtgtttctctaggggactcccagttgttgagttgaatatgatggagcatcagattttacctaatacagcagaactcctaaaaagttacagccatatgcaggacggcagtactcagcatggtcttatgcacaggaactaaaggaaaaagagatcgagtcacaaaaattcaggaagagggggtaaatgtggattgtatggaatgaaaaataaacattctcaaggatgtgtgact

SEQ ID NO: 9928 - DNA, 470 bp, Homo sapiens
ccaaggaatatctggtgaacatcacagaatacagggcttctcattccactccaattgagtggtatccggattatgaagtggaggcctatcgccgcagacaccacaacagcagccttaacttcttcaactggttctctgaccacaacttcgcaggatctaacaagattgctgagatcctatgtaaggacctgtggcgcaatcccctgcaatactacaagaggatgaagccacctgaagagggaacagagacgtcaggggactcccagttgttgagttgaatatgatggagcatcagattttacctaatacagcagaactcctaaaaagttacagccatatgcaggacggcagtactcagcatggtcttatgcacaggaactaaaggaaaaagagatcgagtcacaaaaattcaggaagagggggtaaatgtggattgtatggaatgaaaaataaacattctcaaggatgtg

SEQ ID NO: 9929 - DNA, 2214 bp, Homo sapiens
tcctgaaaagccagctcgcccggggcggcggcgcagagccgggccggcgcacgaggcagccagcgcggccatgacggcggagaaggcgctgcccctgggcaatgggaaggctgctgaggaggcgcgggagtccgaggcgccgggtggcggctgcagcagcgggggcgcggcgcccgcgcgccacccgcgcgtcaagcgcgacaaggcggtccacgagcgcggccactggaacaacaaggtggagttcgtgctgagcgtggccggggagatcattgggctgggcaacgtgtggcgcttcccctacctgtgctacaagaacggaggaggggcattcctgattccctacgtggtgttttttatttgctgtggaattcctgtttttttcctggagacagctctggggcagttcacaagtgaaggtggcattacgtgttggaggaaagtttgccctttatttgaaggcattggctatgcaacacaggtgattgaggcccatctgaatgtgtactacatcatcatcctggcatgggccattttttacctgagcaactgcttcactactgagctaccctgggctacctgtgggcatgagtggaacacagagaattgtgtggagttccagaaactgaatgtgagcaactacagccatgtgtctctgcagaatgccacctcccctgtcatggagttttgggagcaccgggtcctggccatctctgacgggatcgagcacatcgggaaccttcgctgggagctggccttgtgtctcttggcagcctggaccatctgttacttctgtatctggaaggggaccaagtctacaggaaaggttgtatacgtgactgcgacattcccctacatcatgctgctgatcctcctgatacgaggggtcacgttgcccggggcctcagagggcatcaagttctacttgtaccctgacctctcccggctctccgacccccaggtctgggtagatgctggaacgcagatctttttctcctatgccatttgcctgggctgtctgaccgctctgggaagttataacaattataacaacaactgctacagggactgcatcatgctctgttgcctgaacagcggcaccagcttcgtggctgggtttgccatcttctcagtcctgggttttatggcgtacgagcagggggtacccattgctgaggtggcagagtcaggccccggcctggcctttattgcgtaccccaaggcggtcaccatgatgcctctctccccgctgtgggccaccttgttcttcatgatgctcatcttcctgggcctggacagccagtttgtgtgtgtggaaagcctggtgaccgccgtggtggacatgtaccccaaggttttccggaggggttaccggcgggagctgctcatcctagccttgtctgttatctcctattttctgggcctcgtgatgttaacagagggtggcatgtacatcttccagctctttgactcctatgccgccagtgggatgtgccttctcttcgtggccatctttgagtgcatctgcatcggctgggtgtatggaagcaaccggttctatgataacattgaagacatgattggctaccggccaccgtcgctcattaagtggtgctggatgatcatgacccctgggatctgcgcggggatcttcatcttcttcttgatcaagtacaagccactcaagtacaacaacatctacacctacccagcctggggctatggcattggctggctcatggccctgtcctccatgctctgcatcccgctctggatctgcatcacagtgtggaagacggaggggacgctgcccgagaaactccagaagttgacgacccccagcacagatctgaaaatgcggggcaagcttggggtgagcccacggatggtgacagttaatgactgtgatgccaaactcaagagtgacgggaccatcgcagccatcacagagaaggagacgcacttctgagcggccaccagccatctggggctcttcttcctttcttccccccgtgtatgtaaatgaattcctgaaccccatacttcacctaatggtaggggcttgcttgttttgcacaggattaattaacaagttaattttaaggtggccactgtacactgctctaaagtcatatcccctccccgcccccagtcatcatggaagtaaccactacaaagagataacactgtacggggactgccagatcttctgtc

SEQ ID NO: 9930 - DNA, 574 bp, Homo sapiens
ttctgtctcaggctggagaaagcaaacactcctagccattcctctgactcatgtacaaaacttctctggggtgtgtatgttcccctctgatttattccggacaggaagcaaccggttctatgataacattgaagacatgattggctaccggccaccgtcgctcattaagtggtgctggatgatcatgacccctgggatctgcgcggggatcttcatcttcttcttgatcaagtacaagccactcaagtacaacaacatctacacctacccagcctggggctatggcattggctggctcatggccctgtcctccatgctctgcatcccgctctggatctgcatcacagtgtggaagacggaggggacgctgcccgaggtgagaccgccccaggagggctggtgcgtttgggcagggttcgcgccttgggtcccagtttcctcatctgcatggtgcgcgatgacggcctgcgcccacctgcctcaaggggacgctgtggcaaactcctctctggccaatgttcagtatcatggttgtgcccaaggtgtctctgtgaagtcttttggctgagccagt

SEQ ID NO: 9931 - DNA, 519 bp, Homo sapiens
aaaaaaaaaaagattaaaaatgtaacagtgtgggaaaatgttgataattaatatagagtgaaaaaattcagcacataaaatacttaggtttatatttaaactaagattatgactataatttgtatattctaatttgtgtatttgtaatcttaatatacaaattataaggcaccacgcctggcttttctttttcctcctcagacatgaggtctcgccgttgcccaggctggtcttgaactcctgggctcaggtgatcctcccaccttgacctcccagagtgctgggattacaggcatgagccaccacccctggcctagaaaaatattaaaataccattaaggaatattcaaaactggttattatatcagggtagtagaataagggattttttttttaatctattttccattgcagctggttttgatggttttgaatctgttctctggcattctgtcctgcagttgccaccagctgaccactctgcaatacaacttcttaaacttgcagccaggaggagcc

SEQ ID NO: 9932 - DNA, 503 bp, Homo sapiens
taatgatgaatgtttccaggaaaggaaccagaatgactagaacaggggttggcaaactttttctagaatacaaaaaaggaaaagagacgtaacttctcattctacattcttctgtatcttctggaatttttaactttcacaccattatagacacatgctatgtaccatttcaaaaacttcctgacccaacatcttatgccagctatggaggatcaatttcttgtaagctgtgactgacttcaggcaggtccaaccaaaaagcactgctctgtatttactcattcactacctggaagtatgggaagttaatagctgtagggctaccaatatggaagctggttctaagattcatttcataagcctcctgggaagtttcagtgggatttcagtgggattcagtactagtcactcatggagtggctaacttgaaaatacatcactccttttctgcatatacctcttttctgtactgacaatgtgaaagaatataggcatgttctgag

SEQ ID NO: 9933 - DNA, 588 bp, Homo sapiens
taaaagtacacttaaacatcattaaattatatagatagctggccacttaaaatttttctactttaatttacaagtgttgacatagtaaaagcaaattgtttaaggatgcttcaatatttgtatattcaacttcagaagctttcaacgagtataatacaccttcatgcatttaaattatgcattatttcctataaactgggactatttttaaaagatagtgaaattccagcttcagctcttggatagtgaggtcattgaatacagaagagaaattgagaaaattattctgagagttgaagtaatgtgaattttttttgagtgctatttatttaagtctcaacatttttcaggcttaacagaaagtacgtatcaggagacttttaagaaaccatctactaattgtaatgatatgatgtataaatctaaaattaggaatcaaagactatgtcttatatacagtggacttagttaatatgtttagccaaccaatacttagcatttttctctaaacctcataggtgattttgaccatactagtttgtaaatgttgctagtggcattgtagatggactgtagtacagcagaatt

SEQ ID NO: 9934 - DNA, 288 bp, Homo sapiens
gcctccccgcgctcaccggacctgcactgctggccggtgtgtcaggaaccgggcagagaagcccccagccacatcgtccgaccccaccaggctgcaagctctgtgagggcagaggccccgcctggcgcgcggaaggctgatcttccaacacccagcccagtgtctggcaggatgcatgtggaatgaacccttgcaaagaacctgctagctaggttatgcggcctctcatattaaaaacaaaacaaaaacaataaaacacggcagtacctagaaagtctacaccttact

SEQ ID NO: 9935 - DNA, 416 bp, Homo sapiens
aaaactgctcaatattttaaaaatctaagctcataaaaaccagctctattttaaaagcataaaatgtacaccccaaatccaagcatttacctacctttcccaagagatgaagccaagctgcttagagccaagtttaaaaaattaaaaaagaggccagatgcagcggctcatgcctgtaatcccaagataggaggatggcttgaacccaggagtttgagaccagcctaggcaacatagtgagacctcgtctctacaaaaaataaaaaaattagctgggcatgatggtgcgtgcttgtaattccagctactcgggaggctgaggtggaaggatcgcttgagcctaggagtttgagactacagtgagctatgatcacgtcactacactccagcctgggcaatagagcaagaccctgtct

SEQ ID NO: 9936 - DNA, 717 bp, Homo sapiens
attattgtaacaatattcagcagttaggatcttatccttaaaattgttctgtgtcatactaaacacattatctaaaacctactcctagcttttaaaagcaagcctactttgaatccctttgaaaacaggctgggcatggtagctcaggcctataatcccagcactttgggaagccaaggcagaaggatcacttgaggcccagagtttgaaactagcctgggtaacatagcaagactgtctctacaaaaagttaaaaaattatctgggtgtggtgtcgcacacctggagtcatagctagtcagaaagctgagccaggaggattgcttgaacctaggaggtagaggccacagtgagccatggtcctgccattgcactccatccttagtgacaaagcaagaccctatctcaaaaaaataaaataataaaatgaaaatgaaatcccaaagcatacgtggttcaggcaattgtacatacttttaagtcttaaaatttttgctgggcataatggcttacaattgtaatctcagcactttgggaggctaagacaggaggatcacttgaggccaggagttcaaggccagcctgggcaacatagcaagaccccatctctatttctaaaacagaaagaaaaaactatgtaaagtttcttaattaaagttttttcttgttaaatatttctaatatacagaaaagtccaaaaactaatataactgatac

SEQ ID NO: 9937 - DNA, 399 bp, Homo sapiens
gaacaggtagtgatgctctgatgggggaacaagaaatgatgagatttgagaatcctaaaaaggaagaaaccttgagaaaaacaaatcaaacctagattaaataaagagtgatgaggccgggtgtggtggctcacacctgtaatcccagcactttgggaggccaaagcaggtggatcaccagaggtcaggagtttgagaccatcttggtcaacttggtgaaaccccgtctccactgaaaatacaaaaaaattagctgggcgtagtggcgggtgcctgtgatcccagctactgggaagacagaggcaggagaatcgcttgaactgggaggtagaggatgcagtgagccaagattgcaccactgggctctagcctgggtgacagagtgagactccatctcaa

SEQ ID NO: 9938 - DNA, 459 bp, Homo sapiens
cagcttcctcccatccaactttctcccatagaatcactaaaagcagagaactactctattcctgaagccctataagctgaaactaaatgttaagggacaaaatcccattcctgatgcgtgggccacaccaagagttcaccaaaccactgatgccacaaccagagacacttagaccacaagacaggactagaagccgacagcttcatgctgtgggcagcttctccaaggcactggaataagagtccatattataaagacacatttacccctcttaatgcctacctttttgactcggcagaataatggtgtaatcgaaatttcacaatcagtagcttctgctgggaactagatagaaccctaagagatccttgagtccccctagtgggtgactttgggaacatccctaatacaactggtgctcactctgctttaatccaactcagtcatgggacactagat

SEQ ID NO: 9939 - DNA, 537 bp, Homo sapiens
cagtttcacctatacctctgacttttcccgaaaatcagaaggaagaaattaaggcaccgaagagaaactttgggaccaaaaagaaactttaccgacaaaatatagtgttgaatagaccattctctattcagaagctaaactgtttgtcgccttcccttattgctaaggataagtgctgctcacccattgaacaaaaataactcttttctttcatacatctcaatgtgaacacatctactctaagaagcccaactaagatatggttaattattccaagacacaggtactattaacagtcccccaaaatcaccaaacagttgcttgatgtgatatggagtagaacttgtgaaaagcactgctgagatgtctatatataaacccacaggcttctatactgacatatttcacaatcttttgcatgttgtgtttcaagtaaatggttcacttggtagactattctattcaaaaggctactcttttttcagtgattgttttccagtataattccatcaataaatggtataattgacttataaa

SEQ ID NO: 9940 - DNA, 436 bp, Homo sapiens
aacagcactagggagggcactagccatctaatcctgtgtgacagcagtgtcgctgcagacttggcagctcagaacagcacgtggcctccagatccagttcctgttgtggggctcagccaggttctctgtgcagggtcccatcaggttaaggctgccttcgcagttgagaccacccgccgtccccaccagtggggtccttagcttggcctcccaccactcagagccagcgcaggagccgggtgctgcatcctcacctagtgccacacacagtcacagcagccatcaccgttgccatattctgctggttgaaagcagtctcaggtcccacctgcacccccagggaggggccacacctgggacaggggtcctggggccacgttcaagcctgtccacctcagctggtgaactgtgctggggtttggagagggtgagagta

SEQ ID NO: 9941 - DNA, 342 bp, Homo sapiens
tcccagtcgcaggtatgtctttatccacagtgtgaaaatggactaatacagcagccaacatggtaaccccttgttcccatacaacgggtgtgtatggccccttggcagatatcaatccagtgtccacaactagggaggatttagcaaggggattttattacttgtaacaagttaaggagaacactgggattattcccacaacagtgtcttccctgagcttggggctggatcaggttttgtaagcatggggtaatgaggtgtgatctgatttgatcctgcaatgagttgatgccaggaggcatgatctgaccagatcctgccagggtgtgacccaggagctca

SEQ ID NO: 9942 - DNA, 455 bp, Homo sapiens
gcttattgctaatcacatttctcatggttggtgttttaatgtccccaactcccatttctcctgcctctctgcttgaacaaattaccttatttcctaatttgttagaaagagacctttcactatgactgcatcttcatctttgcatcttcaacttctccccttccctcattaatttgccactatttctggagggggaaaaaagcagctcctatttggtgccaaggaaaaaccctcccactggattctcaatgccctttcctcccacgccctcctagttatcagtatatcccacttttcatgctacagtggtctctcccacaggactaggtccctccctttgcctacagtcatgaacagtccccattacctttgttaagcacgatataaattctaaaaatggtttcatagccatgctccatttcatttttcataaccatagtgtatggtctatagcc

SEQ ID NO: 9943 - DNA, 1005 bp, Homo sapiens
tcttactctgtctcccaggctggagtgcagtggtgcaatctcagcttactacaacctccgcctcctgggctcaagtgatacccccacctcagcctcccaagtagctgggatcacaggcttgcgccactatatccggctaatttttgtatatttcgtagagacagggttttgccatgttgcctaggctggtctcaaactcctgagctcaagtgatccacccgcctcagcctcctaaagtgctgggattataggcctgagccattgtgcccggtcacttccagattttgaagatagagccaacaggatttgttaatggattaggtgtggcaggaggagggggaggaagagagagagagactggagttgaagttaaggctcatttcaaggtttttagcctcaacatgtgcaggaatggagttgtcacttgctagaatgggggagactggaggagaagccggctgggagaggtttttaatgaaggggttggctttggatacattaagtttgacatgcattttagacatccaggtggagatattgaagaggcagttggctataagtgtctgatgtccatattagcggatggggctagagacataaatttgagaattgtcagtgtataaacgttgttttgaaagaaagtggggctgaataatttagaaaggagtgcatagagaaaataagtttactattaaaatagctttaacaggccgggcacggtggctcatgcctgtaatcccagcactttgggaggctggggtgggcagatcaaaaggtcaggagtttgagaccagcctggccaatatggtgaaaccctgtctctactgaaaatacaaaaattagccaggcgttgtaccgggcacctgtagtcccagctacttgggaggttgaggcaggagaatcacttcaacccgggaggtggaggttgcagtgagccaagatcacgccactgcactccagcctgggcaacagagcaagactccgtctcaaaaaaaaaaacaaaac

SEQ ID NO: 9944 - DNA, 671 bp, Homo sapiens
taataagtgtctatctttaagaatgatagctaagaaggcagggatttttgtctggaatatatcccatgtgcacaaaacagtgcctgataaatagaaggcactcaataaatatttactgaatgaaatatttgtttaatgatatgattagctgggaccaggtcaaaaggaacttttatttaattttttttttttttttgagacagagtctcagtctgtcgcccaggctggagtgcagtggtgcagtctcagctcactgcaacctccacctcctgggttcaagcaattctcctgcctcagcctcccaagtagctgggattacaggtgcccgccaccatgcccggctaatttttttgtatttttagtagagacagggtttcaccgtgttagtcaggatggtgtcgatctcctgacctcatgatctgcctgcctcagcctcccaaagtgctgggattacaggcttgagccaccaggtccagcccaaaaggaacttttaatgcaaactgtaaaaccatttaccaaaaatagattaaagccatgcactgttacaaataatctaggtgcatttgtaaaaaatgaacccctagaagttcagtgtctgagaactaatctggtcagattataggtcctgaatgagctgcctttctatgagtataaattctggggaaatatat

SEQ ID NO: 9945 - DNA, 351 bp, Homo sapiens
tctggcctggcacaggattttagacatgcaggcacctgcacagacagacacctcatcctgggacagcaaaacccagccgcatgctactgcttcccctgctgtgccctcctcagacatccctggtccatgtacactcctacctgctgagcccctcctaaaaaaaaaaattaaacatcccctcctaaaaaaaaacaattaaaattaaaaaataaatttaaaaattaaaaatccccttctgctaggtgtgctgttcacgcctgtaatctcagcgactcaggaggctgaggtgggaggatcgcttgaatccaggagttcgagatcgggctgggcaagatggcaagaccccaactc

SEQ ID NO: 9946 - DNA, 326 bp, Homo sapiens
cgtcattcctcctttcctcttattctggctagcttttccacagtgtcatgtaaagaggcagcattttctagaagatgcaagtcatttgaagtagtcatttggttttcttctcatttcactttcagcctgcctttaaaaatgtagctgaggcccaccgctgtggctcacacctgtaatcccagcactttgggaggctgaggcggaaggagcacatgagcccaggagttcaagaccaacctgggcgacagagggagaacctacaaaaaatgaaaaataaaaaatacaaaaatggccgagtgcagtggctcacgcctgtaatcgcagca

SEQ ID NO: 9947 - DNA, 261 bp, Homo sapiens
agacgatgcagataaccctaaatgttacattggaatttaagagatcagtctgaatacatggtttttaagatatataaagaaaaaggcaggcgctgtggctcacacctgtaatcccagcactttgggaggctgaggcggaaggagcacatgagcccaggagttcaagaccaacctgggcgacagagggagaacctacaaaaaatgaaaaataaaaaatacaaaaatggccgagtgcagtggctcacgcctgtaatcgcagca

SEQ ID NO: 9948 - DNA, 721 bp, Homo sapiens
tgtagaaatgggctctcactgtgttgcccagactagtttggaacttctggactcaagtgattcttccatctcagcctcccaaagtgctaggattacaggcgggagccaccacgcctggccagttggagacagttgtatattaacatgcattttaaagaaatactatacagagatccttggtaccctttactcagtttccctaatgatgacttcttctaaaattgtagcataatattacaccaggatattgacctttatctaatccaggtacagatcattccatcccaggaggacctctactgttgcccttttctagccacacctgtctccttcccttctgcttccttcgggtttattttggtcttctttttctagtttcttgagctaggaacttgtattaatgatttgagacctttcctcttttctgatgtaagactctagtgctgtaaatttcccacttagtactgccacagctgcatctcacatatatgttgttttttcattttcattcagttctaggtattttttaaaaatttcctttgataactacttctttgactcattgtcttagttcatttgggctgctataacgaaatatagtagtcccctgttatcagtaacctttggtcaactgtggcctgaatatattacatggaaaatttagaaataattcataagttttaaatcgcatgctgttctgagtagcatgatgaagtcttac

SEQ ID NO: 9949 - DNA, 337 bp, Homo sapiens
ttttttttaattgacaaatctgaccttgagggagagaaaaaataaatgcaaccacaacttgcatggaatgaaaaaagcttttggaattaaatcatttggcagtgactgaaaaataaacatcggagtggcttttgttttaattttgttcagcgcgttgttgatttctttataacaaaagcaatagaaagaaaagatgaagtaatagtgaaccaaacagaaataattttccgtgtattgtgcttgtcttcactgtgagtttagttttctatagtcaatgtcaaattgatcagacttctactgtgtgattgaagtacttctttaaaaaaaaaaaaacact

SEQ ID NO: 9950 - DNA, 351 bp, Homo sapiens
tttcttctttgactcacattttatttagaagcataaagttctggtttccaaatatctgtggattttccaccaacctttccattattaatttctattttaattatactgtggtcagagagcatactgtgtatgaggtaaagtcttctaaatgtattaaaatttgttttcaaacctagaatatagtctatgtccataaatgtttcatgaacacttgaaaaaaaagtatattcttctatgttatatggagtgctctttcaagtcaggccaggttggttaatggttcaagtctattataatcttgctgatattctgcttgtcctattatttattgaaagagtattgaaatctccg

SEQ ID NO: 9951 - DNA, 229 bp, Homo sapiens
tgcctacaactggtacctgctacactctattgggctcatctcttaaatccatctttcttctgccctgttacttagacaaacacccacttcccagcttctaacaacgtgacggcttggctaaaagggattattatccctccagtggggtcccgtagcattgccacacttcagactaaggtaccaggtcactccttgattggaaaataatgttgctaataatactcaaaaa

SEQ ID NO: 9952 - DNA, 826 bp, Homo sapiens
gagacataacaggtagacacagagaatcacaatttaacagagcaggaacccacaagaagaaatttctgcaagaaccagtaccaagttcttttgttccctgtacatcatgactagtttccaacaaaaaaattacaaggcttaccaaaagacaaaaaacacagtttgaagaaacagagcaagcatgagaacaggctcagatatgacagggatgttggaattatcaggttgggaatttaaaataattatgctaaaggttctaatggaaaaataaacaatatgcaagaaccaacagataacgtacaaagagatgaaagttctgagaaaaaaatcaagcataaatgctagaaatcaagaacattgtgacatgaagaatgctttgatgggctcattactaggctagaccctgctgagtaaagaatcagcttgaggctatgtcactagaaacttctaaaactgaaaaacaaagaaaaaaagactagaaaaaaatcagaagagaatattcaagaaccgtggggcaattacaaaaggtgtaacctacacttaatgggaatacaaaaagaagaaagggagaggggaacagaaggatcaaataaacacccactcaaactctgcagcttgaaaggaaatgatattccacatagagacaagacttttgaattactttctctcttccctttctcagaagtccactatcagtttctgacctccaaaaacttttttcttaagagctgaaaaaattcctaaaagaaatggaagatggaagatttaaggaaactgattaactttgcaatttataaataaattttaagccataggattaataaga

SEQ ID NO: 9953 - DNA, 578 bp, Homo sapiens
acacctatagtcctactatagctactcaggaagctgaggcaggagaattgcttgaacccaggaggtggaggttgcagtgagctgagaccatgccattgcactccagcctgggcaacagagtgagacttggtgtcaaaaaaatagtaataaaaaataataatatgaaaggagagaatgaacaaagagagagaaatgagtaaagaaagggatacaaaagattaaaagtgcaacaggatttaaagccatgttgtagacagtgaaccacagaacacctgaccatgactatggcatacgtatttgggattctcttttgaacagagagaaaaaggacaaagaaatgaaaatgatgaaagaaaagagcatgatcaatgagcacagataacagtctaaacatacaaaaattaactggtggtctagaagggatctcttgtccctccaaagaacagaagttatcaaacgttaccctctctaactaaaagagcagcaatgatgtgggcttgctgatttagaaagttcacagtgtttcatgtaaaagccatcggtgagaggcatatttatatatcctccagcaagtgatg

SEQ ID NO: 9954 - DNA, 560 bp, Homo sapiens
agtgaaggacaagtgttggttcttggggccacaaatcgccctcatgccttggatgctgctctccgaagacctgggcgatttgataaagagattgagattggagttcccaatgctcaggaccggctagatattctccagaaactgcttcgaagggtaccccatttgctcactgaggctgagctgctgcagctggcaaatagtgctcatggatacgttggagcagacttgaaagtcttgtgtaatgaagcaggtgagtgtggtttgctatggtgagtctctattgatgcacttatctccagtttacttacatacaaataatttatattttacagatttcttaatggaagtagctttgtttctaattataaaatgtgtaatttttatttgaaaaaatttttattggaaaaacctagatgattcagaagactataaaaaaaaataaaaatcactcaatcctacctctaaaggataaccaccattatagtgtatacagtcagccctccatatccttgggctcagcatctgaggagtcaaccaactgtggtctgaaaatattcagg

SEQ ID NO: 9955 - DNA, 1116 bp, Homo sapiens
cccggggtctctccctactttctttccaactcatcactcccataacctagtgctgttatgggtcaaacttggtagcaggcagcacagacgagggctcaccagacttctctggagaacactctggtccttaagcatgatggtaatcttgaattttggtagtggttaaagcaagaatggccttagctagctggtcagattaggacactctctaccttcttgtcatccatgaatctgccttagtggttacacactgtcttctatcagcagagttccaagcacttacaacagctatttggggcaccagagaaagaactgaggcccactgaattgcactgggtatattccccttaggtggtcctaaaggaaatgagtaaagcaagatttgccacagaagttctctgaacgtgcagaatgtagacctggaggactatgtgctagtgtgagcttcctgagaacctttaagaggcaaattcaagccggcgtggtggctcacacctgtaatcccagcactttgggaggccgaggtgggtggatcccttgaggccaggagttcgagaccagcctggccaacatggtgaaaccctatctctactgaaaatacaagttagccgggcatggtcacgagcgcctataatcccaggttctggggagactgaggcacgagaatcccttgaacccaagaggttcaagattgcagtgagccgagatcacactactgtactctggcctgggcgacagagcaagactccttctcaagaataaataaataaatacatcaataaatacataaatacataaaatgcaaattcagctcaggttcaggagtttgtcagagggagcttgtcacagggctgtaggcaatatacatggattattacattagaatcagcagtacgaatatcatgtgatgcagagtgtggcaagccattgaggcagccagggtcattcgggcttggattgaggacatacctttttagctagcatcttttagcaggttcacttgtgacaatgagaggctgacacatctttgacctctagtcagcggagatgctcttactgtggggagagaggccccagcatagtcaggagcagttctgcactttaccagttctatgc

SEQ ID NO: 9956 - DNA, 385 bp, Homo sapiens
tctaagagctgaactcatagaagcagagtagaattgtagtttccagggcctggaaagacaggaggtgttggggagatgttggcccaaggatatgcaatttcagttagataaagaggagtaagttcaagagatgtattgtacgatatggtgactgtgtcaatgacaatgtattcttgaaaattgctaagaaagtagattttagttacatacgtatacatgtgccatgctggtgtgctgcacccactaactcgtcatctagcattaggtatatctcccattgctatccccccctctgcttgtgcacatgtaccctaaaacttaaagtataataataaaaataaataaattaattaattaattaattaattaaattcatcaaaccgta

SEQ ID NO: 9957 - DNA, 396 bp, Homo sapiens
ccgcttcctcgcgcaggtggcaggtcgcctctggcagaacctcttccttcgttcccagtccccagcctcttggcgttttgtctgacgcctcttttgtgtcggactcgacgctttcagcccgtcctccagtgttttcatccccctctccccaacgttgcactctcagactccgcaaaccccgcccgatttggttcaattaaagttgaccagtatttgttccgagcttaggaagtacttggccaggccatgcgaggcctatatgagaagaatgctaagttcatctgcaagacagacatacagcatctactcttcaagactgctttaaggataagaggaattgaatgtaaagtgctgagttatccataaatgttgtatattattcaacaaaaaaaaaaa

SEQ ID NO: 9958 - DNA, 719 bp, Homo sapiens
gtgacgtaaaggtttcatgctttgactagaagggagaaagaaaaaaaattttaaaaaaaggccgggcgcagtggctcacgcctgtaatcccagcactttgggaggccgaggcgggtggatcacgaggtcaggagatcgagaccatcctggctaacatggtgaagccctgtctctactaaaaaatacaaaaaattagccgggcgtgatggtgggcgcctgtagtcccagctattcgggaggctgaggcaggagaatggcatgaacccaggaggcggagcttgcagtgagccgagatcgcgccactgtactccagcctgggtgacagagcaagactctgtctaaaaaaaaaaaaaaaaaaaaaaaaaacacccaaaacgcaatactatattcatagatcgattgataatgctgagtctgtctttaaagtatgagctgcaaaaatctggctaatcagacatggtaatagagccagctcctgaacatgtacttgaggtgttagtccacatgaaaaaagggtttttatggcaggcatggtggctcacacatgtaatcccagcactttgagagactgaggtgggtggatcacctgaggtcaagagttcaagaccagcttgaccagtatggtgaaaccccgtctggccgggcacggtggttcacgcctgtaatcccggcactttgggaggctgaggcgggcagatcacgaggtcaggagttcgaga

SEQ ID NO: 9959 - DNA, 488 bp, Homo sapiens
cattcagaaatttggatgggacatagtgggaatgtctctctctgctgtcacctcaaaagactggaatggctggagacattgaacagcttgactggagtcaaatgtctgaggtctctgttcactgtcaactaaattcctcagttcttcagtgttctctgtctacatggctagctagcttgggcttgctcacagcatggtagtttcaggtatttagacttcttacatagcagctggcttcttctagagagaaagcagaacctcttaaggctaggcccaggattgagatgccttctgccacattttactgatcaaggcaacttacaagggtagcccacattcaaggggaggcgaagtagattcagcagttgatgggtagaacgatatgcatctatagagggaaaaattgctcatagccatcttagcagatagactgtgtttcatacatataaaagaaaaaagactttcatatatatgaaagaaaaaaaaga

SEQ ID NO: 9960 - DNA, 570 bp, Homo sapiens
agtaatttcttaagtctgaacattaacttttgggtgccacagataactagtatggctcagatcttcagctcccagattcgcaacagctccctggctgttgagaagagttgacttagccttgttctcaggaaaacgatcctgtgcttgagcctgctctggcttctgagaaagccatgggaacctacatctctgcttcatgaaagtagtaagaaaagggctgactcagctgggaggacttccttttccttcttatagggaaaagctggtgtctgtgaagaggagttatcactaccatgactatcaggatggagacgcagatgtgttttccagggagccctttgtggtctggttccaatctccccacactggtaagacccacacaggcctttctgtctgggacctccccaacggcccatgaatgcgcagcagccttgagcatgagcccattaaggaggcattaggctggatgtgacagtgcattgcttctaatacttcaatgtagacgatgcagttcagtgtgatggcaccaggcttgcttctcagaatgccatgactcaagacttccccagc

SEQ ID NO: 9961 - DNA, 1319 bp, Homo sapiens
ctagatgtcagagctggctcccggttgggatatgagtgactttgtggaggatggcgcctaaatgaggcatgccaatttctgcaccaggtgacgaacataagggctccttaaaggctagcccaatgtatctgtatttccttggggattaaaacccatgatcttcagttcctcagagaactgaaagttgcaaggagaaatccagtaattcctgttatctgcaggctttataagtcagtggagcctgcggaagtggccagaatccagcactccaagcactgctgtcttctcacagagtcttgaagccagagcagcgccaggatgtcacgggagctggccccactgctgcttctcctcctctccatccacagcgccctggccatgaggatctgctccttcaacgtcaggtcctttggggaaagcaagcaggaagacaagaatgccatggatgtcattgtgaaggtcatcaaacgctgtgacatcatactcgtgatggaaatcaaggacagcaacaacaggatctgccccatactgatggagaagctgaacagaaattcaaggagaggcataacgtacaactatgtgattagctctcggcttggaagaaacacatataaagaacaatatgcctttctctacaaggaaaagctggtgtctgtgaagaggagttatcactaccatgactatcaggatggagacgcagatgtgttttccagggagccctttgtggtctggttccaatctccccacactgctgtcaaagacttcgtgattatccccctgcacaccaccccagagacatccgttaaggagatcgatgagttggttgaggtctacacggacgtgaaacaccgctggaaggcggagaatttcattttcatgggtgacttcaatgccggctgcagctacgtccccaagaaggcctggaagaacatccgcttgaggactgaccccaggtttgtttggctgatcggggaccaagaggacaccacggtgaagaagagcaccaactgtgcatatgacaggattgtgcttagaggacaagaaatcgtcagttctgttgttcccaagtcaaacagtgtttttgacttccagaaagcttacaagctgactgaagaggaggccctggatgtcagcgaccactttccagttgaatttaaactacagtcttcaagggccttcaccaacagcaaaaaatctgtcactctaaggaagaaaacaaagagcaaacgctcctagacccaagggtctcatcttattaaccatttcttgcctctaaataaaatgtctctaacagaaaaaaactgctccctgtacttagg

SEQ ID NO: 9962 - DNA, 1092 bp, Homo sapiens
ggcagagcaggggtagacttagcatgtaagggagggtcagttggtcctgcaacaggtaggacatcagtcttgaagccagagcagcgccaggatgtcacgggagctggccccactgctgcttctcctcctctccatccacagcgccctggccatgaggatctgctccttcaacgtcaggtcctttggggaaagcaagcaggaagacaagaatgccatggatgtcattgtgaaggtcatcaaacgctgtgacatcatactcgtgatggaaatcaaggacagcaacaacaggatctgccccatactgatggagaagctgaacagaaattcaaggagaggcataacgtacaactatgtgattagctctcggcttggaagaaacacatataaagaacaatatgcctttctctacaaggaaaagctggtgtctgtgaagaggagttatcactaccatgactatcaggatggagacgcagatgtgttttccagggagccctttgtggtctggttccaatctccccacactgctgtcaaagacttcgtgattatccccctgcacaccaccccagagacatccgttaaggagatcgatgagttggttgaggtctacacggacgtgaaacaccgctggaaggcggagaatttcattttcatgggtgacttcaatgccggctgcagctacgtccccaagaaggcctggaagaacatccgcttgaggactgaccccaggtttgtttggctgatcggggaccaagaggacaccacggtgaagaagagcaccaactgtgcatatgacaggattgtgcttagaggacaagaaatcgtcagttctgttgttcccaagtcaaacagtgtttttgacttccagaaagcttacaagctgactgaagaggaggccctggatgtcagcgaccactttccagttgaatttaaactacagtcttcaagggccttcaccaacagcaaaaaatctgtcactctaaggaagaaaacaaagagcaaacgctcctagacccaagggtctcatcttattaaccatttcttgcctctaaataaaatgtctctaacagaaaaaaactgctccctgtacttagg

SEQ ID NO: 9963 - DNA, 1121 bp, Homo sapiens
  misc_feature (698)..(698): n is a, c, g, or t
  misc_feature (705)..(705): n is a, c, g, or t
  misc_feature (724)..(724): n is a, c, g, or t
  misc_feature (726)..(726): n is a, c, g, or t
  misc_feature (740)..(740): n is a, c, g, or t
  misc_feature (858)..(859): n is a, c, g, or t
  misc_feature (863)..(864): n is a, c, g, or t
  misc_feature (869)..(869): n is a, c, g, or t
  misc_feature (871)..(871): n is a, c, g, or t
  misc_feature (884)..(884): n is a, c, g, or t
  misc_feature (887)..(887): n is a, c, g, or t
  misc_feature (901)..(901): n is a, c, g, or t
  misc_feature (903)..(903): n is a, c, g, or t
  misc_feature (909)..(910): n is a, c, g, or t
  misc_feature (922)..(922): n is a, c, g, or t
  misc_feature (926)..(926): n is a, c, g, or t
  misc_feature (940)..(941): n is a, c, g, or t
  misc_feature (945)..(946): n is a, c, g, or t
  misc_feature (954)..(954): n is a, c, g, or t
  misc_feature (966)..(966): n is a, c, g, or t
  misc_feature (970)..(970): n is a, c, g, or t
  misc_feature (974)..(974): n is a, c, g, or t
  misc_feature (993)..(993): n is a, c, g, or t
  misc_feature (1002)..(1002): n is a, c, g, or t
  misc_feature (1013)..(1013): n is a, c, g, or t
  misc_feature (1026)..(1026): n is a, c, g, or t
cagcctatgacacttttgctcctcctgaaatctccatatcttgcttttctcaaattccaaggtagcctttgcgcaacatatcactctccactgactcttgtcccatcagggcccatagtggatggctgtatgggggccatgtgactgaactcctgatcctcgtttcagcccactcatgtgacatgcatggagctcttcagcagggacttactgaccaggacaagagcttgagactttgaggggatctgattgtcactgcacaatcaaggacagtattcccaagagtggatgttgctcaagatagtccaaggaattctatgaagaaaaggactccacagacaataaattttggacaccctgtttcaacacagtgcatcttagagactggtgtttgcaagtatatggagcaggaaacttcatcccgaagatggagaccccggggctgtcagcaggcgttagagtcttgaagccagagcagcgccaggatgtcacgggagctggccccactgctgcttctcctcctctccatccacagcgccctggccatgaggatctgctccttcaacgtcaggtcctttggggaaagcaagcaggaagacaagaatgccatggatgtcattgtgaaggtcatcaaacgctgtgacatcatactcgtgatggaaatcaaggacagcaaaaaaaaaaaaaaaaaactcganactagtnctctctctctctctccctngngccgcccggagcanagagcctcgctttggccgatccgccgcccgtccacacccgccgccagagttcacctgggatgatgatatcgccgcgctcgtcgtcgacaacgggctcccggcttgtgcaagggccggnntcgnngggcnangatgcccccgggncgntttcccctcaatcngnggggcnnccccaggcccanggcngtgatggtggggcnntggnntcaagaanggatccctatgngggncgangaggccagagcagagaggnttctcaccntgaagtacccnattgagcagggtntcgtccacagtgggcagccttggggcaattctggcccactcttctataaggagcgggttgtggccccgaggacccccgtgttgtgacgaggctct

SEQ ID NO: 9964 - DNA, 936 bp, Homo sapiens
agtaatttcttaagtctgaacattaacttttgggtgccacagataactagtatggctcagatcttcagctcccagattcgcaacagctccctggctgttgagaagagttgacttagccttgttctcaggaaaacgatcctgtgcttgagcctgctctggcttctgagaaagccatgggaacctacatctctgcttcatgaaagtagtaagaaaagggctgactcagctgggaggacttccttttccttcttatagggaaaagctggtgtctgtgaagaggagttatcactaccatgactatcaggatggagacgcagatgtgttttccagggagccctttgtggtctggttccaatctccccacactgctgtcaaagacttcgtgattatccccctgcacaccaccccagagacatccgttaaggagatcgatgagttggttgaggtctacacggacgtgaaacaccgctggaaggcggagaatttcattttcatgggtgacttcaatgccggctgcagctacgtccccaagaaggcctggaagaacatccgcttgaggactgaccccaggtttgtttggctgatcggggaccaagaggacaccacggtgaagaagagcaccaactgtgcatatgacaggattgtgcttagaggacaagaaatcgtcagttctgttgttcccaagtcaaacagtgtttttgacttccagaaagcttacaagctgactgaagaggaggccctggatgtcagcgaccactttccagttgaatttaaactacagtcttcaagggccttcaccaacagcaaaaaatctgtcactctaaggaagaaaacaaagagcaaacgctcctagacccaagggtctcatcttattaaccatttcttgcctctaaataaaatgtctctaacagaaaaaaactgctccctgtacttagg

SEQ ID NO: 9965 - DNA, 822 bp, Homo sapiens
cagtctaccagctttctcttagccatgaagggcaactgggagaaatgagtctttcgtgtactaaaaataggcagcctaatgacccccaagatcattaaaatcccggccactggctggaccctctgggaatgggggacccagataatgcagcctgtgccttctggaggggacagctggtttccctccccagcccagtggtttatgagaccttgacaggggaagtgtgtgacccccgcctctttcctgtttctcagctgtcaaagacttcgtgattatccccctgcacaccaccccagagacatccgttaaggagatcgatgagttggttgaggtctacacggacgtgaaacaccgctggaaggcggagaatttcattttcatgggtgacttcaatgccggctgcagctacgtccccaagaaggcctggaagaacatccgcttgaggactgaccccaggtttgtttggctgatcggggaccaagaggacaccacggtgaagaagagcaccaactgtgcatatgacaggattgtgcttagaggacaagaaatcgtcagttctgttgttcccaagtcaaacagtgtttttgacttccagaaagcttacaagctgactgaagaggaggccctggatgtcagcgaccactttccagttgaatttaaactacagtcttcaagggccttcaccaacagcaaaaaatctgtcactctaaggaagaaaacaaagagcaaacgctcctagacccaagggtctcatcttattaaccatttcttgcctctaaataaaatgtctctaacagaaaaaaactgctccctgtacttagg

SEQ ID NO: 9966 - DNA, 1486 bp, Homo sapiens
cagcctatgacacttttgctcctcctgaaatctccatatcttgcttttctcaaattccaaggtagcctttgcgcaacatatcactctccactgactcttgtcccatcagggcccatagtggatggctgtatgggggccatgtgactgaactcctgatcctcgtttcagcccactcatgtgacatgcatggagctcttcagcagggacttactgaccaggacaagagcttgagactttgaggggatctgattgtcactgcacaatcaaggacagtattcccaagagtggatgttgctcaagatagtccaaggaattctatgaagaaaaggactccacagacaataaattttggacaccctgtttcaacacagtgcatcttagagactggtgtttgcaagtatatggagcaggaaacttcatcccgaagatggagaccccggggctgtcagcaggcgttagagtcttgaagccagagcagcgccaggatgtcacgggagctggccccactgctgcttctcctcctctccatccacagcgccctggccatgaggatctgctccttcaacgtcaggtcctttggggaaagcaagcaggaagacaagaatgccatggatgtcattgtgaaggtcatcaaacgctgtgacatcatactcgtgatggaaatcaaggacagcaacaacaggatctgccccatactgatggagaagctgaacagaaattcaaggagaggcataacgtacaactatgtgattagctctcggcttggaagaaacacatataaagaacaatatgcctttctctacaaggaaaagctggtgtctgtgaagaggagttatcactaccatgactatcaggatggagacgcagatgtgttttccagggagccctttgtggtctggttccaatctccccacactgctgtcaaagacttcgtgattatccccctgcacaccaccccagagacatccgttaaggagatcgatgagttggttgaggtctacacggacgtgaaacaccgctggaaggcggagaatttcattttcatgggtgacttcaatgccggctgcagctacgtccccaagaaggcctggaagaacatccgcttgaggactgaccccaggtttgtttggctgatcggggaccaagaggacaccacggtgaagaagagcaccaactgtgcatatgacaggattgtgcttagaggacaagaaatcgtcagttctgttgttcccaagtcaaacagtgtttttgacttccagaaagcttacaagctgactgaagaggaggccctggatgtcagcgaccactttccagttgaatttaaactacagtcttcaagggccttcaccaacagcaaaaaatctgtcactctaaggaagaaaacaaagagcaaacgctcctagacccaagggtctcatcttattaaccatttcttgcctctaaataaaatgtctctaacagaaaaaaactgctccctgtacttagg

SEQ ID NO: 9967 - DNA, 483 bp, Homo sapiens
ggcagagcaggggtagacttagcatgtaagggagggtcagttggtcctgcaacaggtaggacatcagtcttgaagccagagcagcgccaggatgtcacgggagctggccccactgctgcttctcctcctctccatccacagcgccctggccatgaggatctgctccttcaacgtcaggtcctttggggaaagcaagcaggaagacaagaatgccatggatgtcattgtgaaggtcatcaaacgctgtgacatcatactcgtgatggaaatcaaggacagcaacaacaggatctgccccatactgatggagaagctgaacagaaatcaaaggagaggcataacgcacaactacgcaatcaactctcgcttcggaagagacacataccaagcccaacatacctttttctacaagaaaaaccgacattcaagaagaaaaaatacccctactgaacctatcggacagaggccccgacaggccttgca

SEQ ID NO: 9968 - DNA, 473 bp, Homo sapiens
gctttatttttttgcttgtttttggcaagacagaggcaaacaaacagaataaaaatgcccacataggtggtatacatggaatgcaaagggcctctaaatatgtttttcttcccaaccaccacactggtttacaagtctgtattatttttatttttatttttatttttttgagacggagtctcgctcttgtctcccaggctggagtgcaatggcacgatctcggctcactgcaatctccacctcccaggttcaagcgattctcctgccttagcctcctgagttgctgggattacaggcgcccaccaccaagcccacctaatttttatatttttagtagagacggggtttcaccatgttgtccaggctggtcccgaactcctgacctcaggtgttccacacgcatcagcctcccaaagtgctgggattacaggcgtgagccaccatgcccaggtatttttagttttttgagatgg

SEQ ID NO: 9969 - DNA, 474 bp, Homo sapiens
actattttaacttctcagatatttttatatgcacttactgattattagtcacatttcaggtaagattgctacataaaactataagcacttaatatatatttaacaatgaatgaatgaatgaatgaatgactcacttttggataagggcttgcaagtgttggatagtgtggtgttattttttatcaacatttgctggttcctaacttccgtagctctcattacagtcttgttacagtgttgggtgtgttaggcttcagggacaggcctctgaccttctgccctcctttgacctgccttgagactctgagtgtttccctgagttctgtgaaccactctggcaaattaatcgagcccaaaaaggagtcttgggaaccccccacttgaagctggtgggtcagaagttctggagaccctgacttgcaaccagtctctggtctagtgggggtgagggcacagtcttaggatctctacaaa

SEQ ID NO: 9970 - DNA, 459 bp, Homo sapiens
ataccctgagatatctcacaaaggccagtgatgccattcttcatattttgtaaatacagtcctccaaaatcggtattaatatgaaagatgaacagtgaattatttcctctgctcttgtggacagaggtgtacctgtggaagatacatgtcatttccttaagtttttgtatttaaatgaaacaggcatttggagagtagaataacaaatggttaatggcagttgaagaacagcagctgaccaagagggagagtcccatccaaataatgcacacagttaccacatgtccttagctgccacttaggtaaatgtacccttccaagagcaatggatgccctgtaactgtaaactggaaagagttaaatcagaaaaatcgattctcctcagtgtctaagttttttttctctcctgcaaattcttagaacagcaattgtatggcaaaattattcttccttttcaat

SEQ ID NO: 9971 - DNA, 421 bp, Homo sapiens
tacattgatgtgtacatatagacatatatactgatttacattgagatatatatacgtgtgtatatatatgtatatatgtgtatatatgtgtgtatatatatgtatatatgtgtatatatatgtatatatgtaaatttaccaatgtaaatcaacaagggtagctttaaaaagtactgatgcctatgtcccgcccccagataatcttatttaattgatctcggatttggcccaagggttgggatttataagtcttcccagggttctaatgtgcaggtctaggtggagtcaatgtggtatccttgtctcggaaggcctggggcctctatttctgttcaatttcattcatagacattgacctaccaatatttgtgatcttgataagaaatagcgcttctggtttaactttttattcctccctgtc

SEQ ID NO: 9972 - DNA, 515 bp, Homo sapiens
tcctaacaggaagaaaaaagctagaaaaaaatctaccccaaaagtatgacctcattcttggatggaatctctctggtgcttgctcgctgtctctctctctgccccctgtctctgcccgccccgcccccccgccaccgtcccctcaacacacactcataacaaagaagctagctataaatcagagatttacttttagaatgctaaaaaatattaatcactgcgttaataaatatttctgcaatgaatccatctgggtagtttggttttttatctgttgaataaagagttatttataaatcatctattaatgtagtgaataggtattacttttgtgtctggggtgttgttaacgcaaactttgcatctctttggatttacagttgtttatagcaaaagaaaaaatcttttccttttttcttcttttcatgtaaacaacgatggaaacgacgcacgttcgcaacccgcaaagcattagaaagacaccggtgaaagacgcagctcaagagggcgctttg

SEQ ID NO: 9973 - DNA, 260 bp, Homo sapiens
actgaccaaacaaggtttatggaccagacctctgggactgtagccagctcaaactgtactcattggtcagaacacagctcttctaagtctctgaatcacaatcaattttaataccagggtaataatgcacaattatttgcaggatatattcttttacactcatttgcagaataggcattatgttgccttttttatactttcacttagtcttctcaaatgtcttttagagtattttatttttgatgatctatgtacattat

SEQ ID NO: 9974 - DNA, 559 bp, Homo sapiens
acgctgcggccgctatcccctccggaccatggccgacgacgacgtgctgttcgaggatgtgtacgagctgtgcgaggtgatcggaaagggtcccttcagtgttgtacgacgatgtatcaacagagaaactgggcaacaatttgctgtaaaaattgttgatgtagccaagttcacatcaagtccagggttaagtacagaagatctaaagcgggaagccagtatctgtcatatgctgaaacatccacacattgtagagttattggagacatatagctcagatggaatgctttacatggttttcgaatttatggatggagcagatctgtgttttgaaatcgtaaagcgagctgacgctggttttgtgtacagtgaagctgtagccagcatcttagacaaacatagctggaaacaacttggagaccaccttaatacagctttgagctcagcatgacttgaatgtcttcaaattcattgccctgactccttctggctgaagagcaagggacctagtctcagggatggagcagccatggctatggcacaaaataaagaatatgct

SEQ ID NO: 9975 - DNA, 758 bp, Homo sapiens
acgctgcggccgctatcccctccggaccatggccgacgacgacgtgctgttcgaggatgtgtacgagctgtgcgaggtgatcggaaagggtcccttcagtgttgtacgacgatgtatcaacagagaaactgggcaacaatttgctgtaaaaattgttgatgtagccaagttcacatcaagtccagggttaagtacagaagatctaaagcgggaagccagtatctgtcatatgctgaaacatccacacattgtagagttattggagacatatagctcagatggaatgctttacatggttttcgaatttatggatggagcagatctgtgttttgaaatcgtaaagcgagctgacgctggttttgtgtacagtgaagctgtagccagccattatatgagacagatactggaagctctacgctactgccatgataataacataattcacagggatgtgaagccccactgtgttctccttgcctcaaaagaaaactcggcacctgttaaacttggaggctttggggtagctattcaattaggggagtctggacttgtagctggaggacgtgttggaacacctcattttatggcaccagaagtggtcaaaagagagccttacggaaagcctgtagacgtctgggggtgcggtgtgatcctttttatcctgctcagtggttgtttgcctttttacggaaccaaggaaagattgtttgaaggcattattaaaggaaaatataaggtaatgcatcatgaacattttc

SEQ ID NO: 9976 - DNA, 674 bp, Homo sapiens
acgctgcggccgctatcccctccggaccatggccgacgacgacgtgctgttcgaggatgtgtacgagctgtgcgaggtgatcggaaagggtcccttcagtgttgtacgacgatgtatcaacagagaaactgggcaacaatttgctgtaaaaattgttgatgtagccaagttcacatcaagtccagggttaagtacagaagatctaaagcgggaagccagtatctgtcatatgctgaaacatccacacattgtagagttattggagacatatagctcagatggaatgctttacatggttttcgaattgtgagtgtgtattttaattcttaaagggtaaaacttgaagcaatgttggtgttggataatgctaacacttttctcttgaaatttagcagtagttgtgaacttatctgttcagaaagacctaaagtcacaagaaaaaaggattatgtcatcataaggtttacagtggcaaaggaagcaaaagctgggcatattcagttactcttcatgctttcagcatgcttcagagaagagactccaaaaggaaattgagttcagaggaataggaggaccccaaactataaacttctgaccagtagaagtcttagtgaagaagagtaggatgaaagtggaggcatccatgtagcaagactcttggcaactaaaaacaa

SEQ ID NO: 9977 - DNA, 575 bp, Homo sapiens
acgctgcggccgctatcccctccggaccatggccgacgacgacgtgctgttcgaggatgtgtacgagctgtgcgaggtgatcggaaagtgagtctccacgcgagggagcgggagtgtggaaaaatgcatttcagtgatgccccggtcttcccgcacccgctcggggcctgccccctgccctccctccttcccctcttcccctctcgtccttctcatcctggagtatttatagacgtgtacctggagctcctgccaggcgggggcctgggggttctcagcggtccattgaggccaccgagccgaggttggccaccccgtaaggcgtggggccggctgcctgcattttatctgacggttgcacagggacgtggcacagccgattttatagttgcttcagttggggttattgttaccttgcatgtaccatagaccatttttgaaacagagcagcttgcatttcctttgcttgtgtggtgagagagtccagggttttaattgtggggtgtgtgtctattgtgcgggatattagacagatgcctttgtgtacaccccatgctcggattggagggggtcat

SEQ ID NO: 9978 - DNA, 4221 bp, Homo sapiens
acgctgcggccgctatcccctccggaccatggccgacgacgacgtgctgttcgaggatgtgtacgagctgtgcgaggtgatcggaaagggtcccttcagtgttgtacgacgatgtatcaacagagaaactgggcaacaatttgctgtaaaaattgttgatgtagccaagttcacatcaagtccagggttaagtacagaagatctaaagcgggaagccagtatctgtcatatgctgaaacatccacacattgtagagttattggagacatatagctcagatggaatgctttacatggttttcgaatttatggatggagcagatctgtgttttgaaatcgtaaagcgagctgacgctggttttgtgtacagtgaagctgtagccagccattatatgagacagatactggaagctctacgctactgccatgataataacataattcacagggatgtgaagccccactgtgttctccttgcctcaaaagaaaactcggcacctgttaaacttggaggctttggggtagctattcaattaggggagtctggacttgtagctggaggacgtgttggaacacctcattttatggcaccagaagtggtcaaaagagagccttacggaaagcctgtagacgtctgggggtgcggtgtgatcctttttatcctgctcagtggttgtttgcctttttacggaaccaaggaaagattgtttgaaggcattattaaaggaaaatataagatgaatccaaggcagtggagccatatctctgaaagtgccaaagacctagtacgtcgcatgctgatgctggatccagctgaaaggatcactgtttatgaagcactgaatcacccatggcttaaggagcgggatcgttacgcctacaagattcatcttccagaaacagtagagcagctgaggaaattcaatgcaaggaggaaactaaagggtgcagtactagccgctgtgtcaagtcacaaattcaactcattctatggggatccccctgaagagttaccagatttctccgaagaccctacctcctcaggagcagtctcacaggtgctggacagcctggaagagattcatgcgcttacagactgcagtgaaaaggacctagattttctacacagtgttttccaggatcagcatcttcacacactactagatctgtatgacaaaattaacacaaagtcttcaccacaaatcaggaatcctccaagcgatgcagtacagagagccaaagaggtattggaagaaatttcatgttaccctgagaataacgacgcaaaggaactaaagcgtattttaacacaacctcatttcatggccttacttcagactcacgacgtagtggcacatgaagtttacagtgatgaagcattgagggtcacacctcctcccacctctccctatttaaacggcgattctccagaaagtgctaacggagacatggatatggagaatgtgaccagagttcggctggtacagtttcaaaagaacacagatgaaccaatgggaatcactttaaaaatgaatgaactaaatcattgtattgttgcaagaattatgcatgggggcatgattcacaggcaaggtacacttcatgttggtgatgaaattcgagaaatcaatggcatcagtgtggctaaccaaacagtggaacaactgcaaaaaatgcttagggaaatgcgggggagtattaccttcaagattgtgccaagttaccgcactcagtcttcgtcctgtgagagagattccccttccacttccagacagtccccagctaatggtcatagcagcactaacaattctgtttcggacttgccatcaactacccaaccaaaaggacgacagatctatgtaagagcacaatttgaatatgatccagccaaggatgacctcatcccctgtaaagaagctggcattcgattcagagttggtgacatcatccagattattagtaaggatgatcataattggtggcagggtaaactggaaaactccaaaaatggaactgcaggtctcattccttctcctgaacttcaggaatggcgagtagcttgcattgccatggagaagaccaaacaggagcagcaggccagctgtacttggtttggcaagaaaaagaagcagtacaaagataaatatttggcaaagcacaatgcagtgtttgatcaattagatcttgtcacatatgaagaagtagtaaaactgccagcattcaagaggaaaacactagtcttattaggcgcacatggtgttgggagaagacacataaaaaacactctcatcacaaagcacccagaccggtttgcgtaccctattccacatacaaccagacctccaaagaaagacgaagaaaatggaaagaattattactttgtatctcatgaccaaatgatgcaagacatctctaataacgagtacttggagtacggcagccacgaggatgcgatgtatgggacaaaactggagaccatccggaagatccacgagcaggggctgattgcaatactggacgtggagcctcaggcactgaaggtcctgagaactgcagagtttgctccttttgttgttttcattgctgcaccaactattactccaggtttaaatgaggatgaatctcttcagcgtctgcagaaggagtctgacatcttacagagaacatatgcacactacttcgatctcacaattatcaacaatgaaattgatgagacaatcagacatctggaggaagctgttgagctcgtgtgcacagccccacagtgggtccctgtctcctgggtctattaggcctctccccagatatctgagcataactgggagcacctcatttgtggaaaagcctctttgttatcggccttgtgtcagcaggtcatggtccctagagactacctagttgtagtgtgacctacatttataattattgtcatgtccgaatagataggaggagaaaaacaattacacactaatttaaagagacagtatcttttttaatcagttctcctaaactttaataaaatgtatctttaaatgtatgtattattcaatcctttggaatgttatatttttggaaatcatagctttttatttccaaggcccctaaaaactgcacaaaatagatgctgctttctataatctattttaataataataaacaatgattctgttaccttgactgggggtggaacactacattctttttagagtctgattttatggattggaatattgggatatctttctttcctttatttatttgaaataattagtgtagtgattacaaaacagtcataaatttttaaaggccttttttctctctttttttttttttagaatagtatttttttttaagtcctttatgtaacatccagataatgtgatactgtctctttgaagcaccctgtaaaccttttagagatttgaagttgggtcttgactcttaatgcatgtggacagtcgcgagcgtttatgctgtcggtgtgtctgtgttggacaaaacaatctgtaatctacagcaaagtacattctacattccgttcatggggcacacccaggggaataagaataaaatgctattatgactaagttgtaaacctatgcacatcccttgcattttgggcaactttataaaaaaaaagaaactgatttttattaataataatcatgtagtgaaatgtgtttgtaattttgtctcaatttaatttgttgtaaggtggggtggggggaattgctggtttcaccatttcagatctgtgttgtctaagagtattaacgttttaattaagcaaagaaatgatttttaatctgtatgtaattgttttaaagcacccattttaagagaaaatactgtgcaatgaagaaaccagtttaggcatttgctataaactgaaatattccaaaagaatcatctataacagccctgtaaattcctttaaaatgataactaacaggacagtttgaccaattttttttaaatatacttccttttatgtgttcaataaaaaaatgcctttgggtccttcatttcattatagatttgttcaggcttccaagctgataatctttacaattgtataatttgttagatgctcattgaacctttgaaggcccaggagtgagtatcagttggcagggtgacaaagtagcctgccagagcacagctggaccacgtctgactcgcacagagccatgcgcccaagggccacgggtgtactggaggc

SEQ ID NO: 9979 - DNA, 3708 bp, Homo sapiens
aggaaagattgtttgaaggcattattaaaggaaaatataagatgaatccaaggcagtggagccatatctctgaaagtgccaaagacctagtacgtcgcatgctgatgctggatccagctgaaaggatcactgtttatgaagcactggatcacccatggcttaagccccactgtgttctccttgcctcaaaagaaaactcggcacctgttaaacttggaggctttggggtagctattcaattaggggagtctggacttgtagctggaggacgtgttggaacacctcattttatggcaccagaagtggtcaaaagagagccttacggaaagcctgtagacgtctgggggtgcggtgtgatcctttttatcctgctcagtggttgtttgcctttttacggaaccaaggaaagattgtttgaaggcattattaaaggaaaatataagatgaatccaaggcagtggagccatatctctgaaagtgccaaagacctagtacgtcgcatgctgatgctggatccagctgaaaggatcactgtttatgaagcactgaatcacccatggcttaaggagcgggatcgttacgcctacaagattcatcttccagaaacagtagagcagctgaggaaattcaatgcaaggaggaaactaaagggtgcagtactagccgctgtgtcaagtcacaaattcaactcattctatggggatccccctgaagagttaccagatttctccgaagaccctacctcctcaggagcagtctcacaggtgctggacagcctggaagagattcatgcgcttacagactgcagtgaaaaggacctagattttctacacagtgttttccaggatcagcatcttcacacactactagatctgtatgacaaaattaacacaaagtcttcaccacaaatcaggaatcctccaagcgatgcagtacagagagccaaagaggtattggaagaaatttcatgttaccctgagaataacgacgcaaaggaactaaagcgtattttaacacaacctcatttcatggccttacttcagactcacgacgtagtggcacatgaagtttacagtgatgaagcattgagggtcacacctcctcccacctctccctatttaaacggcgattctccagaaagtgctaacggagacatggatatggagaatgtgaccagagttcggctggtacagtttcaaaagaacacagatgaaccaatgggaatcactttaaaaatgaatgaactaaatcattgtattgttgcaagaattatgcatgggggcatgattcacaggcaaggtacacttcatgttggtgatgaaattcgagaaatcaatggcatcagtgtggctaaccaaacagtggaacaactgcaaaaaatgcttagggaaatgcgggggagtattaccttcaagattgtgccaagttaccgcactcagtcttcgtcctgtgagagagattccccttccacttccagacagtccccagctaatggtcatagcagcactaacaattctgtttcggacttgccatcaactacccaaccaaaaggacgacagatctatgtaagagcacaatttgaatatgatccagccaaggatgacctcatcccctgtaaagaagctggcattcgattcagagttggtgacatcatccagattattagtaaggatgatcataattggtggcagggtaaactggaaaactccaaaaatggaactgcaggtctcattccttctcctgaacttcaggaatggcgagtagcttgcattgccatggagaagaccaaacaggagcagcaggccagctgtacttggtttggcaagaaaaagaagcagtacaaagataaatatttggcaaagcacaatgcagtgtttgatcaattagatcttgtcacatatgaagaagtagtaaaactgccagcattcaagaggaaaacactagtcttattaggcgcacatggtgttgggagaagacacataaaaaacactctcatcacaaagcacccagaccggtttgcgtaccctattccacatacaaccagacctccaaagaaagacgaagaaaatggaaagaattattactttgtatctcatgaccaaatgatgcaagacatctctaataacgagtacttggagtacggcagccacgaggatgcgatgtatgggacaaaactggagaccatccggaagatccacgagcaggggctgattgcaatactggacgtggagcctcaggcactgaaggtcctgagaactgcagagtttgctccttttgttgttttcattgctgcaccaactattactccaggtttaaatgaggatgaatctcttcagcgtctgcagaaggagtctgacatcttacagagaacatatgcacactacttcgatctcacaattatcaacaatgaaattgatgagacaatcagacatctggaggaagctgttgagctcgtgtgcacagccccacagtgggtccctgtctcctgggtctattaggcctctccccagatatctgagcataactgggagcacctcatttgtggaaaagcctctttgttatcggccttgtgtcagcaggtcatggtccctagagactacctagttgtagtgtgacctacatttataattattgtcatgtccgaatagataggaggagaaaaacaattacacactaatttaaagagacagtatcttttttaatcagttctcctaaactttaataaaatgtatctttaaatgtatgtattattcaatcctttggaatgttatatttttggaaatcatagctttttatttccaaggcccctaaaaactgcacaaaatagatgctgctttctataatctattttaataataataaacaatgattctgttaccttgactgggggtggaacactacattctttttagagtctgattttatggattggaatattgggatatctttctttcctttatttatttgaaataattagtgtagtgattacaaaacagtcataaatttttaaaggccttttttctctctttttttttttttagaatagtatttttttttaagtcctttatgtaacatccagataatgtgatactgtctctttgaagcaccctgtaaaccttttagagatttgaagttgggtcttgactcttaatgcatgtggacagtcgcgagcgtttatgctgtcggtgtgtctgtgttggacaaaacaatctgtaatctacagcaaagtacattctacattccgttcatggggcacacccaggggaataagaataaaatgctattatgactaagttgtaaacctatgcacatcccttgcattttgggcaactttataaaaaaaaagaaactgatttttattaataataatcatgtagtgaaatgtgtttgtaattttgtctcaatttaatttgttgtaaggtggggtggggggaattgctggtttcaccatttcagatctgtgttgtctaagagtattaacgttttaattaagcaaagaaatgatttttaatctgtatgtaattgttttaaagcacccattttaagagaaaatactgtgcaatgaagaaaccagtttaggcatttgctataaactgaaatattccaaaagaatcatctataacagccctgtaaattcctttaaaatgataactaacaggacagtttgaccaattttttttaaatatacttccttttatgtgttcaata

SEQ ID NO: 9980 - DNA, 2215 bp, Homo sapiens
atccacgtgccattgtggaatagggtacgcaaaccggtctgggtgctttgtgatgagagtgttttttatgtgtcttctcccaacaccatgtgcgcctaataagactagtgttttcctcttgaatgctggcagttttactacttcttcattggtgacatcatccagattattagtaaggatgatcataattggtggcagggtaaactggaaaactccaaaaatggaactgcaggtctcattccttctcctgaacttcaggaatggcgagtagcttgcattgccatggagaagaccaaacaggagcagcaggccagctgtacttggtttggcaagaaaaagaagcagtacaaagataaatatttggcaaagcacaatgcagtgtttgatcaattagatcttgtcacatatgaagaagtagtaaaactgccagcattcaagaggaaaacactagtcttattaggcgcacatggtgttgggagaagacacataaaaaacactctcatcacaaagcacccagaccggtttgcgtaccctattccacatacaaccagacctccaaagaaagacgaagaaaatggaaagaattattactttgtatctcatgaccaaatgatgcaagacatctctaataacgagtacttggagtacggcagccacgaggatgcgatgtatgggacaaaactggagaccatccggaagatccacgagcaggggctgattgcaatactggacgtggagcctcaggcactgaaggtcctgagaactgcagagtttgctccttttgttgttttcattgctgcaccaactattactccaggtttaaatgaggatgaatctcttcagcgtctgcagaaggagtctgacatcttacagagaacatatgcacactacttcgatctcacaattatcaacaatgaaattgatgagacaatcagacatctggaggaagctgttgagctcgtgtgcacagccccacagtgggtccctgtctcctgggtctattaggcctctccccagatatctgagcataactgggagcacctcatttgtggaaaagcctctttgttatcggccttgtgtcagcaggtcatggtccctagagactacctagttgtagtgtgacctacatttataattattgtcatgtccgaatagataggaggagaaaaacaattacacactaatttaaagagacagtatcttttttaatcagttctcctaaactttaataaaatgtatctttaaatgtatgtattattcaatcctttggaatgttatatttttggaaatcatagctttttatttccaaggcccctaaaaactgcacaaaatagatgctgctttctataatctattttaataataataaacaatgattctgttaccttgactgggggtggaacactacattctttttagagtctgattttatggattggaatattgggatatctttctttcctttatttatttgaaataattagtgtagtgattacaaaacagtcataaatttttaaaggccttttttctctctttttttttttttagaatagtatttttttttaagtcctttatgtaacatccagataatgtgatactgtctctttgaagcaccctgtaaaccttttagagatttgaagttgggtcttgactcttaatgcatgtggacagtcgcgagcgtttatgctgtcggtgtgtctgtgttggacaaaacaatctgtaatctacagcaaagtacattctacattccgttcatggggcacacccaggggaataagaataaaatgctattatgactaagttgtaaacctatgcacatcccttgcattttgggcaactttataaaaaaaaagaaactgatttttattaataataatcatgtagtgaaatgtgtttgtaattttgtctcaatttaatttgttgtaaggtggggtggggggaattgctggtttcaccatttcagatctgtgttgtctaagagtattaacgttttaattaagcaaagaaatgatttttaatctgtatgtaattgttttaaagcacccattttaagagaaaatactgtgcaatgaagaaaccagtttaggcatttgctataaactgaaatattccaaaagaatcatctataacagccctgtaaattcctttaaaatgataactaacaggacagtttgaccaattttttttaaatatacttccttttatgtgttcaata

SEQ ID NO: 9981 - DNA, 3592 bp, Homo sapiens
acgctgcggccgctatcccctccggaccatggccgacgacgacgtgctgttcgaggatgtgtacgagctgtgcgaggtgatcggaaagggtcccttcagtgttgtacgacgatgtatcaacagagaaactgggcaacaatttgctgtaaaaattgttgatgtagccaagttcacatcaagtccagggttaagtacagaagatctaaagcgggaagccagtatctgtcatatgctgaaacatccacacattgtagagttattggagacatatagctcagatggaatgctttacatggttttcgaatttatggatggagcagatctgtgttttgaaatcgtaaagcgagctgacgctggttttgtgtacagtgaagctgtagccagccattatatgagacagatactggaagctctacgctactgccatgataataacataattcacagggatgtgaagccccactgtgttctccttgcctcaaaagaaaactcggcacctgttaaacttggaggctttggggtagctattcaattaggggagtctggacttgtagctggaggacgtgttggaacacctcattttatggcaccagaagtggtcaaaagagagccttacggaaagcctgtagacgtctgggggtgcggtgtgatcctttttatcctgctcagtggttgtttgcctttttacggaaccaaggaaagattgtttgaaggcattattaaaggaaaatataagatgaatccaaggcagtggagccatatctctgaaagtgccaaagacctagtacgtcgcatgctgatgctggatccagctgaaaggatcactgtttatgaagcactgaatcacccatggcttaaggagcgggatcgttacgcctacaagattcatcttccagaaacagtagagcagctgaggaaattcaatgcaaggaggaaactaaagggtgcagtactagccgctgtgtcaagtcacaaattcaactcattctatggggatccccctgaagagttaccagatttctccgaagaccctacctcctcaggagcagtctcacaggtgctggacagcctggaagagattcatgcgcttacagactgcagtgaaaaggacctagattttctacacagtgttttccaggatcagcatcttcacacactactagatctgtatgacaaaattaacacaaagtcttcaccacaaatcaggaatcctccaagcgatgcagtacagagagccaaagaggtattggaagaaatttcatgttaccctgagaataacgacgcaaaggaactaaagcgtattttaacacaacctcatttcatggccttacttcagactcacgacgtagtggcacatgaagtttacagtgatgaagcattgagggtcacacctcctcccacctctccctatttaaacggcgattctccagaaagtgctaacggagacatggatatggagaatgtgaccagagttcggctggtacagtttcaaaagaacacagatgaaccaatgggaatcactttaaaaatgaatgaactaaatcattgtattgttgcaagaattatgcatgggggcatgattcacaggcaaggtacacttcatgttggtgatgaaattcgagaaatcaatggcatcagtgtggctaaccaaacagtggaacaactgcaaaaaatgcttagggaaatgcgggggagtattaccttcaagattgtgccaagttaccgcactcagtcttcgtcctgtgaggacttgccatcaactacccaaccaaaaggacgacagatctatgtaagagcacaatttgaatatgatccagccaaggatgacctcatcccctgtaaagaagctggcattcgattcagagttggtgacatcatccagattattagtaaggatgatcataattggtggcagggtaaactggaaaactccaaaaatggaactgcaggtctcattccttctcctgaacttcaggaatggcgagtagcttgcattgccatggagaagaccaaacaggagcagcaggccagctgtacttggtttggcaagaaaaagaagcagtacaaagataaatatttggcaaagcacaatgcagtgtttgatcaattagatcttgtcacatatgaagaagtagtaaaactgccagcattcaagaggaaaacactagtcttattaggcgcacatggtgttgggagaagacacataaaaaacactctcatcacaaagcacccagaccggtttgcgtaccctattccacatacaaccagacctccaaagaaagacgaagaaaatggaaagaattattactttgtatctcatgaccaaatgatgcaagacatctctaataacgagtacttggagtacggcagccacgaggatgcgatgtatgggacaaaactggagaccatccggaagatccacgagcaggggctgattgcaatactggacgtggagcctcaggcactgaaggtcctgagaactgcagagtttgctccttttgttgttttcattgctgcaccaactattactccaggtttaaatgaggatgaatctcttcagcgtctgcagaaggagtctgacatcttacagagaacatatgcacactacttcgatctcacaattatcaacaatgaaattgatgagacaatcagacatctggaggaagctgttgagctcgtgtgcacagccccacagtgggtccctgtctcctgggtctattaggcctctccccagatatctgagcataactgggagcacctcatttgtggaaaagcctctttgttatcggccttgtgtcagcaggtcatggtccctagagactacctagttgtagtgtgacctacatttataattattgtcatgtccgaatagataggaggagaaaaacaattacacactaatttaaagagacagtatcttttttaatcagttctcctaaactttaataaaatgtaacatccagataatgtgatactgtctctttgaagcaccctgtaaaccttttagagatttgaagttgggtcttgactcttaatgcatgtggacagtcgcgagcgtttatgctgtcggtgtgtctgtgttggacaaaacaatctgtaatctacagcaaagtacattctacattccgttcatggggcacacccaggggaataagaataaaatgctattatgactaagttgtaaacctatgcacatcccttgcattttgggcaactttataaaaaaaaagaaactgatttttattaataataatcatgtagtgaaatgtgtttgtaattttgtctcaatttaatttgttgtaaggtggggtggggggaattgctggtttcaccatttcagatctgtgttgtctaagagtattaacgttttaattaagcaaagaaatgatttttaatctgtatgtaattgttttaaagcacccattttaagagaaaatactgtgcaatgaagaaaccagtttaggcatttgctataaactgaaatattccaaaagaatcatctataacagccctgtaaattcctttaaaatgataactaacaggacagtttgaccaattttttttaaatatacttccttttatgtgttcaata

SEQ ID NO: 9982 - DNA, 1341 bp, Homo sapiens
tggttcagagtgccctgagagaaaagattgagttcctgtctgctgtggtgtctgcgcatgcccactgcagtgccaggacagaatcaagcaagtctctttatctcacttctagtcccctttcttgagagctgtacccagagagctgaggcttgcctggacctcccagcagcctcccaggaaaggtctctttgttatcggccttgtgtcagcaggtcatggtccctagagactacctagttgtagtgtgacctacatttataattattgtcatgtccgaatagataggaggagaaaaacaattacacactaatttaaagagacagtatcttttttaatcagttctcctaaactttaataaaatgtatctttaaatgtatgtattattcaatcctttggaatgttatatttttggaaatcatagctttttatttccaaggcccctaaaaactgcacaaaatagatgctgctttctataatctattttaataataataaacaatgattctgttaccttgactgggggtggaacactacattctttttagagtctgattttatggattggaatattgggatatctttctttcctttatttatttgaaataattagtgtagtgattacaaaacagtcataaatttttaaaggccttttttctctctttttttttttttagaatagtatttttttttaagtcctttatgtaacatccagataatgtgatactgtctctttgaagcaccctgtaaaccttttagagatttgaagttgggtcttgactcttaatgcatgtggacagtcgcgagcgtttatgctgtcggtgtgtctgtgttggacaaaacaatctgtaatctacagcaaagtacattctacattccgttcatggggcacacccaggggaataagaataaaatgctattatgactaagttgtaaacctatgcacatcccttgcattttgggcaactttataaaaaaaaagaaactgatttttattaataataatcatgtagtgaaatgtgtttgtaattttgtctcaatttaatttgttgtaaggtggggtggggggaattgctggtttcaccatttcagatctgtgttgtctaagagtattaacgttttaattaagcaaagaaatgatttttaatctgtatgtaattgttttaaagcacccattttaagagaaaatactgtgcaatgaagaaaccagtttaggcatttgctataaactgaaatattccaaaagaatcatctataacagccctgtaaattcctttaaaatgataactaacaggacagtttgaccaattttttttaaatatacttccttttatgtgttcaata

SEQ ID NO: 9983 - DNA, 1302 bp, Homo sapiens
acgctgcggccgctatcccctccggaccatggccgacgacgacgtgctgttcgaggatgtgtacgagctgtgcgaggtgatcggaaagggtcccttcagtgttgtacgacgatgtatcaacagagaaactgggcaacaatttgctgtaaaaattgttgatgtagccaagttcacatcaagtccagggttaagtacagaagatctaaagcgggaagccagtatctgtcatatgctgaaacatccacacattgtagagttattggagacatatagctcagatggaatgctttacatggttttcgaatttatggatggagcagatctgtgttttgaaatcgtaaagcgagctgacgctggttttgtgtacagtgaagctgtagccagccattatatgagacagatactggaagctctacgctactgccatgataataacataattcacagggatgtgaagccccactgtgttctccttgcctcaaaagaaaactcggcacctgttaaacttggaggctttggggtagctattcaattaggggagtctggacttgtagctggaggacgtgttggaacacctcattttatggcaccagaagtggtcaaaagagagccttacggaaagcctgtagacgtctgggggtgcggtgtgatcctttttatcctgctcagtggttgtttgcctttttacggaaccaaggaaagattgtttgaaggcattattaaaggaaaatataagatgaatccaaggcagtggagccatatctctgaaagtgccaaagacctagtacgtcgcatgctgatgctggatccagctgaaaggatcactgtttatgaagcactgaatcacccatggcttaaggtacatgagcattcacaggtcaccttctacactttgtctgaacacttccagtgacaggaatgcgttgctctatgagatggtcctttttaccttttcttttttctgagcagttttcattagtttttttcatcttgtttgctgttcctgcacatcatctgtgaacatctgaatagaagacataccatttgagtgtcatgcagctatcagagggtaaaaaacaggattaagacagaatatatcaggggaaggcctcttttttctctgccaacatgtgttccaaagatatgcaacatcaacaactgaagtaataccatgttataataaattaactatctttattttgggtgtgactgtgtgctttatagcattaactatttttcagtagatactaggtataaattttcgtcgacgcggccgcgaatttagtagtagtaggcggccgc

SEQ ID NO: 9984 - DNA, 691 bp, Homo sapiens
atgaacaaaaatgtgaaaagagaacgaatccaactgatttctctcttctgtttgcttttccctcctctcatgcccacccctacctccatctcatcaccatttaggatgaatctcttcagcgtctgcagaaggagtctgacatcttacagagaacatatgcacactacttcgatctcacaattatcaacaatgaaattgatgagacaatcagacatctggaggaagctgttgagctcgtgtgcacagccccacagtgggtccctgtctcctgggtctattaggcctctccccagatatctgagcataactgggagcacctcatttgtggaaaagcctctttgttatcggccttgtgtcagcaggtcatggtccctagagactacctagttgtagtgtgacctacatttataattattgtcatgtccgaatagataggaggagaaaaacaattacacactaatttaaagagacagtatcttttttaatcagttctcctaaactttaataaaatgtatctttaaatgtatgtattattcaatcctttggaatgttatatttttggaaatcatagctttttatttccaaggcccctaaaaactgcacaaaatagatgctgctttctataatctattttaataataataaacaatgattctgttaccttgactgggggtggaacactacattcttt

SEQ ID NO: 9985 - DNA, 3932 bp, Homo sapiens
acgctgcggccgctatcccctccggaccatggccgacgacgacgtgctgttcgaggatgtgtacgagctgtgcgaggtgatcggaaagggtcccttcagtgttgtacgacgatgtatcaacagagaaactgggcaacaatttgctgtaaaaattgttgatgtagccaagttcacatcaagtccagggttaagtacagaagatctaaagcgggaagccagtatctgtcatatgctgaaacatccacacattgtagagttattggagacatatagctcagatggaatgctttacatggttttcgaatttatggatggagcagatctgtgttttgaaatcgtaaagcgagctgacgctggttttgtgtacagtgaagctgtagccagccattatatgagacagatactggaagctctacgctactgccatgataataacataattcacagggatgtgaagccccactgtgttctccttgcctcaaaagaaaactcggcacctgttaaacttggaggctttggggtagctattcaattaggggagtctggacttgtagctggaggacgtgttggaacacctcattttatggcaccagaagtggtcaaaagagagccttacggaaagcctgtagacgtctgggggtgcggtgtgatcctttttatcctgctcagtggttgtttgcctttttacggaaccaaggaaagattgtttgaaggcattattaaaggaaaatataagatgaatccaaggcagtggagccatatctctgaaagtgccaaagacctagtacgtcgcatgctgatgctggatccagctgaaaggatcactgtttatgaagcactgaatcacccatggcttaaggagcgggatcgttacgcctacaagattcatcttccagaaacagtagagcagctgaggaaattcaatgcaaggaggaaactaaagggtgcagtactagccgctgtgtcaagtcacaaattcaactcattctatggggatccccctgaagagttaccagatttctccgaagaccctacctcctcaggagcagtctcacaggtgctggacagcctggaagagattcatgcgcttacagactgcagtgaaaaggacctagattttctacacagtgttttccaggatcagcatcttcacacactactagatctgtatgacaaaattaacacaaagtcttcaccacaaatcaggaatcctccaagcgatgcagtacagagagccaaagaggtattggaagaaatttcatgttaccctgagaataacgacgcaaaggaactaaagcgtattttaacacaacctcatttcatggccttacttcagactcacgacgtagtggcacatgaagtttacagtgatgaagcattgagggtcacacctcctcccacctctccctatttaaacggcgattctccagaaagtgctaacggagacatggatatggagaatgtgaccagagttcggctggtacagtttcaaaagaacacagatgaaccaatgggaatcactttaaaaatgaatgaactaaatcattgtattgttgcaagaattatgcatgggggcatgattcacaggcaaggtacacttcatgttggtgatgaaattcgagaaatcaatggcatcagtgtggctaaccaaacagtggaacaactgcaaaaaatgcttagggaaatgcgggggagtattaccttcaagattgtgccaagttaccgcactcagtcttcgtcctgtgaggacttgccatcaactacccaaccaaaaggacgacagatctatgtaagagcacaatttgaatatgatccagccaaggatgacctcatcccctgtaaagaagctggcattcgattcagagttggtgacatcatccagattattagtaaggatgatcataattggtggcagggtaaactggaaaactccaaaaatggaactgcaggtctcattccttctcctgaacttcaggaatggcgagtagcttgcattgccatggagaagaccaaacaggagcagcaggccagctgtacttggtttggcaagaaaaagaagcagtacaaagataaatatttggcaaagcacaatgcagtgtttgatcaattagatcttgtcacatatgaagaagtagtaaaactgccagcattcaagaggaaaacactagtcttattaggcgcacatggtgttgggagaagacacataaaaaacactctcatcacaaagcacccagaccggtttgcgtaccctattccacatacaaccagacctccaaagaaagacgaagaaaatggaaagaattattactttgtatctcatgaccaaatgatgcaagacatctctaataacgagtacttggagtacggcagccacgaggatgcgatgtatgggacaaaactggagaccatccggaagatccacgagcaggggctgattgcaatactggacgtggagcctcaggcactgaaggtcctgagaactgcagagtttgctccttttgttgttttcattgctgcaccaactattactccaggtttaaatgaggatgaatctcttcagcgtctgcagaaggagtctgacatcttacagagaacatatgcacactacttcgatctcacaattatcaacaatgaaattgatgagacaatcagacatctggaggaagctgttgagctcgtgtgcacagccccacagtgggtccctgtctcctgggtctattaggcctctccccagatatctgagcataactgggagcacctcatttgtggaaaagcctctttgttatcggccttgtgtcagcaggtcatggtccctagagactacctagttgtagtgtgacctacatttataattattgtcatgtccgaatagataggaggagaaaaacaattacacactaatttaaagagacagtatcttttttaatcagttctcctaaactttaataaaatgtatctttaaatgtatgtattattcaatcctttggaatgttatatttttggaaatcatagctttttatttccaaggcccctaaaaactgcacaaaatagatgctgctttctataatctattttaataataataaacaatgattctgttaccttgactgggggtggaacactacattctttttagagtctgattttatggattggaatattgggatatctttctttcctttatttatttgaaataattagtgtagtgattacaaaacagtcataaatttttaaaggccttttttctctctttttttttttttagaatagtatttttttttaagtcctttatgtaacatccagataatgtgatactgtctctttgaagcaccctgtaaaccttttagagatttgaagttgggtcttgactcttaatgcatgtggacagtcgcgagcgtttatgctgtcggtgtgtctgtgttggacaaaacaatctgtaatctacagcaaagtacattctacattccgttcatggggcacacccaggggaataagaataaaatgctattatgactaagttgtaaacctatgcacatcccttgcattttgggcaactttataaaaaaaaagaaactgatttttattaataataatcatgtagtgaaatgtgtttgtaattttgtctcaatttaatttgttgtaaggtggggtggggggaattgctggtttcaccatttcagatctgtgttgtctaagagtattaacgttttaattaagcaaagaaatgatttttaatctgtatgtaattgttttaaagcacccattttaagagaaaatactgtgcaatgaagaaaccagtttaggcatttgctataaactgaaatattccaaaagaatcatctataacagccctgtaaattcctttaaaatgataactaacaggacagtttgaccaattttttttaaatatacttccttttatgtgttcaata

SEQ ID NO: 9986 - DNA, 4001 bp, Homo sapiens
acgctgcggccgctatcccctccggaccatggccgacgacgacgtgctgttcgaggatgtgtacgagctgtgcgaggtgatcggaaagggtcccttcagtgttgtacgacgatgtatcaacagagaaactgggcaacaatttgctgtaaaaattgttgatgtagccaagttcacatcaagtccagggttaagtacagaagatctaaagcgggaagccagtatctgtcatatgctgaaacatccacacattgtagagttattggagacatatagctcagatggaatgctttacatggttttcgaatttatggatggagcagatctgtgttttgaaatcgtaaagcgagctgacgctggttttgtgtacagtgaagctgtagccagccattatatgagacagatactggaagctctacgctactgccatgataataacataattcacagggatgtgaagccccactgtgttctccttgcctcaaaagaaaactcggcacctgttaaacttggaggctttggggtagctattcaattaggggagtctggacttgtagctggaggacgtgttggaacacctcattttatggcaccagaagtggtcaaaagagagccttacggaaagcctgtagacgtctgggggtgcggtgtgatcctttttatcctgctcagtggttgtttgcctttttacggaaccaaggaaagattgtttgaaggcattattaaaggaaaatataagatgaatccaaggcagtggagccatatctctgaaagtgccaaagacctagtacgtcgcatgctgatgctggatccagctgaaaggatcactgtttatgaagcactgaatcacccatggcttaaggagcgggatcgttacgcctacaagattcatcttccagaaacagtagagcagctgaggaaattcaatgcaaggaggaaactaaagggtgcagtactagccgctgtgtcaagtcacaaattcaactcattctatggggatccccctgaagagttaccagatttctccgaagaccctacctcctcaggagcagtctcacaggtgctggacagcctggaagagattcatgcgcttacagactgcagtgaaaaggacctagattttctacacagtgttttccaggatcagcatcttcacacactactagatctgtatgacaaaattaacacaaagtcttcaccacaaatcaggaatcctccaagcgatgcagtacagagagccaaagaggtattggaagaaatttcatgttaccctgagaataacgacgcaaaggaactaaagcgtattttaacacaacctcatttcatggccttacttcagactcacgacgtagtggcacatgaagtttacagtgatgaagcattgagggtcacacctcctcccacctctccctatttaaacggcgattctccagaaagtgctaacggagacatggatatggagaatgtgaccagagttcggctggtacagtttcaaaagaacacagatgaaccaatgggaatcactttaaaaatgaatgaactaaatcattgtattgttgcaagaattatgcatgggggcatgattcacaggcaaggtacacttcatgttggtgatgaaattcgagaaatcaatggcatcagtgtggctaaccaaacagtggaacaactgcaaaaaatgcttagggaaatgcgggggagtattaccttcaagattgtgccaagttaccgcactcagtcttcgtcctgtgagagagattccccttccacttccagacagtccccagctaatggtcatagcagcactaacaattctgtttcggacttgccatcaactacccaaccaaaaggacgacagatctatgtaagagcacaatttgaatatgatccagccaaggatgacctcatcccctgtaaagaagctggcattcgattcagagttggtgacatcatccagattattagtaaggatgatcataattggtggcagggtaaactggaaaactccaaaaatggaactgcaggtctcattccttctcctgaacttcaggaatggcgagtagcttgcattgccatggagaagaccaaacaggagcagcaggccagctgtacttggtttggcaagaaaaagaagcagtacaaagataaatatttggcaaagcacaatgcagtgtttgatcaattagatcttgtcacatatgaagaagtagtaaaactgccagcattcaagaggaaaacactagtcttattaggcgcacatggtgttgggagaagacacataaaaaacactctcatcacaaagcacccagaccggtttgcgtaccctattccacatacaaccagacctccaaagaaagacgaagaaaatggaaagaattattactttgtatctcatgaccaaatgatgcaagacatctctaataacgagtacttggagtacggcagccacgaggatgcgatgtatgggacaaaactggagaccatccggaagatccacgagcaggggctgattgcaatactggacgtggagcctcaggcactgaaggtcctgagaactgcagagtttgctccttttgttgttttcattgctgcaccaactattactccaggtttaaatgaggatgaatctcttcagcgtctgcagaaggagtctgacatcttacagagaacatatgcacactacttcgatctcacaattatcaacaatgaaattgatgagacaatcagacatctggaggaagctgttgagctcgtgtgcacagccccacagtgggtccctgtctcctgggtctattaggcctctccccagatatctgagcataactgggagcacctcatttgtggaaaagcctctttgttatcggccttgtgtcagcaggtcatggtccctagagactacctagttgtagtgtgacctacatttataattattgtcatgtccgaatagataggaggagaaaaacaattacacactaatttaaagagacagtatcttttttaatcagttctcctaaactttaataaaatgtatctttaaatgtatgtattattcaatcctttggaatgttatatttttggaaatcatagctttttatttccaaggcccctaaaaactgcacaaaatagatgctgctttctataatctattttaataataataaacaatgattctgttaccttgactgggggtggaacactacattctttttagagtctgattttatggattggaatattgggatatctttctttcctttatttatttgaaataattagtgtagtgattacaaaacagtcataaatttttaaaggccttttttctctctttttttttttttagaatagtatttttttttaagtcctttatgtaacatccagataatgtgatactgtctctttgaagcaccctgtaaaccttttagagatttgaagttgggtcttgactcttaatgcatgtggacagtcgcgagcgtttatgctgtcggtgtgtctgtgttggacaaaacaatctgtaatctacagcaaagtacattctacattccgttcatggggcacacccaggggaataagaataaaatgctattatgactaagttgtaaacctatgcacatcccttgcattttgggcaactttataaaaaaaaagaaactgatttttattaataataatcatgtagtgaaatgtgtttgtaattttgtctcaatttaatttgttgtaaggtggggtggggggaattgctggtttcaccatttcagatctgtgttgtctaagagtattaacgttttaattaagcaaagaaatgatttttaatctgtatgtaattgttttaaagcacccattttaagagaaaatactgtgcaatgaagaaaccagtttaggcatttgctataaactgaaatattccaaaagaatcatctataacagccctgtaaattcctttaaaatgataactaacaggacagtttgaccaattttttttaaatatacttccttttatgtgttcaata

SEQ ID NO: 9987 - DNA, 3126 bp, Homo sapiens
gccagaaagcattctttcattttactctgtattcatgctattgaaagttgcttctgtcagaggaaacaaacactgtgattgaggaaatattgatgaattttaaatgacaaggaaattgccacattgacagaattttggtccatctatttaaagatgattttttgaaaagatatgcataagactcatattctgacaagtttcacagaacaattcagaggttattaccaagaggatcccactgaaatcatcagcctgcctttttaaaagaaaaatattgtttagtgaaataataaatatgaagctctgatttttagcaaagaattgtgagtgtttactggattttcttctttgctttttagctgtatgacaaaattaacacaaagtcttcaccacaaatcaggaatcctccaagcgatgcagtacagagagccaaagaggtattggaagaaatttcatgttaccctgagaataacgacgcaaaggaactaaagcgtattttaacacaacctcatttcatggccttacttcagactcacgacgtagtggcacatgaagtttacagtgatgaagcattgagggtcacacctcctcccacctctccctatttaaacggcgattctccagaaagtgctaacggagacatggatatggagaatgtgaccagagttcggctggtacagtttcaaaagaacacagatgaaccaatgggaatcactttaaaaatgaatgaactaaatcattgtattgttgcaagaattatgcatgggggcatgattcacaggcaaggtacacttcatgttggtgatgaaattcgagaaatcaatggcatcagtgtggctaaccaaacagtggaacaactgcaaaaaatgcttagggaaatgcgggggagtattaccttcaagattgtgccaagttaccgcactcagtcttcgtcctgtgaggacttgccatcaactacccaaccaaaaggacgacagatctatgtaagagcacaatttgaatatgatccagccaaggatgacctcatcccctgtaaagaagctggcattcgattcagagttggtgacatcatccagattattagtaaggatgatcataattggtggcagggtaaactggaaaactccaaaaatggaactgcaggtctcattccttctcctgaacttcaggaatggcgagtagcttgcattgccatggagaagaccaaacaggagcagcaggccagctgtacttggtttggcaagaaaaagaagcagtacaaagataaatatttggcaaagcacaatgcagtgtttgatcaattagatcttgtcacatatgaagaagtagtaaaactgccagcattcaagaggaaaacactagtcttattaggcgcacatggtgttgggagaagacacataaaaaacactctcatcacaaagcacccagaccggtttgcgtaccctattccacatacaaccagacctccaaagaaagacgaagaaaatggaaagaattattactttgtatctcatgaccaaatgatgcaagacatctctaataacgagtacttggagtacggcagccacgaggatgcgatgtatgggacaaaactggagaccatccggaagatccacgagcaggggctgattgcaatactggacgtggagcctcaggcactgaaggtcctgagaactgcagagtttgctccttttgttgttttcattgctgcaccaactattactccaggtttaaatgaggatgaatctcttcagcgtctgcagaaggagtctgacatcttacagagaacatatgcacactacttcgatctcacaattatcaacaatgaaattgatgagacaatcagacatctggaggaagctgttgagctcgtgtgcacagccccacagtgggtccctgtctcctgggtctattaggcctctccccagatatctgagcataactgggagcacctcatttgtggaaaagcctctttgttatcggccttgtgtcagcaggtcatggtccctagagactacctagttgtagtgtgacctacatttataattattgtcatgtccgaatagataggaggagaaaaacaattacacactaatttaaagagacagtatcttttttaatcagttctcctaaactttaataaaatgtatctttaaatgtatgtattattcaatcctttggaatgttatatttttggaaatcatagctttttatttccaaggcccctaaaaactgcacaaaatagatgctgctttctataatctattttaataataataaacaatgattctgttaccttgactgggggtggaacactacattctttttagagtctgattttatggattggaatattgggatatctttctttcctttatttatttgaaataattagtgtagtgattacaaaacagtcataaatttttaaaggccttttttctctctttttttttttttagaatagtatttttttttaagtcctttatgtaacatccagataatgtgatactgtctctttgaagcaccctgtaaaccttttagagatttgaagttgggtcttgactcttaatgcatgtggacagtcgcgagcgtttatgctgtcggtgtgtctgtgttggacaaaacaatctgtaatctacagcaaagtacattctacattccgttcatggggcacacccaggggaataagaataaaatgctattatgactaagttgtaaacctatgcacatcccttgcattttgggcaactttataaaaaaaaagaaactgatttttattaataataatcatgtagtgaaatgtgtttgtaattttgtctcaatttaatttgttgtaaggtggggtggggggaattgctggtttcaccatttcagatctgtgttgtctaagagtattaacgttttaattaagcaaagaaatgatttttaatctgtatgtaattgttttaaagcacccattttaagagaaaatactgtgcaatgaagaaaccagtttaggcatttgctataaactgaaatattccaaaagaatcatctataacagccctgtaaattcctttaaaatgataactaacaggacagtttgaccaattttttttaaatatacttccttttatgtgttcaata

SEQ ID NO: 9988 - DNA, 3965 bp, Homo sapiens
acgctgcggccgctatcccctccggaccatggccgacgacgacgtgctgttcgaggatgtgtacgagctgtgcgaggtgatcggaaagggtcccttcagtgttgtacgacgatgtatcaacagagaaactgggcaacaatttgctgtaaaaattgttgatgtagccaagttcacatcaagtccagggttaagtacagaagatctaaagcgggaagccagtatctgtcatatgctgaaacatccacacattgtagagttattggagacatatagctcagatggaatgctttacatggttttcgaatttatggatggagcagatctgtgttttgaaatcgtaaagcgagctgacgctggttttgtgtacagtgaagctgtagccagccattatatgagacagatactggaagctctacgctactgccatgataataacataattcacagggatgtgaagccccactgtgttctccttgcctcaaaagaaaactcggcacctgttaaacttggaggctttggggtagctattcaattaggggagtctggacttgtagctggaggacgtgttggaacacctcattttatggcaccagaagtggtcaaaagagagccttacggaaagcctgtagacgtctgggggtgcggtgtgatcctttttatcctgctcagtggttgtttgcctttttacggaaccaaggaaagattgtttgaaggcattattaaaggaaaatataagatgaatccaaggcagtggagccatatctctgaaagtgccaaagacctagtacgtcgcatgctgatgctggatccagctgaaaggatcactgtttatgaagcactgaatcacccatggcttaaggagcgggatcgttacgcctacaagattcatcttccagaaacagtagagcagctgaggaaattcaatgcaaggaggaaactaaagggtgcagtactagccgctgtgtcaagtcacaaattcaactcattctatggggatccccctgaagagttaccagatttctccgaagaccctacctcctcaggagcagtctcacaggtgctggacagcctggaagagattcatgcgcttacagactgcagtgaaaaggacctagattttctacacagtgttttccaggatcagcatcttcacacactactagatctgtatgacaaaattaacacaaagtcttcaccacaaatcaggaatcctccaagcgatgcagtacagagagccaaagaggtattggaagaaatttcatgttaccctgagaataacgacgcaaaggaactaaagcgtattttaacacaacctcatttcatggccttacttcagactcacgacgtagtggcacatgaagtttacagtgatgaagcattgagggtcacacctcctcccacctctccctatttaaacggcgattctccagaaagtgctaacggagacatggatatggagaatgtgaccagagttcggctggtacagtttcaaaagaacacagatgaaccaatgggaatcactttaaaaatgaatgaactaaatcattgtattgttgcaagaattatgcatgggggcatgattcacaggcaaggtacacttcatgttggtgatgaaattcgagaaatcaatggcatcagtgtggctaaccaaacagtggaacaactgcaaaaaatgcttagggaaatgcgggggagtattaccttcaagattgtgccaagttaccgcactcagtcttcgtcctgtgagagagattccccttccacttccagacagtccccagctaatggtcatagcagcactaacaattctgtttcgatctatgtaagagcacaatttgaatatgatccagccaaggatgacctcatcccctgtaaagaagctggcattcgattcagagttggtgacatcatccagattattagtaaggatgatcataattggtggcagggtaaactggaaaactccaaaaatggaactgcaggtctcattccttctcctgaacttcaggaatggcgagtagcttgcattgccatggagaagaccaaacaggagcagcaggccagctgtacttggtttggcaagaaaaagaagcagtacaaagataaatatttggcaaagcacaatgcagtgtttgatcaattagatcttgtcacatatgaagaagtagtaaaactgccagcattcaagaggaaaacactagtcttattaggcgcacatggtgttgggagaagacacataaaaaacactctcatcacaaagcacccagaccggtttgcgtaccctattccacatacaaccagacctccaaagaaagacgaagaaaatggaaagaattattactttgtatctcatgaccaaatgatgcaagacatctctaataacgagtacttggagtacggcagccacgaggatgcgatgtatgggacaaaactggagaccatccggaagatccacgagcaggggctgattgcaatactggacgtggagcctcaggcactgaaggtcctgagaactgcagagtttgctccttttgttgttttcattgctgcaccaactattactccaggtttaaatgaggatgaatctcttcagcgtctgcagaaggagtctgacatcttacagagaacatatgcacactacttcgatctcacaattatcaacaatgaaattgatgagacaatcagacatctggaggaagctgttgagctcgtgtgcacagccccacagtgggtccctgtctcctgggtctattaggcctctccccagatatctgagcataactgggagcacctcatttgtggaaaagcctctttgttatcggccttgtgtcagcaggtcatggtccctagagactacctagttgtagtgtgacctacatttataattattgtcatgtccgaatagataggaggagaaaaacaattacacactaatttaaagagacagtatcttttttaatcagttctcctaaactttaataaaatgtatctttaaatgtatgtattattcaatcctttggaatgttatatttttggaaatcatagctttttatttccaaggcccctaaaaactgcacaaaatagatgctgctttctataatctattttaataataataaacaatgattctgttaccttgactgggggtggaacactacattctttttagagtctgattttatggattggaatattgggatatctttctttcctttatttatttgaaataattagtgtagtgattacaaaacagtcataaatttttaaaggccttttttctctctttttttttttttagaatagtatttttttttaagtcctttatgtaacatccagataatgtgatactgtctctttgaagcaccctgtaaaccttttagagatttgaagttgggtcttgactcttaatgcatgtggacagtcgcgagcgtttatgctgtcggtgtgtctgtgttggacaaaacaatctgtaatctacagcaaagtacattctacattccgttcatggggcacacccaggggaataagaataaaatgctattatgactaagttgtaaacctatgcacatcccttgcattttgggcaactttataaaaaaaaagaaactgatttttattaataataatcatgtagtgaaatgtgtttgtaattttgtctcaatttaatttgttgtaaggtggggtggggggaattgctggtttcaccatttcagatctgtgttgtctaagagtattaacgttttaattaagcaaagaaatgatttttaatctgtatgtaattgttttaaagcacccattttaagagaaaatactgtgcaatgaagaaaccagtttaggcatttgctataaactgaaatattccaaaagaatcatctataacagccctgtaaattcctttaaaatgataactaacaggacagtttgaccaattttttttaaatatacttccttttatgtgttcaata

SEQ ID NO: 9989 - DNA, 2223 bp, Homo sapiens
acgctgcggccgctatcccctccggaccatggccgacgacgacgtgctgttcgaggatgtgtacgagctgtgcgaggtgatcggaaagggtcccttcagtgttgtacgacgatgtatcaacagagaaactgggcaacaatttgctgtaaaaattgttgatgtagccaagttcacatcaagtccagggttaagtacagaagatctaaagcgggaagccagtatctgtcatatgctgaaacatccacacattgtagagttattggagacatatagctcagatggaatgctttacatggttttcgaatttatggatggagcagatctgtgttttgaaatcgtaaagcgagctgacgctggttttgtgtacagtgaagctgtagccagccattatatgagacagatactggaagctctacgctactgccatgataataacataattcacagggatgtgaagccccactgtgttctccttgcctcaaaagaaaactcggcacctgttaaacttggaggctttggggtagctattcaattaggggagtctggacttgtagctggaggacgtgttggaacacctcattttatggcaccagaagtggtcaaaagagagccttacggaaagcctgtagacgtctgggggtgcggtgtgatcctttttatcctgctcagtggttgtttgcctttttacggaaccaaggaaagattgtttgaaggcattattaaaggaaaatataagatgaatccaaggcagtggagccatatctctgaaagtgccaaagacctagtacgtcgcatgctgatgctggatccagctgaaaggatcactgtttatgaagcactgaatcacccatggcttaaggagcgggatcgttacgcctacaagattcatcttccagaaacagtagagcagctgaggaaattcaatgcaaggaggaaactaaagggtgcagtactagccgctgtgtcaagtcacaaattcaactcattctatggggatccccctgaagagttaccagatttctccgaagaccctacctcctcaggagcagtctcacaggtgctggacagcctggaagagattcatgcgcttacagactgcagtgaaaaggacctagattttctacacagtgttttccaggatcagcatcttcacacactactagatctgtatgacaaaattaacacaaagtcttcaccacaaatcaggaatcctccaagcgatgcagtacagagagccaaagaggtattggaagaaatttcatgttaccctgagaataacgacgcaaaggaactaaagcgtattttaacacaacctcatttcatggccttacttcagactcacgacgtagtggcacatgaagtttacagtgatgaagcattgagggtcacacctcctcccacctctccctatttaaacggcgattctccagaaagtgctaacggagacatggatatggagaatgtgaccagagttcggctggtacagtttcaaaagaacacagatgaaccaatgggaatcactttaaaaatgaatgaactaaatcattgtattgttgcaagaattatgcatgggggcatgattcacaggcaaggtacacttcatgttggtgatgaaattcgagaaatcaatggcatcagtgtggctaaccaaacagtggaacaactgcaaaaaatgcttagggaaatgcgggggagtattaccttcaagattgtgccaagttaccgcactcagtcttcgtcctgtgaggacttgccatcaactacccaaccaaaaggacgacagatctatgtaagagcacaatttgaatatgatccagccaaggatgacctcatcccctgtaaagaagctggcattcgattcagagttggtgacatcatccagattattagtaaggatgatcataattggtggcagggtaaactggaaaactccaaaaatggaactgcaggtctcattccttctcctgaacttcaggaatggcgagtagcttgcattgccatggagaagaccaaacaggagcagcaggccagctgtacttggtttggcaagaaaaagaagcagtacaaagataaatatttggcaaagcacaatgcagtgtttgatcaattagatcttgtcacatatgaagaagtagtaaaactgccagcattcaagaggactctcatcacaaagcacccagaccggtttgcgtaccctattccacgtaagcaatgtctcaatct

SEQ ID NO: 9990 - DNA, 2129 bp, Homo sapiens
acgctgcggccgctatcccctccggaccatggccgacgacgacgtgctgttcgaggatgtgtacgagctgtgcgaggtgatcggaaagggtcccttcagtgttgtacgacgatgtatcaacagagaaactgggcaacaatttgctgtaaaaattgttgatgtagccaagttcacatcaagtccagggttaagtacagaagatctaaagcgggaagccagtatctgtcatatgctgaaacatccacacattgtagagttattggagacatatagctcagatggaatgctttacatggttttcgaatttatggatggagcagatctgtgttttgaaatcgtaaagcgagctgacgctggttttgtgtacagtgaagctgtagccagccattatatgagacagatactggaagctctacgctactgccatgataataacataattcacagggatgtgaagccccactgtgttctccttgcctcaaaagaaaactcggcacctgttaaacttggaggctttggggtagctattcaattaggggagtctggacttgtagctggaggacgtgttggaacacctcattttatggcaccagaagtggtcaaaagagagccttacggaaagcctgtagacgtctgggggtgcggtgtgatcctttttatcctgctcagtggttgtttgcctttttacggaaccaaggaaagattgtttgaaggcattattaaaggaaaatataagatgaatccaaggcagtggagccatatctctgaaagtgccaaagacctagtacgtcgcatgctgatgctggatccagctgaaaggatcactgtttatgaagcactgaatcacccatggcttaaggagcgggatcgttacgcctacaagattcatcttccagaaacagtagagcagctgaggaaattcaatgcaaggaggaaactaaagggtgcagtactagccgctgtgtcaagtcacaaattcaactcattctatggggatccccctgaagagttaccagatttctccgaagaccctacctcctcaggagcagtctcacaggtgctggacagcctggaagagattcatgcgcttacagactgcagtgaaaaggacctagattttctacacagtgttttccaggatcagcatcttcacacactactagatctgtatgacaaaattaacacaaagtcttcaccacaaatcaggaatcctccaagcgatgcagtacagagagccaaagaggtattggaagaaatttcatgttaccctgagaataacgacgcaaaggaactaaagcgtattttaacacaacctcatttcatggccttacttcagactcacgacgtagtggcacatgaagtttacagtgatgaagcattgagggtcacacctcctcccacctctccctatttaaacggcgattctccagaaagtgctaacggagacatggatatggagaatgtgaccagagttcggctggtacagtttcaaaagaacacagatgaaccaatgggaatcactttaaaaatgaatgaactaaatcattgtattgttgcaagaattatgcatgggggcatgattcacaggcaaggtacacttcatgttggtgatgaaattcgagaaatcaatggcatcagtgtggctaaccaaacagtggaacaactgcaaaaaatgcttagggaaatgcgggggagtattaccttcaagattgtgccaagttaccgcactcagtcttcgtcctgtgaggacttgccatcaactacccaaccaaaaggacgacagatctatgtaagagcacaatttgaatatgatccagccaaggatgacctcatcccctgtaaagaagctggcattcgattcagagttggtgacatcatccagattattagtaaggatgatcataattggtggcagggtaaactggaaaactccaaaaatggaactgcaggtctcattccttctcctgaacttcaggaatgctatcccatgtttccccaaaaaatagtattaaatttagaatgttggagctgatgaggacttcagatgccatcattttatacataaggaaacgtgggcccaaatggagaagcagcagccttccatctggcattgtctttcagtctgatct

SEQ ID NO: 9991 - DNA, 425 bp, Homo sapiens
aaatgtacaaggtctcatcatagaaaacctgaccctgctttaaaggaccatttcaaggaatgtgatcagcaagaaggcagggtggaactaaatatttctcagccctgtcagcattcccaggaccacttcctttatgggaatctcatcatcatctgatgcattctcttcaccctttctggcccagcttggatactatcctttcttgaagtttggaagggagcccaatgtagagcatttctttttcccacctgaattccaaatgaattaagaaacttcgctgttcttcattttaaaaaaggactaaggtggaagatggagcttggcaagtgaagtccccaattaggcagacttatttacccagtcataggcatctaggagggcctgcttgatgagacttaccgcgtggaatagcagagcactgctcc

SEQ ID NO: 9992 - DNA, 2386 bp, Homo sapiens
  misc_feature (1626)..(1626): n is a, c, g, or t
  misc_feature (1651)..(1651): n is a, c, g, or t
aagatcaccaggccccggaacgtcttccagaggggaaagaggctccgtctggggtacaaggagccaggaggtcccccagcgccccccccacccacaggttcgggcgggcagggtgggggaaagccggcagggataattagaaagcggagttcaggcgggggccaatttgccgaggaggagctgcgacaaataccaggctgccaattaagctcgggggaatgtggctggctgggcagtggggagccttgaaaccaccaattaggcctcagctgggatgatcggtcattagggcccagaaggagacccacgcccagcccctgctgctgcggggacatcccaggtgctggggaggccggccaaaggccccatcaccctgcagccgtcctgcccctctctgggcctcagtttccccgtctgtgtattggaggcccagtgaggccttccgggaaggggctgggggggcagccaggagtcctgacctctgccctgggtggtcgaggctgcccgaggtccagctgcctggtctttgtctccgccccaccccggccagcgccagactggccagcctgcattcctgcgctgatttatggtggccggggaggccctttccccttcagctgcctgaggggtgtggggccctcaggtagacccggctggccgggccggtgggtcccatgagcacaggcacgcacacatggccacacgcccggcctcgtcctctgaccccggcccggctgccgccccctcccctccacgttcttcctccgagaccccgtccatcaccgagtcacggatctaggagtgtatctggggtttagtctgttttgttcccagagtctggaatcagccgagcacacagcagttgcctaataaatgctcgttacttgaaccttgattttctcagctgcaaaagtgagccgggcagggcggagagggggacagggcggagagggggacaggacgagcttgccagggaaacgcctgaggcagcaggtactggaatggggaggacttcaccgctggggctgtcctggggtgaacgccatcccccacccaaattcacatcggcccagaacctcagaacgagacgttatttggaaaaagggcctttgcagacgtgatcaaattgagaaaaagtcacagtgaaggccggtgggcactggagacggtcgcacagagacagaggccggccacatgtcaagggactcctggagcccccaggagctgggagaggcggaaggctcctcctgcagcccctggagggagcgcagccctgcggacgcctcgattttggactctgggctccaggacggagggagaacaggtttcgtttgttttacgcccgcggtttgaggtccttcgttacgcagccccccggctaagaaccgcacgtagaggccagcacaccttgggcccttccagggcgagcggaaggtcctctcctctgagattctgacccggtattacggggtctaccctgcctggacccccccttccctggcacagcccctacaagaaacctcaccgcacctcctgcctcagtttccccatctctcaaatagagtgtgtgagaaaacacagcagctttaccccaagcacctggcgccccagctaccctcacatccnggatggggaaaccgaggcgccaggnagcaatcagctgccccatgtacagccagccaaggttggggttggagaggggagccattaactcccaggccaaatggtgggcgaactgggccggtggcgaggcacggtcagacccctgtggggccggggcactgatgcgtggcagtaaagggaggacctgcgggggccccagctgctggcgggggaggcggctctaatggccgttgctgtgggcagccagcaacaaagccagcagtaaaggccgcctgggctttatgggtctctggcccccggttccgctcccctgtggggggcgccccgccctggccagctggccgaggccccagggatgggaaagcaggggacggtgtccaggctgcccatggcggtgtccaggccccccttgtgggccagatcccgggttgaactgctgggccacagcacaccccatggcaaacccaggccttggttctcacctgggttctgtggccgaaaccctgcccctctgaaacgtcaaccagaaagctctgaaatcagccgcccaccacacacccacaggagccctaaacccaggctggagattgggcaaaatctccggaaactccctccccaggggctgagggccgagataagcggcccgcactcccctccacgccgcctgacctccctggggcctgctctgatcacgggaggggtcgggtgtgaagttctgaaggtgcccctccgctgagacccccaccgccccccatcagccccg

SEQ ID NO: 9993 - DNA, 1971 bp, Homo sapiens
  misc_feature (1211)..(1211): n is a, c, g, or t
  misc_feature (1236)..(1236): n is a, c, g, or t
tagatggagtctcgctctgtcgcccaggctggagtgcaatggcgcaatctcagctcgctgcaacctctgtcctgggtggtcgaggctgcccgaggtccagctgcctggtctttgtctccgccccaccccggccagcgccagactggccagcctgcattcctgcgctgatttatggtggccggggaggccctttccccttcagctgcctgaggggtgtggggccctcaggtagacccggctggccgggccggtgggtcccatgagcacaggcacgcacacatggccacacgcccggcctcgtcctctgaccccggcccggctgccgccccctcccctccacgttcttcctccgagaccccgtccatcaccgagtcacggatctaggagtgtatctggggtttagtctgttttgttcccagagtctggaatcagccgagcacacagcagttgcctaataaatgctcgttacttgaaccttgattttctcagctgcaaaagtgagccgggcagggcggagagggggacagggcggagagggggacaggacgagcttgccagggaaacgcctgaggcagcaggtactggaatggggaggacttcaccgctggggctgtcctggggtgaacgccatcccccacccaaattcacatcggcccagaacctcagaacgagacgttatttggaaaaagggcctttgcagacgtgatcaaattgagaaaaagtcacagtgaaggccggtgggcactggagacggtcgcacagagacagaggccggccacatgtcaagggactcctggagcccccaggagctgggagaggcggaaggctcctcctgcagcccctggagggagcgcagccctgcggacgcctcgattttggactctgggctccaggacggagggagaacaggtttcgtttgttttacgcccgcggtttgaggtccttcgttacgcagccccccggctaagaaccgcacgtagaggccagcacaccttgggcccttccagggcgagcggaaggtcctctcctctgagattctgacccggtattacggggtctaccctgcctggacccccccttccctggcacagcccctacaagaaacctcaccgcacctcctgcctcagtttccccatctctcaaatagagtgtgtgagaaaacacagcagctttaccccaagcacctggcgccccagctaccctcacatccnggatggggaaaccgaggcgccaggnagcaatcagctgccccatgtacagccagccaaggttggggttggagaggggagccattaactcccaggccaaatggtgggcgaactgggccggtggcgaggcacggtcagacccctgtggggccggggcactgatgcgtggcagtaaagggaggacctgcgggggccccagctgctggcgggggaggcggctctaatggccgttgctgtgggcagccagcaacaaagccagcagtaaaggccgcctgggctttatgggtctctggcccccggttccgctcccctgtggggggcgccccgccctggccagctggccgaggccccagggatgggaaagcaggggacggtgtccaggctgcccatggcggtgtccaggccccccttgtgggccagatcccgggttgaactgctgggccacagcacaccccatggcaaacccaggccttggttctcacctgggttctgtggccgaaaccctgcccctctgaaacgtcaaccagaaagctctgaaatcagccgcccaccacacacccacaggagccctaaacccaggctggagattgggcaaaatctccggaaactccctccccaggggctgagggccgagataagcggcccgcactcccctccacgccgcctgacctccctggggcctgctctgatcacgggaggggtcgggtgtgaagttctgaaggtgcccctccgctgagacccccaccgccccccatcagccccg

SEQ ID NO: 9994 - DNA, 533 bp, Homo sapiens
caactcattaggctggcattggcacctttccaactttatccctacacctcagctgcacaggatgccttcctggaatgcccttagttctctattcaacctcttcaaggccttctcagccttcacaccatctccatgaaacctttcttgaccacaccagcccatagagctctgtcttgcacacactgcactgctcatttggtgttcagtcacatgctgtttggggaggtttcttgtttttttgttagtattcctgctgttatttctgagctcactttctagctctgtgaatacagggtcagcccttacgccacactggggtcccgtagatgctctttgtgcgattagggaatgctaattagaatactatctctgggctatttatgctgcatcagtcttcctgtcaaacaagttacagttgtgcttatctgtatttccgatgagaatcaggaatttttcttctgtttaatgaatttctgattggtttcaaagtattctaacataagtagccaaattgtactataggcctttaaatg

SEQ ID NO: 9995 - DNA, 413 bp, Homo sapiens
ggctaccaaagcattcactgacttctcaaagccatttctactcagaaaagttaaggccactgacatattgaaatcctttgttttatagatgagaaaacttgctcccatggaaagcgggagacctctccagagcgatcaagccagtcagggacccatgcatgggccaggccactgtcccaaagactttgtgcacagcccctcagtgctctctcaagacaaccctactgaggcagccacagtcatcacctctcttgtacagaagagcatgctgacgcccagaggtttcagttacttcaggaatcatgttgcctcatctccagggctatttgcacttacactgtgttgtccctacacaaaaataaaaccctggggctgtgctgtggtggtgaagaccatgggcttgccacagcccc

SEQ ID NO: 9996 - DNA, 330 bp, Homo sapiens
gagattgtggtgggccaagaccgtgccattgcacttcagcctgggtggcagagtgaaactgtcccccccccaaaaaaaaaattaaaagaaaatatagttattttttattaaaaagggtcatttatgttaacaagtaataggtatattattgttagctttaaatgaatacgaaaacaaattcagttttaatgtctaatatagtgaatactgacagatgttaattcactatacaaaaagccctttaaaagtttcttcattacttttcagtgtgtagtggggtcctgagaccaaaattttgagaactcttactctcaagagagagctaagcat

SEQ ID NO: 9997 - DNA, 412 bp, Homo sapiens
gttcaagtgattctcctgcctcagcctcccaagtagctcggattacaggcacccgccaccactcctggctaatttttgtatttttactagagatgaggattcaccctgctggccaggctggttttgaactcagatgatctgcctgccttggcctcccaaagtgctgggattacaggcatgagccatcgtgcccagccggccaatttcaagttatctgtatgacatcattggaggtgagactgagaagagatgtttagtcaccacgaatatagtgtttctatcatacaaatacaacctcaagaacataaccgcaacaggacagacaatagttaaatgttgcaaaaaacctaagaggtgatgaaagttgtgtatttattatcttttgttttaaatataattacttataagtaat

SEQ ID NO: 9998 - DNA, 411 bp, Homo sapiens
tgtcctctctttataggtttccatttacaaactcaccctatttttcatccatctctccctcctccttttcatgttcaaacactttcatactcgctatgagctaggcctggccttggcacagaggatacaaaggtaaattaagacagaatcactatcctggaagaacatacatcctaatggaaaagtctacatggaaataaaaatatataaaatgtgacagaaatataaattaagtatgtgggtacaccaagaaaaaaaattgttttagaaaggcaagtctttaaaaagaaggtgacacctgaagcagaacttgaagcatcagcaggagttcatgtggaagaaggaggggagggtggattgcaggcaaagaggacagaatgaggaattaattaaataaaggcttttatagaa

SEQ ID NO: 9999 - DNA, 541 bp, Homo sapiens
cagagtcagatttacctacagtttcctggagacaccacctgttccagaaaacctctcctaacactccatgtagacacacatacatgctctcttgcttccaggttgggctaaggtacctgtcatcgcactcatgacaccctttgcatatttttcttgctggattttcactttgttttataattttttgtttaagtatttgtctttccctctagcctacgggctcattggggacaagactcctcttcacctccctgttcccagtgcctcacagtgtttttggcacatggtaggtgctcaccaagtagttaatgaatgaagaaattccgctagtttcatggaataccatttacagagaaaatggcaaagtcatccagatccctcattctgatcagaaacaagaactgctttcagaactgaaaatcccagggggaccccctaaaagctgtcataacccaatttagcatgagaatcatgccattcgctttcatctaaaatgtggcatcacacatagggctagtcccaagatgatctcagtaatggc

SEQ ID NO: 10000 - DNA, 689 bp, Homo sapiens
agaaactgagtcatagagaagtctggtacttacccaaggttacacagctaataaaagggcaagctcaaatgtgaagtgagcttgagcatatgctcttaagctccctgactggtagcagtaagtaatgttaaaataccataagattttgggaccaaagtggtttaaaattacttgaggaaaactccaaacaggtatttggtaagtattgtgatcttggaaagctgcttgtcctctctgcctcagctttatctttacaatagggcaagtaatagtacctcagctcatggttattttgaggattaaataagttaatgtgtgtaatatgcttaaaacagtggctggcacttagcattcaaatgtaaactgctattatttttggacattttctaaagaagaaaccagtcagttagtgaaagctgaggaagacaaaagggggctaattcagctgcatgttttgtatattcagtgtgatcacaagttaaaagctggctactgttgttctttcatccatttatgttgatgagtcttggcatcagtagctgtcaaataatcaatggcttgatacaacttctgagattcagatactaaaggggttgacgtagagataccccatctatgtttttgcctgtcatccagtaagaaggaaatgattcagtggactaaaccctgtcatttctttgaagaatgag

SEQ ID NO: 10001 - DNA, 385 bp, Homo sapiens
tgtctcaaaaaaaaaaaaaaaaaaagaaaagaaaagaaaaattgagaggctcaggcaaattttttatggacccctctaataccataacagacaattaaaagtcaccagacacagtggctcacacctgtaatcccaacacttttggaaggctgaggtgggcggatcatgaggtcaggagatctagaccagcccaggcaacaaagtgagaccttgtttctgttgaaaaaataaaaaatttagccaggtgtggtgtcacatgtctgtgatcccagctacatgggaggctcaggcaaggggatcccttgaacccagtagatggaggccgcagtgagccatgttcatgccaaagcactccagcctgggcaacagaacaagaccctccctc

SEQ ID NO: 10002 - DNA, 578 bp, Homo sapiens
ttttttcctttcaaggccagtcaacatacactggatattccaatatttttcttaaatcaatatgctactttttacccacataacaactttacagtcagaaatatatatgctaatgtacacttagcacttcttaattgttcttaaagctaaatttgaacaataaattaaatttctcagtatatgttatgtaatgtagacacaggctataaaaatgttgacattttatatatctctttctagtcctttgcatttctttatgtattgaagtaaatggttttacttacttgaacatattatcttaattttagtaaagattagtaatgtgcatgctctggtaatattttttaatgccaagcatgcagacatatttgctagaatctgggattatctgccttacccataggaagtctaggcatcctgagcacaaacccaaataaccaaggcatcacagtccaccaggtacaaaacttaagtacagtacatggtagtaaaggaaaagtttcagaaacattatcctgccaattccaaccgtgaaggaatgcaagcaccatgccaaatgaaagaaaaaggaaaaaaag

SEQ ID NO: 10003 - DNA, 450 bp, Homo sapiens
gaaaatagattcctatagccccaatcattttgcaacacttctgcagagttaaaagaaagccagtatctaacagaaaatcttgagcttgcagaataacagaaaagaaaaaaaaaccaaaaacacaacttaccaaaacactgaaactccctctacttatgaaataaacaaactggcttaaattggtggaatcattatggccaaatggtgttttggcagaatcaccttgctgaggtcaccgtctgaattttcactgcctgtttcatcacaactccccttcagtttgcccatgacatccatgaggaggcaatgagcttgagagtaacgtttcagtataaaattgctttctcttaaaaacctgatgtcatagtattggcttctagcacttcaagaagtgagctccttttactcaataacaatgttatctatatcttagagacagtcaacaggaga

SEQ ID NO: 10004 - DNA, 443 bp, Homo sapiens
attctgatacaggacacagcttctgttctgattctggcactgaaatgcagagtaacaaatgtcaggactgtggcactaagattcctacctcccgaagagcctgcaggaaagaaccaactaaagaatttcattatagatacaacactccaggacagaattactcaaatcatagcaaaagaggtgcctttgtccagccccattctttagatgaaagtaaaaactcttcaccctccctggcctctccattttgctgcccaggtcttgtgcactcacctgacacttccaaatccagccctacatctggatggcaagaggctgagctggggctggaaaatatgaaatcgcagtgaccaaggactttgaaagttattaagggctacaccagtgcaagttggtagcaacccataaatgtttgctgaacaaataaatgacttactggataa

SEQ ID NO: 10005 - DNA, 351 bp, Homo sapiens
agtctagcatgggggcttgctcccaagagtactgttccaggaagacatgccccattgtgcaagtactcattcaaacctctgctcgcataatgcttgctaacatgcctttggccaaattaggtcacatagctaacccaaagtcatgtgggtggccatcaacactgggatgtgtgtggctcgttggaggtcactgaagtgaaacctaccgtagttacacagtaagtcagtcaaattcttggtttattggacagctgacagctgttaagaaggaccctatgttaaaggaaatggatacaatctaataacattaacaatagataatggtttttaaccattaacttccattgataa

SEQ ID NO: 10006 - DNA, 277 bp, Homo sapiens
agccaaaccagaaagggacaccgaggcgcgaaaggagagtgatcccagcaggagggacggcaaagattgaagagagcgaccagcccgagagacagggtctcactctatcgctcaggctgaagtgcagtggcggatcaggctcactgcaacctcaacctcctgggctcaagtgatcctcccacctcagcctcccaaagtggtgggattacaggcctgagccacggcaacttgcctcttcctatattttcttttacgcttaaataaattacttaaacat

SEQ ID NO: 10007 - DNA, 312 bp, Homo sapiens
atagtggtggtgtttgagaagataatgtaactacttcttagatttcaatttcataacccttaaaatgttgggaccacctacaaatgggggacaccctgggttttgaagtcttgcctgtgtggttaatcagaacctcagaattcacccagcccccggagaggttttgaaaagcccctggctcatcagagcttgcttgtttcataaactcttaaggctttgttttaacctgtagccagcttcgccttataagctttcttgccccaagccttgagccagtcataatggcttaagcatcagatttcagacaggcga

SEQ ID NO: 10008 - DNA, 465 bp, Homo sapiens
ggtcttttcaaaagcactggttcccattgtatttaaacaggtttaaaaactgaaaaggccccatcttgtgctactctcgagtgggaaaaaaatttctaaacttcatataatatccatgatagagtatatctcaaaaaggcgaaatataagatatttgaacaaactccatgaagtgtattatttgctcattttccaaagcctttgtttttatgtttcatgagaagttttgtttctcttcaggctggataaatatagtagctttcccttgttttcctgtggcatttcatattgtgtctagatttgttagattgcatcagtcacatttgattacattatatcatgtcaaagaacaatgaaaaataagggatttttctaactctttactgaaagaaggaggattcatggtctgccagatttctttctttcttttcttttttttttttttttttgagatggagtctcact

SEQ ID NO: 10009 - DNA, 268 bp, Homo sapiens
tgcccacaacccaacgatatgtttgttattcatacattatgttttagagaaccctgctctgtccagcgagcttgctcatagttaagctcacctggctcaattgctttggtttatcctagagacttttgtaatatttcctcaaagccagtaatgctataataataggtagttcactttttgtttacatttatgattgtaaatgtctctcatttatgaagtattgatttgctggctgatatcaaaataaaatttatttatagaaaatttt

SEQ ID NO: 10010 - DNA, 163 bp, Homo sapiens
taaatcttagagggcgtttaatccaatcctgttttccggagagaaggaaatggacaccagcaagggtgagcgaggcagccgcggtcacagagcttgttagtgggtgaacaagggccccagactcagggaccccatccaggtccgcttagctgggagccccccc

SEQ ID NO: 10011 - DNA, 585 bp, Homo sapiens
ggaagggataaatctggggctgagtacaagcaaaacaagaccaaaggaagctacctgagcaggtattccagatactcatgtcatacaccaaggttgtaccagtgcccctttctctgtgacacatccatccactggaaactttcgtacaactagctgaaagaagagaaacatcctatttcatgtcactggagccctaatgatcgcagccatttcaggaaatgccatcaattacagtgaggagctcattcagaagtgaaagatgagttccattctctgttacttagagggtggatatcctcctccactgaatgcaaactattaagtaatgaaaagacagcactccaagcaatatagatttataggccaacctggcaatcaagggtaactgacatgaaaatggattgcttcacattttaattacaaagatactcttcagtaccataaattgaagaaaacactaactttttgtggctactgtaattgtcaaagtataattacctgtgttttctcacctacgtatttgagatagagacaaaaccaagtaagttaatccacttataataaaaatgtcttctgagaataaat

SEQ ID NO: 10012 - DNA, 337 bp, Homo sapiens
ggaagggataaatctggggctgagtacaagcaaaacaagaccaaaggaagctacctgagcaggtattccagatactcatgtcatacaccaaggttgtaccagtgcccctttctctgtgacacatccatccactggaaactttcgtacaactagctgaaagaagagaaacatcctatttcatgtcactggagccctaatgatcgcagccatttcaggaaatgccatcaattacagtgaggagctcattcagaagtgaaagatgagttccattctctgttacttagaggtcagtgatcattccccaacctcttcatagtgaacaaatagtacagtaaaa

SEQ ID NO: 10013 - DNA, 608 bp, Homo sapiens
ggaagggataaatctggggctgagtacaagcaaaacaagaccaaaggaagctacctgagcaggtattccagatactcatgtcatacaccaaggttgtaccagtgcccctttctctgtgacacatccatccactggaaactttcgtacaactagctgaaagaagagaaacatcctatttcatgtcactggagccctaatgatcgcagccatttcaggaaatgccatcaattacagtgaggagctcattcagaagtgaaagatgagttccattctctgttacttagaggtattacaaagctcaaatctgagaaaaccttgtctaccatcaaccctgacctacagaggagaggcacccccaagcttattagtgatcctgtctccgtcttattggcacatcctgatggccttgatctctagttcttcctgtggagcataaccatatggttctttgccaagatgttaagaccaaagtcggagagtgaaccccatgtcaatgaattcttgtttttctgatcttacattccatcactttgatccagtactctcaaaatgcaatcacagttgtacatgtcttctcctgtcaataaacgctaccttagtactgcagt

SEQ ID NO: 10014 - DNA, 407 bp, Homo sapiens
ggaagggataaatctggggctgagtacaagcaaaacaagaccaaaggaagctacctgagcaggtattccagatactcatgtcatacaccaaggttgtaccagtgcccctttctctgtgacacatccatccactggaaactttcgtacaactagctgaaagaagagaaacatcctatttcatgtcactggagccctaatgatcgcagccatttcaggaaatgccatcaattacagtgaggagctcattcagaagtgaaagatgagttccattctctgttacttagaggaacacaattatttctggaaagagtattacactcagtattctgcatttcatatggcatttcaaagtcctgagaatgactctccgtagtcttctatgtactaattaaacatgaacatgtggt

SEQ ID NO: 10015 - DNA, 368 bp, Homo sapiens
gtgagacgtgccttcgctcctcttttgctttctgccatgactgtgaggcctccccagccatgtggaactggtggatatcctcctccactgaatgcaaactattaagtaatgaaaagacagcactccaagcaatatagatttataggccaacctggcaatcaagggtaactgacatgaaaatggattgcttcacattttaattacaaagatactcttcagtaccataaattgaagaaaacactaactttttgtggctactgtaattgtcaaagtataattacctgtgttttctcacctacgtatttgagatagagacaaaaccaagtaagttaatccacttataataaaaatgtcttctgagaataaat

SEQ ID NO: 10016 - DNA, 701 bp, Homo sapiens
ggaagggataaatctggggctgagtacaagcaaaacaagaccaaaggaagctacctgagcaggtattccagatactcatgtcatacaccaaggttgtaccagtgcccctttctctgtgacacatccatccactggaaactttcgtacaactagctgaaagaagagaaacatcctatttcatgtcactggagccctaatgatcgcagccatttcaggaaatgccatcaattacagtgaggagctcattcagaagtgaaagatgagttccattctctgttacttagagggtggatatcctcctccactgaatgcaaactattaagtaatgaaaagacagcactccaagcaatatagatttataggccaacctggcaatcaagggtaactgacatgaaaatggattgcttcacattttaattacaaagatactcttcagtaccataaattgaagaaaacactaactttttgtggctactgtaattgtcaaagtataattacctgtgttttctcacctacgtatttgagatagagacaaaaccaaattgaagctttgtggcaactctgtgaacagcaagtctgtcagtgccatttttccaatagcatgtgcctactatgtgtctgtgtatgtcattttgttaatttcttcaacatttcaaacttttgtattattattatatttgttatggtgatttgcgatcagt

SEQ ID NO: 10017 - DNA, 412 bp, Homo sapiens
tgcttttataagttgtaacacttaccgtgaagatctgcagctttactcctgagccagcaagaccatgaaccgaccagaaggaagaaactccgaacacatctgaacatcagaaaggacagactccagaagcgccaccttaagggctataacactcaccgcgagggtctgtggcttcgttcttgaagtcagtgagaccaagaacccaccatttctggacacaataagatcctcattccagaggggttcagtcccatacctggctggcagaaatgctacaacatagaggccgagaagaatctggacagacaggcattgctggattcccccaggagatcataccctttctgtcccataatgtttccacataaccatccatttttcatcaactctaagcataaaaaaggagaataaa

SEQ ID NO: 10018 - DNA, 310 bp, Homo sapiens
gaacaacttgtgtttactgagtatctaccatgtatgtgcctgcagagaggatgtcttcattttgcagatgaagtaattagtaaataacttgcctaggttccctcaggtagtgggcccttgaagaatgggcttttatggccaagtgcattggctcacgccagtaatcccagcactttgagcggctgaggtgggaggattgcttgagcccaggagttcaagaccagcctggacaacaaagtgaggccccatttctacaaaaaattagccacatgtggtggcatttgcctgtagtcccagctgcatgggagag

SEQ ID NO: 10019 - DNA, 325 bp, Homo sapiens
taatgtgatgggagggggcacacaggtgtttgaaggtatttttaatgatctgtgtcttcagctaaatggtgagaactcaagtattcatttcactgtcatgtataagtcaatttctatacagtttacttttatacatgtgaaatagtttgtgataagaaagagtaatataaaataaatctggatgcatattgtgttaaaaatcctcttggccaggcacagtggctcacacttgtaatcctaccactttgggaggctgaggtaggggaattgcttgagcccaggagttggaaactagcctgggcaccatagtgagaccctatctcta

SEQ ID NO: 10020 - DNA, 450 bp, Homo sapiens
  misc_feature (381)..(381): n is a, c, g, or t
  misc_feature (427)..(427): n is a, c, g, or t
  misc_feature (429)..(429): n is a, c, g, or t
  misc_feature (434)..(434): n is a, c, g, or t
actattttggcgtgtcccacacacagcatcaagggaggggggtacaagaagaagcagagtgagaccagagtggagtgggagccaaaacaggtgggcgtctgtgcagaaagcaacatggatgcagctggaggccattatcctaagtgaattaacgaaggaacggaaaaccaagaaaggcatgttctcacttataagtgggagctaagcattgagtactcaaggacataaagatggcaaaagtacaccctggggactactagagaggggagggagtgaggggggcaagggttgaaaaactaattgttgggcactacactcaccacctgggtaatgggatcatttgtatctcaaacctctgcatcacgaaatatacccatgtancaaacctgtgcatgtactccctgaatctaaaataaaagctgaaatnanaaaanaaaaatagaacaatcg

SEQ ID NO: 10021 - DNA, 164 bp, Homo sapiens
tggatgatgatagctacaattcagtggatggcatggagctaacatcacaaggtgctggtacttattggtatttaccaccagagtgttttgtggttgggaaagaaccaccaaagatctcaaataaagttgatgtgtggtcggtgggtgtgatcttctatcagtgt

SEQ ID NO: 10022 - DNA, 491 bp, Homo sapiens
  misc_feature (334)..(334): n is a, c, g, or t
  misc_feature (387)..(387): n is a, c, g, or t
  misc_feature (400)..(400): n is a, c, g, or t
aagatggaataggacttttcctaattctttcttctaactacaactaaaacccctgggctatacataaggaaaacacagggagcctctgaaaaaggatgaggcagaccacccagggatcttgggactcgaggaatgacacagtactgagttccttgggtttactttgctttatatatcccagacttggagccaaagaaagaagctgacaacctgaaaatgccagtgggcacaaacacagaaagtgccaacaaaagctcccctgtccagccagaagaccaggaaagggcagcccagtgaggcagaaaacttaaagagtcacttgctctactccagngtccacaccatagaaaaaactatgcagccccacatttacacccgcagaggttnaatggggggagcntagggtttttgacaacagttttaggcattaagggaaggccattcttcccgggggccttggggagggagccagttattgagggcattcctta

SEQ ID NO: 10023 - DNA, 254 bp, Homo sapiens
agtgaatatttgatagtagcttatcctcttaaagtttacagacctcaggccaggctgattctcattagggccaggcatgctggctcaggcctgtaatctcagtgctttgggaagatctcttgaggtcaggagtttcagaccagcctgggcaacatagtgagagcctgtctttaaaaatacatatattaaaaattaggtgggcatgatggcgtacatctatagccctagcttcttgggaggctgaggcaggagga

SEQ ID NO: 10024 - DNA, 369 bp, Homo sapiens
ttaaaggtttatagttttgcctttcacaattttttttataaaatctcttagaattcatctctgtagtaagttaaaggagagatacaatttctgtgttatgtatgtgtgcatataccagttgtcccagaatatgcaaagaccaactttttcacttatcagtagtcataaattggattattatatgtgtatgggacatacaacacatatgtatgtgtcacatatgttgggaattcattattcaattatattggtcaatttgttccctgtgctatttccatgctgtagcagttttataataatttttgggatataacacaaaaatctatttgagactttattaatcctctccataatataactatttttcta

SEQ ID NO: 10025 - DNA, 231 bp, Homo sapiens
tgtggccaaaccctggccctgcacagcctccttgtggcctgagcttattgcaggctgcacggtgcacattacaaatggtcagttggaggccaggcgcggtggctcacgcctgtaatcccagcactttgggaggccgaggcgggtggatcatggggtcaagagatcgagaccatcttggctaacatggtgaaaccccgtctctactaaaaatacaaaaaattagccgggtgt

SEQ ID NO: 10026 - DNA, 2654 bp, Homo sapiens
tcaaagaggcagctgcagtggagaatcatgttaagctcggctactgcggagagcccaaggtagcccaataatggattttgatgagcgtggtccctgctcctctaacatgtatttgccaagttgtacttactacgtctcgggtccagatttctccagcctcccttcttttctgccccagaccccgtcttcgcgcccaatgacatactcctactcctccaacctgccccaggtccaacccgtgcgcgaagtgaccttcagagagtacgccattgagcccgccactaaatggcacccccgcggcaatctggcccactgctactccgcggaggagctcgtgcacagagactgcctgcaggcgcccagcgcggccggcgtgcctggcgacgtgctggccaagagctcggccaacgtctaccaccaccccacccccgcagtctcgtccaatttctatagcaccgtgggcaggaacggcgtcctgccacaggctttcgaccagtttttcgagacagcctacggcaccccggaaaacctcgcctcctccgactaccccggggacaagagcgccgagaaggggcccccggcggccacggcgacctccgcggcggcggcggcggctgcaacgggcgcgccggcaacttcaagttcggacagcggcggcggcggcggctgccgggagacggcggcggcagcagaggagaaagagcggcggcggcgccccgagagcagcagcagccccgagtcgtcttccggccacactgaggacaaggccggcggctccagtggccaacgcacccgcaaaaagcgctgcccctataccaagtaccagatccgagagctggaacgggagttcttcttcagcgtctacattaacaaagagaagcgcctgcaactgtcccgcatgctcaacctcactgatcgtcaagtcaaaatctggtttcagaacaggagaatgaaggaaaaaaaaattaacagagaccgtttacagtactactcagcaaatccactcctctaagactccagcggctggaattgggtggggggcttcatacacatgagataatatgcagattttgcccttgacaaagtcaagccacatggtgacttttgaaaagaggtgtgcaagagagggatgcatggagatagccccacaggaggtggtctgggactctcttgattaagatctcagtggttaagattcctaataatcattggattctgagagctgtgcatcagctagaatgacaggtttgggacccctggtggttcactcttggagcctgcagagctgcgggctgggtgtggtctccactggggattgggcccctgccagaccccctggagactaaccccaccacaccctccctctactgggagcctacccacccccaggacccctgagtaaaaaagctgtgtgctctccaagcccagttcagcttggggacaggggcaggaggaaggggtaggattactaggtgcccagaatgaggctgctttccaaagccaatgtgaacagcggctggacttggaggtagctttgaggtggaagagggctgcaaatccttgtgggaaaagaaatctatgattccaggtggcatcagtgtctttccactcctcctagccacccaccacactgatccagccctgagttcctagccaccgcctcctacagcccacctggcttttctttctaccaaatgagggtcttggttccagcctgccactcaggcccaaagcctcgacacagagtggactgttccctgaggtgggagatgtggaaaagccaagaggctgcagccaggccactggcccctgagatctctgcaggaaatggctgtggagtgtggcagtttggcaaactctccaccacacgtaatgaaacttggatttgctcagtgtctggctgcagagcagtgggcctggccagcaggtccccagctttggctatgagggccttgagtcccccaaaacaccgggttccagcaccacactcagccctcattggctcttgaactgagcttggaagcttctggtgaccttccaagagcctgagagtgaggtggaattattttaaaagataaatattatattatatatatatatatttccctgaaggaaccaaagcgaattttaaaagatgcaatgtagaggggaaaagagatgatgaaaatatttaaaggccctatctgtttacagtgttccgtggttaaactcgctcactgctaagaatatttgaatgtatgcttcatacagggatggtgttcaaaaaacttgtaaataaaggaaccataatcaattttcttttctttctttctctttttcttttttcttttgccattagttgatttcctttagggtgttggagggggtggaaaaggtattgagaatggtctttttaatctcttgcaacatttggaaagagttagggaaatgctcagaggcagtcggcctggccggcctggggatctcatctgggaaagccaggcaccctcccattgaatctcctttgcctccctgtgttaagaaatgtctgttggctccatttgtactgggagtgttggcctgtcctcaattctggttcttacccaccgtgtgtgttgcagcacttatacaggcaactgggcacaaggaaaataaagacggtggaaatttgagta

SEQ ID NO: 10027 - DNA, 2484 bp, Homo sapiens
tcaaagaggcagctgcagtggagaatcatgttaagctcggctactgcggagagcccaaggtccaacccgtgcgcgaagtgaccttcagagagtacgccattgagcccgccactaaatggcacccccgcggcaatctggcccactgctactccgcggaggagctcgtgcacagagactgcctgcaggcgcccagcgcggccggcgtgcctggcgacgtgctggccaagagctcggccaacgtctaccaccaccccacccccgcagtctcgtccaatttctatagcaccgtgggcaggaacggcgtcctgccacaggctttcgaccagtttttcgagacagcctacggcaccccggaaaacctcgcctcctccgactaccccggggacaagagcgccgagaaggggcccccggcggccacggcgacctccgcggcggcggcggcggctgcaacgggcgcgccggcaacttcaagttcggacagcggcggcggcggcggctgccgggagacggcggcggcagcagaggagaaagagcggcggcggcgccccgagagcagcagcagccccgagtcgtcttccggccacactgaggacaaggccggcggctccagtggccaacgcacccgcaaaaagcgctgcccctataccaagtaccagatccgagagctggaacgggagttcttcttcagcgtctacattaacaaagagaagcgcctgcaactgtcccgcatgctcaacctcactgatcgtcaagtcaaaatctggtttcagaacaggagaatgaaggaaaaaaaaattaacagagaccgtttacagtactactcagcaaatccactcctctaagactccagcggctggaattgggtggggggcttcatacacatgagataatatgcagattttgcccttgacaaagtcaagccacatggtgacttttgaaaagaggtgtgcaagagagggatgcatggagatagccccacaggaggtggtctgggactctcttgattaagatctcagtggttaagattcctaataatcattggattctgagagctgtgcatcagctagaatgacaggtttgggacccctggtggttcactcttggagcctgcagagctgcgggctgggtgtggtctccactggggattgggcccctgccagaccccctggagactaaccccaccacaccctccctctactgggagcctacccacccccaggacccctgagtaaaaaagctgtgtgctctccaagcccagttcagcttggggacaggggcaggaggaaggggtaggattactaggtgcccagaatgaggctgctttccaaagccaatgtgaacagcggctggacttggaggtagctttgaggtggaagagggctgcaaatccttgtgggaaaagaaatctatgattccaggtggcatcagtgtctttccactcctcctagccacccaccacactgatccagccctgagttcctagccaccgcctcctacagcccacctggcttttctttctaccaaatgagggtcttggttccagcctgccactcaggcccaaagcctcgacacagagtggactgttccctgaggtgggagatgtggaaaagccaagaggctgcagccaggccactggcccctgagatctctgcaggaaatggctgtggagtgtggcagtttggcaaactctccaccacacgtaatgaaacttggatttgctcagtgtctggctgcagagcagtgggcctggccagcaggtccccagctttggctatgagggccttgagtcccccaaaacaccgggttccagcaccacactcagccctcattggctcttgaactgagcttggaagcttctggtgaccttccaagagcctgagagtgaggtggaattattttaaaagataaatattatattatatatatatatatttccctgaaggaaccaaagcgaattttaaaagatgcaatgtagaggggaaaagagatgatgaaaatatttaaaggccctatctgtttacagtgttccgtggttaaactcgctcactgctaagaatatttgaatgtatgcttcatacagggatggtgttcaaaaaacttgtaaataaaggaaccataatcaattttcttttctttctttctctttttcttttttcttttgccattagttgatttcctttagggtgttggagggggtggaaaaggtattgagaatggtctttttaatctcttgcaacatttggaaagagttagggaaatgctcagaggcagtcggcctggccggcctggggatctcatctgggaaagccaggcaccctcccattgaatctcctttgcctccctgtgttaagaaatgtctgttggctccatttgtactgggagtgttggcctgtcctcaattctggttcttacccaccgtgtgtgttgcagcacttatacaggcaactgggcacaaggaaaataaagacggtggaaatttgagta

SEQ ID NO: 10028 - DNA, 2032 bp, Homo sapiens
tcaaagaggcagctgcagtggagaatcatgttaagctcggctactgcggagagcccaaggtagcccaataatggattttgatgagcgtggtccctgctcctctaacatgtatttgccaagttgtacttactacgtctcgggtccagatttctccagcctcccttcttttctgccccagaccccgtcttcgcgcccaatgacatactcctactcctccaacctgccccaggtccaacccgtgcgcgaagtgaccttcagagagtacgccattgagcccgccactaaatggcacccccgcggcaatctggcccactgctactccgcggaggagctcgtgcacagagactgcctgcaggcgcccagcgcggccggcgtgcctggcgacgtgctggccaagagctcggccaacgtctaccaccaccccacccccgcagtctcgtccaatttctatagcaccgtgggcaggaacggcgtcctgccacaggctttcgaccagtttttcgagacagcctacggcaccccggaaaacctcgcctcctccgactaccccggggacaagagcgccgagaaggggcccccggcggccacggcgacctccgcggcggcggcggcggctgcaacgggcgcgccggcaacttcaagttcggacagcggcggcggcggcggctgccgggagacggcggcggcagcagaggagaaagagcggcggcggcgccccgagagcagcagcagccccgagtcgtcttccggccacactgaggacaaggccggcggctccagtggccaacgcacccgcaaaaagcgctgcccctataccaagtaccagatccgagagctggaacgggagttcttcttcagcgtctacattaacaaagagaagcgcctgcaactgtcccgcatgctcaacctcactgatcgtcaagtcaaaatctggtttcagaacaggagaatgaaggaaaaaaaaattaacagagaccgtttacagtactactcagcaaatccactcctctaagactccagcggctggaattgggtggggggcttcatacacatgagataatatgcagattttgcccttgacaaagtcaagccacatggtgacttttgaaaagaggtgtgcaagagagggatgcatggagatagccccacaggaggtggtctgggactctcttgattaagatctcagtggttaagattcctaataatcattggattctgagagctgtgcatcagctagaatgacaggtttgggacccctggtggttcactcttggagcctgcagaagcagtgggcctggccagcaggtccccagctttggctatgagggccttgagtcccccaaaacaccgggttccagcaccacactcagccctcattggctcttgaactgagcttggaagcttctggtgaccttccaagagcctgagagtgaggtggaattattttaaaagataaatattatattatatatatatatatttccctgaaggaaccaaagcgaattttaaaagatgcaatgtagaggggaaaagagatgatgaaaatatttaaaggccctatctgtttacagtgttccgtggttaaactcgctcactgctaagaatatttgaatgtatgcttcatacagggatggtgttcaaaaaacttgtaaataaaggaaccataatcaattttcttttctttctttctctttttcttttttcttttgccattagttgatttcctttagggtgttggagggggtggaaaaggtattgagaatggtctttttaatctcttgcaacatttggaaagagttagggaaatgctcagaggcagtcggcctggccggcctggggatctcatctgggaaagccaggcaccctcccattgaatctcctttgcctccctgtgttaagaaatgtctgttggctccatttgtactgggagtgttggcctgtcctcaattctggttcttacccaccgtgtgtgttgcagcacttatacaggcaactgggcacaaggaaaataaagacggtggaaatttgagta

SEQ ID NO: 10029 - DNA, 458 bp, Homo sapiens
agggaggagcgtgggaacagtaagttgagatttgttgttcagaggtagcctcgctgagaagttgctatttgaataacgatcaggtgaattaatgagcactaaaataatggggaaagagtgttccaggtaatgggaacagcaagtgccaaggcccagaggtaagagcaggtctcaggaggaaggggtgctgaagtaagaggatcgcttgtgtccaggagtttgaggcagcatggtgcaatctcggttcacagcaacctctacctcccgggttcaagcaattctcctgcctcagctactcaagaggctgaggtgggaggatcacccgagcccagaagttcaaagctgcagtgagctctgatcacaccaatgcactccagcctgggtgacagagccagaccctgtctctaaaaaacaaaaaagaaaagcttgggttgaagccagcccatattcttttatat

SEQ ID NO: 10030 - DNA, 292 bp, Homo sapiens
agggaggagcgtgggaacagtaagttgagatttgttgttcagaggtagcctcgctgagaagttgctatttgaataacgatcaggtgaattaatgagcactaaaataatggggaaagagtgttccaggtaatgggaacagcaagtgccaaggcccagaggtaagagcaggtctcaggaggaaggggtgctgaagtaagaggatcgcttgtgtccaggagtttgaggcagcagtgagctgtgactgcacctctgcactccagcctgggcagcagagtgagaccctgtccccaaa

SEQ ID NO: 10031 - DNA, 459 bp, Homo sapiens
atgaatctatttgaccacttataaaagtcttgtgtggttcaatgtcatggctgagcaaacaaacaaacacctggatactgtgatgtatgagaaaagacagaaactgcatctgtgcctgagtgcagcgagtttgagtaagtcggtagtaaggctgggaatagcacagcatctgcatgtgtgttacacactcagcagagctgatcctgaacacgtgcaagccctcatgattttggccatggtcagcaacactgtcccagagtgatgtgaggctccttctaggataactcatgagtatgtaatttaccatggagtagcctatttatggtacacaggaggataccttgctgtttttccctccaaagttattaaatcttagcggcagttaaaatccaagatatagtatgattttgcacaagatgacaggatgcttcctacactcttcctgtatttgaaaaaaaa

SEQ ID NO: 10032 - DNA, 488 bp, Homo sapiens
caagtttatcttctaagtcttatatcgaaatgtttttctgctgttaacatatttattttcaaaaagcaatttgtatgtatttttcaggcatcgtcttttctgtttgttcaatttggagttcgaggctttcctcaaagcctgataatccttatttgtatgtttatataagaataaggcacttaaggccgggcgcagtggctcagcctgtaatcccagcactttgggaggcagaggcaggcggatcatgaggtcaggagattgagaccatcctggctaacacagtgaaaccccatctctactaaaaatacaaaaaaaaattagctgggcatggtagcgggcgcctgtagtcccagctacttgggaggctgaggcaggagaatggtgtgaacctgggaggtggagcttgcagtgagccgagatcgcaccactgcactccagcctgggtgagagcgagactctgtctcaaaaaaaaaaaaaaagaataaggc

SEQ ID NO: 10033 - DNA, 710 bp, Homo sapiens
ttgagtttggatcccatctctgccatgttcaaattatgcaaacttcagccagccatttatccgttttggaattcaattttctcatctgtaatatgggaacagtcccttttagggttgctgtgaggataaagtacttacaggcacaaagaaaactaactccataaatagtaaaaattattagaagtattgctttttttttttttgagttggagttttgctcttgttgcccaggctggactgcaatggcgtgatctcagctcactgcaacctctgcctcccggttcaagcgattctcctgcctcagcttcccaagtagctgggattacaggcatgtgccaccacacctggctaattttgtatttttagtagagacggggtttctctatgttggtcaggctggtttcgaactcccgacctcaggtgatccacccacctcggcctcccaaagtgctgggattacaggcgtgagccacagagcccattcagcagtattgctttaatgggctacctgggcaagttgtgggcccagacatccatcaatgtgaagtccatgccctgccagccggcagacattttaaccagaccgattaacaacctgtttctgatcaatgatttatggcttatgtttccctgttaatgaaatgtaattgccaagcctgagatgtagcgcagtggcaaaacaaactgccatctgaaaattacatcctagg

SEQ ID NO: 10034 - DNA, 497 bp, Homo sapiens
gtgattatagcctgtaactcccacaaataataggcttcaaaataagaggctgccaacggagcctttgtggctttgtctcagtgatggcacgtaaattgctattaatgtcctaagtgtacttgaatatgccagtctttgggatgtggagttggctcagtgtctctctttacacggcatgtcattgttggtctgataatctggggtaattgctgtctcttggatggtcagaaaagtgtaaggggtttagcttcctgtgtgatggtaaatagcctcaaaatttaccccacgagggcaggttcacacatactggctgtgtgtgtatttcatgtgtagccaccgttcaccgttaagatgtgtatacaatctctgtgtgtacccttagtaaataatagccttgtcaacaaagccaaagcaaaatcaaaggttataaaaatgaaatgacgaattcagggctgtataggttcagccaatcagataatttatattgagagtttaaa

SEQ ID NO: 10035 - DNA, 382 bp, Homo sapiens
ttttttttgagatggagtctcactctgtcgcccaggcttagagtgccagtggtgcttatctcgctcgggctcactgcaacctcccacctcctgggttcaaaggaattctcctgccttagcctcccaagtagctgggattacaggcatgtgccaccatgcctggctaatttttgtatttttagtagagatggggtttcgccttgttggccaggctgctctcctgacctcaggtgatctgcccacctcagcctcacaaagtgctaggattacagatgtgagccactgcgcccagccaaaatttttcctcttttgaaaactgttaccaaaacagactttttattaaactaatattgttttgtgtatttgtcaaatgttacggaat

SEQ ID NO: 10036 - DNA, 599 bp, Homo sapiens
ctggggaccccacccttctctacccagcacttccctgcctccctctagtatcagtagtagagtcttgtgataggctggataatgcccccacaagatatccatgtactaattccaggacttgttgatgttgtcttatgtggcaaaaggaactttgcagaggtgcttaagttgaggattctgagatggagagatcaacctgaattatctggatgggctctaaatgtaatcacacgtgtccttataagaggaacccttgcttacagaagaacaagagatgtgatgatggaagcaacaggttagagagattcaagaaaagcatagccagccaagggaatgcaggcagcctccagaagctaaaaaaaaaaaaaaaaaagaaaagaaaaaagaaaagcaagagaacgattccccctagagcttcctgaaagaactagccatgccaccacattgtcgttatcccagtgagacagatttcaaacttgtggcctcaagaactgtaagggtaagaactgtaaaataaatttatgctgttctaagccacaaaatttgtggcacttttttacagcagcaacaggaaattaataaaagtcttccagtggtag

SEQ ID NO: 10037 - DNA, 576 bp, Homo sapiens
ggaacgtgatcttcccctggagtcctgctgttctcggtagacggacgcctccttccttctctgccatgccgccctgccactcccgctctttgtcactctctgccactctctttctctgctcctctcaatgtccagccacttgtgtttgaggattctgagatggagagatcaacctgaattatctggatgggctctaaatgtaatcacacgtgtccttataagaggaacccttgcttacagaagaacaagagatgtgatgatggaagcaacaggttagagagattcaagaaaagcatagccagccaagggaatgcaggcagcctccagaagctaaaaaaaaaaaaaaaaaagaaaagaaaaaagaaaagcaagagaacgattccccctagagcttcctgaaagaactagccatgccaccacattgtcgttatcccagtgagacagatttcaaacttgtggcctcaagaactgtaagggtaagaactgtaaaataaatttatgctgttctaagccacaaaatttgtggcacttttttacagcagcaacaggaaattaataaaagtcttccagtggtag

SEQ ID NO: 10038 - DNA, 381 bp, Homo sapiens
ccggctcatcacactgcagggaagaacagcaaacctgggagaaagtgactctataaccagtggaagaaaggctgtgtagccatcaccggatctctgggggaagagagaagacacagagacacagacctgccccggaggaatccagagcccacctgcccagagaggctccacctgatttccctggctctgggcacccccttaaaagccctttatgccatctttcctttcagtcgagtgatgcaggatttgggaccagacagcctttgctcaaatccttccactgttatctaccagcttggtggccttggagaagttatttccctgttctggatgtgcttcctcttctataaactagagacactacaaattcccaccacagag

SEQ ID NO: 10039 - DNA, 2575 bp, Homo sapiens
cggcgggcgaggggcagggcagggcggaccctggacgcgcgggcgcgcgcggaaggtagcgcggggccgcgttggcgcgcacgcgcctgagcgtgcgcccggtggggccggccgggactcgccgctcgcacgcccttgggccgcggccgggcgcccgctcttccttccgcttgcgctgtgagctgaggcggtgtatgtgcggcaataacatgtcaaccccgctgcccgccatcgtgcccgccgcccggaaggccaccgctgcggtgattttcctgcatggattgggagatactgggcacggatgggcagaagcctttgcaggtatcagaagttcacatatcaaatatatctgcccgcatgcgcctgttaggcctgttacattaaatatgaacgtggctatgccttcatggtttgatattattgggctttcaccagattcacaggaggatgaatctgggattaaacaggcagcagaaaatataaaagctttgattgatcaagaagtgaagaatggcattccttctaacagaattattttgggagggttttctcagggaggagctttatctttatatactgcccttaccacacagcagaaactggcaggtgtcactgcactcagttgctggcttccacttcgggcttcctttccacagggtcctatcggtggtgctaatagagatatttctattctccagtgccacggggattgtgaccctttggttcccctgatgtttggttctcttacggtggaaaaactaaaaacattggtgaatccagccaatgtgacctttaaaacctatgaaggtatgatgcacagttcgtgtcaacaggaaatgatggatgtcaagcaattcattgataaactcctacctccaattgattgacgtcactaagaggccttgtgtagaagtacaccagcatcattgtagtagagtgtaaaccttttcccatgcccagtcttcaaatttctaatgttttgcagtgttaaaatgttttgcaaatacatgccaataacacagatcaaataatatctcctcatgagaaatttatgatcttttaagtttctatacatgtattcttataagacgacccaggatctactatattagaatagatgaagcaggtagcttcttttttctcaaatgtaattcagcaaaataatacagtactgccaccagattttttattacatcatttgaaaattagcagtatgcttaatgaaaatttgttcaggtataaatgagcagttaagatataaacaatttatgcatgctgtgacttagtctatggatttattccaaaattgcttagtcaccatgcagtgtctgtatttttatatatgtgttcatatatacataatgattataatacataataagaatgaggtggtattacattattcctaataatagggataatgctgtttattgtcaagaaaaagtaaaatcgttctcttcaattaatggcccttttattttgggaccaggcttttattttccctgatattatttctatttaatactcttttctctcaagaaaaaaaaaaaagttggtttttcctttatggtccttcatagcaggccaagtatggcctctctgcaatagacagctactgtcaatacatgctgtaattggacattctggggtcacagatataaggtatttaaaatctatttatgctttatagagaaaccagacattaaaacttcatgcactacttatttcgaattactgtaccttatccaaatttacacctagctattaggatcttcaacccaggtaacaggaataattctgtggtttcatttttctgtaaacaactgaaagaataattagatcatattctagtatgttctgaaatatctttaagactgatcttaaaaactaacttctaagatgatttcatcttctcatagtatagagtttactttgtacacgtttgaaaccaactactgtagaagatgaggaatctattgtaattttttgctttattttcatctgccagtggacttatttgaaattttcactttagtcaaattattttttgtattagtttttgatgcagacataaaaatagcaatcattttaaattgtcaaaatttccagattactggtaaaaattatttgaaaacaaacttatgggtaataaaggctagtcagaaccctataccataaagtgtagttaccatacagattaatatgtagcaaaaatgtatgcttgatatttctcaactgtgttaatttttctgctgtattccagctgaccaaaacaatattaagaatgcatctttataaatgggtgctaattgataatggaaataatttagtaatggactatacaggatgttaataatgaagccatatgtttatgtctggatttaaaaattttaaacaatcatttactatgtcatttttctttaccttgaagaacataaactgttatttcacttctacaaatcagcaagatattatttatggcaagaaatattccattgaaatattgtgctgtaacatgggaaagtgtaaatgtttttcatggtttctatcaatgtgaaataaaatttaattctga

SEQ ID NO: 10040 - DNA, 2597 bp, Homo sapiens
cggcgggcgaggggcagggcagggcggaccctggacgcgcgggcgcgcgcggaaggtagcgcggggccgcgttggcgcgcacgcgcctgagcgtgcgcccggtggggccggccgggactcgccgctcgcacgcccttgggccgcggccgggcgcccgctcttccttccgcttgcgctgtgagctgaggcggtgtatgtgcggcaataacatgtcaaccccgctgcccgccatcgtgcccgccgcccggaaggccaccgctgcggtgattttcctgcatggattgggagatactgggcacggatgggcagaagcctttgcaggtatcagaagttcacatatcaaatatatctgcccgcatgcgcctgttaggcctgttacattaaatatgaacgtggctatgccttcatggtttgatattattgggctttcaccagattcacaggaggatgaatctgggattaaacaggcagcagaaaatataaaagctttgattgatcaagaagtgaagaatggcattccttctaacagaattattttgggagggttttctcagggaggagctttatctttatatactgcccttaccacacagcagaaactggcaggtgtcactgcactcagttgctggcttccacttcgggcttcctttccacagggtcctatcggtggtgctaatagagatatttctattctccagtgccacggggattgtgaccctttggttcccctgatgtttggttctcttacggtggaaaaactaaaaacattggtgaatccagccaatgtgacctttaaaacctatgaaggtatgatgcacagttcgtgtcaacaggaaatgatggatgtcaagcaattcattgataaactcctacctccaattgattgacgtcactaagaggccttgtgtagaagtacaccagcatcattgtagtagagtgtaaaccttttcccatgcccagtcttcaaatttctaatgttttgcagtgttaaaatgttttgcaaatacatgccaataacacagatcaaataatatctcctcatgagaaatttatgatcttttaagtttctatacatgtattcttataagacgacccaggatctactatattagaatagatgaagcaggtagcttcttttttctcaaatgtaattcagcaaaataatacagtactgccaccagattttttattacatcatttgaaaattagcagtatgcttaatgaaaatttgttcaggtataaatgagcagttaagatataaacaatttatgcatgctgtgacttagtctatggatttattccaaaattgcttagtcaccatgcagtgtctgtatttttatatatgtgttcatatatacataatgattataatacataataagaatgaggtggtattacattattcctaataatagggataatgctgtttattgtcaagaaaaagtaaaatcgttctcttcaattaatggcccttttattttgggaccaggcttttattttccctgatattatttctatttaatactcttttctctcaagaaaaaaaaaaaagttggtttttcctttatggtccttcatagcaggccaagtatggcctctctgcaatagacagctactgtcaatacatgctgtaattggacattctggggtcacagatataaggtatttaaaatctatttatgctttatagagaaaccagacattaaaacttcatgcactacttatttcgaattactgtaccttatccaaatttacacctagctattaggatcttcaacccaggtaacaggaataattctgtggtttcatttttctgtaaacaactgaaagaataattagatcatattctagtatgttctgaaatatctttaagactgatcttaaaaactaacttctaagatgatttcatcttctcatagtatagagtttactttgtacacgtttgaaaccaactactgtagaagatgaggaatctattgtaattttttgctttattttcatctgccagtggacttatttgaaattttcactttagtcaaattattttttgtattagtttttgatgcagacataaaaatagcaatcattttaaattgtcaaaatttccagattactggtaaaaattatttgaaaacaaacttatgggtaataaaggctagtcagaaccctataccataaagtgtagttaccatacagattaatatgtagcaaaaatgtatgcttgatatttctcaactgtgttaatttttctgctgtattccagctgaccaaaacaatattaagaatgcatctttataaatgggtgctaattgataatggaaataatttagtaatggactatacaggatgttaataatgaagccatatgtttatgtctggatttaaaaattttaaacaatcatttactatgtcatttttctttaccttgaagaacataaactgttatttcacttctacaaatcagcaagatattatttatggcaagaaatattccattgaaatattgtgctgtaacatgggaaagtgtaaatgtttttcatggtttctatcaatgtgaaataaaatttaattctgacttttctgtgaaaatgagtatt

SEQ ID NO: 10041 - DNA, 2420 bp, Homo sapiens
ggacgcgtgggtcgacccacgcgtcggctgaggcggtgtatgtgcggcaataacatgtcaaccccgctgcccgccatcgtgcccgccgcccggaaggccaccgctgcggtgattttcctgcatggattgggagatactgggcacggatgggcagaagcctttgcaggtatcagaagttcacatatcaaatatatctgcccgcatgcgcctgttaggcctgttacattaaatatgaacgtggctatgccttcatggtttgatattattgggctttcaccagattcacaggaggatgaatctgggattaaacaggcagcagaaaatataaaagctttgattgatcaagaagtgaagaatggcattccttctaacagaattattttgggagggttttctcagggaggagctttatctttatatactgcccttaccacacagcagaaactggcaggtgtcactgcactcagttgctggcttccacttcgggcttcctttccacagggtcctatcggtggtgctaatagagatatttctattctccagtgccacggggattgtgaccctttggttcccctgatgtttggttctcttacggtggaaaaactaaaaacattggtgaatccagccaatgtgacctttaaaacctatgaaggtatgatgcacagttcgtgtcaacaggaaatgatggatgtcaagcaattcattgataaactcctacctccaattgattgacgtcactaagaggccttgtgtagaagtacaccagcatcattgtagtagagtgtaaaccttttcccatgcccagtcttcaaatttctaatgttttgcagtgttaaaatgttttgcaaatacatgccaataacacagatcaaataatatctcctcatgagaaatttatgatcttttaagtttctatacatgtattcttataagacgacccaggatctactatattagaatagatgaagcaggtagcttcttttttctcaaatgtaattcagcaaaataatacagtactgccaccagattttttattacatcatttgaaaattagcagtatgcttaatgaaaatttgttcaggtataaatgagcagttaagatataaacaatttatgcatgctgtgacttagtctatggatttattccaaaattgcttagtcaccatgcagtgtctgtatttttatatatgtgttcatatatacataatgattataatacataataagaatgaggtggtattacattattcctaataatagggataatgctgtttattgtcaagaaaaagtaaaatcgttctcttcaattaatggcccttttattttgggaccaggcttttattttccctgatattatttctatttaatactcttttctctcaagaaaaaaaaaaaagttggtttttcctttatggtccttcatagcaggccaagtatggcctctctgcaatagacagctactgtcaatacatgctgtaattggacattctggggtcacagatataaggtatttaaaatctatttatgctttatagagaaaccagacattaaaacttcatgcactacttatttcgaattactgtaccttatccaaatttacacctagctattaggatcttcaacccaggtaacaggaataattctgtggtttcatttttctgtaaacaactgaaagaataattagatcatattctagtatgttctgaaatatctttaagactgatcttaaaaactaacttctaagatgatttcatcttctcatagtatagagtttactttgtacacgtttgaaaccaactactgtagaagatgaggaatctattgtaattttttgctttattttcatctgccagtggacttatttgaaattttcactttagtcaaattattttttgtattagtttttgatgcagacataaaaatagcaatcattttaaattgtcaaaatttccagattactggtaaaaattatttgaaaacaaacttatgggtaataaaggctagtcagaaccctataccataaagtgtagttaccatacagattaatatgtagcaaaaatgtatgcttgatatttctcaactgtgttaatttttctgctgtattccagctgaccaaaacaatattaagaatgcatctttataaatgggtgctaattgataatggaaataatttagtaatggactatacaggatgttaataatgaagccatatgtttatgtctggatttaaaaattttaaacaatcatttactatgtcatttttctttaccttgaagaacataaactgttatttcacttctacaaatcagcaagatattatttatggcaagaaatattccattgaaatattgtgctgtaacatgggaaagtgtaaatgtttttcatggtttctatcaatgtgaaataaaatttaattctga

SEQ ID NO: 10042 - DNA, 2012 bp, Homo sapiens
  misc_feature (2001)..(2001): n is a, c, g, or t
  misc_feature (2007)..(2007): n is a, c, g, or t
cggcgggcgaggggcagggcagggcggaccctggacgcgcgggcgcgcgcggaaggtagcgcggggccgcgttggcgcgcacgcgcctgagcgtgcgcccggtggggccggccgggactcgccgctcgcacgcccttgggccgcggccgggcgcccgctcttccttccgcttgcgctgtgagctgaggcggtgtatgtgcggcaataacatgtcaaccccgctgcccgccatcgtgcccgccgcccggaaggccaccgctgcggtgattttcctgcatggattgggagatactgggcacggatgggcagaagcctttgcaggtatcagaagttcacatatcaaatatatctgcccgcatgcgcctgttaggcctgttacattaaatatgaacgtggctatgccttcatggtttgatattattgggctttcaccagattcacaggaggatgaatctgggattaaacaggcagcagaaaatataaaagctttgattgatcaagaagtgaagaatggcattccttctaacagaattattttgggagggttttctcagggaggagctttatctttatatactgcccttaccacacagcagaaactggcaggtgtcactgcactcagttgctggcttccacttcgggcttcctttccacagggtcctatcggtggtgctaatagagatatttctattctccagtgccacggggattgtgaccctttggttcccctgatgtttggttctcttacggtggaaaaactaaaaacattggtgaatccagccaatgtgacctttaaaacctatgaaggtatgatgcacagttcgtgtcaacaggaaatgatggatgtcaagcaattcattgataaactcctacctccaattgattgacgtcactaagaggccttgtgtagaagtacaccagcatcattgtagtagagtgtaaaccttttcccatgcccagtcttcaaatttctaatgttttgcagtgttaaaatgttttgcaaatacatgccaataacacagatcaaataatatctcctcatgagaaatttatgatcttttaagtttctatacatgtattcttataagacgacccaggatctactatattagaatagatgaagcaggtagcttcttttttctcaaatgtaattcagcaaaataatacagtactgccaccagattttttattacatcatttgaaaattagcagtatgcttaatgaaaatttgttcaggtataaatgagcagttaagatataaacaatttatgcatgctgtgacttagtctatggatttattccaaaattgcttagtcaccatgcagtgtctgtatttttatatatgtgttcatatatacataatgattataatacataataagaatgaggtggtattacattattcctaataatagggataatgctgtttattgtcaagaaaaagtaaaatcgttctcttcaattaatggcccttttattttgggaccaggcttttattttccctgatattatttctatttaatactcttttctctcaagaaaaaaaaaaaagttggtttttcctttatggtccttcatagcaggccaagtatggcctctctgcaatagacagctactgtcaatacatgctgtaattggacattctggggtcacagatataaggtatttaaaatctatttatgctttatagagaaaccagacattaaaacttcatgcactacttatttcgaattactgtaccttatccaaatttacacctagctattaggatcttcaacccaggtaacaggaataattctgtggtttcatttttctgtaaacaactgaaagaataattagatcatattctagtatgttctgaaatatctttaagactgatcttaaaaactaacttctaagatgatttcatcttctcatagtatagagtttactttgtacacgtttgaaaccaactactgtagaagatgaggaatctattgtaattttttgaaaatcggggangctcanagcga

SEQ ID NO: 10043 - DNA, 2528 bp, Homo sapiens
cggcgggcgaggggcagggcagggcggaccctggacgcgcgggcgcgcgcggaaggtagcgcggggccgcgttggcgcgcacgcgcctgagcgtgcgcccggtggggccggccgggactcgccgctcgcacgcccttgggccgcggccgggcgcccgctcttccttccgcttgcgctgtgagctgaggcggtgtatgtgcggcaataacatgtcaaccccgctgcccgccatcgtgcccgccgcccggaaggccaccgctgcggtgattttcctgcatggattgggagatactgggcacggatgggcagaagcctttgcaggtatcagaagttcacatatcaaatatatctgcccgcatgcggtttgatattattgggctttcaccagattcacaggaggatgaatctgggattaaacaggcagcagaaaatataaaagctttgattgatcaagaagtgaagaatggcattccttctaacagaattattttgggagggttttctcagggaggagctttatctttatatactgcccttaccacacagcagaaactggcaggtgtcactgcactcagttgctggcttccacttcgggcttcctttccacagggtcctatcggtggtgctaatagagatatttctattctccagtgccacggggattgtgaccctttggttcccctgatgtttggttctcttacggtggaaaaactaaaaacattggtgaatccagccaatgtgacctttaaaacctatgaaggtatgatgcacagttcgtgtcaacaggaaatgatggatgtcaagcaattcattgataaactcctacctccaattgattgacgtcactaagaggccttgtgtagaagtacaccagcatcattgtagtagagtgtaaaccttttcccatgcccagtcttcaaatttctaatgttttgcagtgttaaaatgttttgcaaatacatgccaataacacagatcaaataatatctcctcatgagaaatttatgatcttttaagtttctatacatgtattcttataagacgacccaggatctactatattagaatagatgaagcaggtagcttcttttttctcaaatgtaattcagcaaaataatacagtactgccaccagattttttattacatcatttgaaaattagcagtatgcttaatgaaaatttgttcaggtataaatgagcagttaagatataaacaatttatgcatgctgtgacttagtctatggatttattccaaaattgcttagtcaccatgcagtgtctgtatttttatatatgtgttcatatatacataatgattataatacataataagaatgaggtggtattacattattcctaataatagggataatgctgtttattgtcaagaaaaagtaaaatcgttctcttcaattaatggcccttttattttgggaccaggcttttattttccctgatattatttctatttaatactcttttctctcaagaaaaaaaaaaaagttggtttttcctttatggtccttcatagcaggccaagtatggcctctctgcaatagacagctactgtcaatacatgctgtaattggacattctggggtcacagatataaggtatttaaaatctatttatgctttatagagaaaccagacattaaaacttcatgcactacttatttcgaattactgtaccttatccaaatttacacctagctattaggatcttcaacccaggtaacaggaataattctgtggtttcatttttctgtaaacaactgaaagaataattagatcatattctagtatgttctgaaatatctttaagactgatcttaaaaactaacttctaagatgatttcatcttctcatagtatagagtttactttgtacacgtttgaaaccaactactgtagaagatgaggaatctattgtaattttttgctttattttcatctgccagtggacttatttgaaattttcactttagtcaaattattttttgtattagtttttgatgcagacataaaaatagcaatcattttaaattgtcaaaatttccagattactggtaaaaattatttgaaaacaaacttatgggtaataaaggctagtcagaaccctataccataaagtgtagttaccatacagattaatatgtagcaaaaatgtatgcttgatatttctcaactgtgttaatttttctgctgtattccagctgaccaaaacaatattaagaatgcatctttataaatgggtgctaattgataatggaaataatttagtaatggactatacaggatgttaataatgaagccatatgtttatgtctggatttaaaaattttaaacaatcatttactatgtcatttttctttaccttgaagaacataaactgttatttcacttctacaaatcagcaagatattatttatggcaagaaatattccattgaaatattgtgctgtaacatgggaaagtgtaaatgtttttcatggtttctatcaatgtgaaataaaatttaattctga

SEQ ID NO: 10044 - DNA, 2440 bp, Homo sapiens
gcctctgcagcgtgtttctgcctggtgtgtgggtgagggaaacctaagtccgccaggaaatcgccttattgtcacctcgcactcttatcctcaatgaaagaagtttgaagattgagtgtcctacaagggtgattttcctgcatggattgggagatactgggcacggatgggcagaagcctttgcaggtatcagaagttcacatatcaaatatatctgcccgcatgcgcctgttaggcctgttacattaaatatgaacgtggctatgccttcatggtttgatattattgggctttcaccagattcacaggaggatgaatctgggattaaacaggcagcagaaaatataaaagctttgattgatcaagaagtgaagaatggcattccttctaacagaattattttgggagggttttctcagggaggagctttatctttatatactgcccttaccacacagcagaaactggcaggtgtcactgcactcagttgctggcttccacttcgggcttcctttccacagggtcctatcggtggtgctaatagagatatttctattctccagtgccacggggattgtgaccctttggttcccctgatgtttggttctcttacggtggaaaaactaaaaacattggtgaatccagccaatgtgacctttaaaacctatgaaggtatgatgcacagttcgtgtcaacaggaaatgatggatgtcaagcaattcattgataaactcctacctccaattgattgacgtcactaagaggccttgtgtagaagtacaccagcatcattgtagtagagtgtaaaccttttcccatgcccagtcttcaaatttctaatgttttgcagtgttaaaatgttttgcaaatacatgccaataacacagatcaaataatatctcctcatgagaaatttatgatcttttaagtttctatacatgtattcttataagacgacccaggatctactatattagaatagatgaagcaggtagcttcttttttctcaaatgtaattcagcaaaataatacagtactgccaccagattttttattacatcatttgaaaattagcagtatgcttaatgaaaatttgttcaggtataaatgagcagttaagatataaacaatttatgcatgctgtgacttagtctatggatttattccaaaattgcttagtcaccatgcagtgtctgtatttttatatatgtgttcatatatacataatgattataatacataataagaatgaggtggtattacattattcctaataatagggataatgctgtttattgtcaagaaaaagtaaaatcgttctcttcaattaatggcccttttattttgggaccaggcttttattttccctgatattatttctatttaatactcttttctctcaagaaaaaaaaaaaagttggtttttcctttatggtccttcatagcaggccaagtatggcctctctgcaatagacagctactgtcaatacatgctgtaattggacattctggggtcacagatataaggtatttaaaatctatttatgctttatagagaaaccagacattaaaacttcatgcactacttatttcgaattactgtaccttatccaaatttacacctagctattaggatcttcaacccaggtaacaggaataattctgtggtttcatttttctgtaaacaactgaaagaataattagatcatattctagtatgttctgaaatatctttaagactgatcttaaaaactaacttctaagatgatttcatcttctcatagtatagagtttactttgtacacgtttgaaaccaactactgtagaagatgaggaatctattgtaattttttgctttattttcatctgccagtggacttatttgaaattttcactttagtcaaattattttttgtattagtttttgatgcagacataaaaatagcaatcattttaaattgtcaaaatttccagattactggtaaaaattatttgaaaacaaacttatgggtaataaaggctagtcagaaccctataccataaagtgtagttaccatacagattaatatgtagcaaaaatgtatgcttgatatttctcaactgtgttaatttttctgctgtattccagctgaccaaaacaatattaagaatgcatctttataaatgggtgctaattgataatggaaataatttagtaatggactatacaggatgttaataatgaagccatatgtttatgtctggatttaaaaattttaaacaatcatttactatgtcatttttctttaccttgaagaacataaactgttatttcacttctacaaatcagcaagatattatttatggcaagaaatattccattgaaatattgtgctgtaacatgggaaagtgtaaatgtttttcatggtttctatcaatgtgaaataaaatttaattctga

SEQ ID NO: 10045 - DNA, 2406 bp, Homo sapiens
ggcccggaaggccaccgctgcggtgattttcctgcatggattgggagatactgggctggagtgcagggcatagtacgctcgtggctcagtacaactcccacctcagtctcccgagtagctggactagcacggatgggcagaagcctttgcaggtatcagaagttcacatatcaaatatatctgcccgcatgcgcctgttaggcctgttacattaaatatgaacgtggctatgccttcatggtttgatattattgggctttcaccagattcacaggaggatgaatctgggattaaacaggcagcagaaaatataaaagctttgattgatcaagaagtgaagaatggcattccttctaacagaattattttgggagggttttctcagggaggagctttatctttatatactgcccttaccacacagcagaaactggcaggtgtcactgcactcagttgctggcttccacttcgggcttcctttccacagggtcctatcggtggtgctaatagagatatttctattctccagtgccacggggattgtgaccctttggttcccctgatgtttggttctcttacggtggaaaaactaaaaacattggtgaatccagccaatgtgacctttaaaacctatgaaggtatgatgcacagttcgtgtcaacaggaaatgatggatgtcaagcaattcattgataaactcctacctccaattgattgacgtcactaagaggccttgtgtagaagtacaccagcatcattgtagtagagtgtaaaccttttcccatgcccagtcttcaaatttctaatgttttgcagtgttaaaatgttttgcaaatacatgccaataacacagatcaaataatatctcctcatgagaaatttatgatcttttaagtttctatacatgtattcttataagacgacccaggatctactatattagaatagatgaagcaggtagcttcttttttctcaaatgtaattcagcaaaataatacagtactgccaccagattttttattacatcatttgaaaattagcagtatgcttaatgaaaatttgttcaggtataaatgagcagttaagatataaacaatttatgcatgctgtgacttagtctatggatttattccaaaattgcttagtcaccatgcagtgtctgtatttttatatatgtgttcatatatacataatgattataatacataataagaatgaggtggtattacattattcctaataatagggataatgctgtttattgtcaagaaaaagtaaaatcgttctcttcaattaatggcccttttattttgggaccaggcttttattttccctgatattatttctatttaatactcttttctctcaagaaaaaaaaaaaagttggtttttcctttatggtccttcatagcaggccaagtatggcctctctgcaatagacagctactgtcaatacatgctgtaattggacattctggggtcacagatataaggtatttaaaatctatttatgctttatagagaaaccagacattaaaacttcatgcactacttatttcgaattactgtaccttatccaaatttacacctagctattaggatcttcaacccaggtaacaggaataattctgtggtttcatttttctgtaaacaactgaaagaataattagatcatattctagtatgttctgaaatatctttaagactgatcttaaaaactaacttctaagatgatttcatcttctcatagtatagagtttactttgtacacgtttgaaaccaactactgtagaagatgaggaatctattgtaattttttgctttattttcatctgccagtggacttatttgaaattttcactttagtcaaattattttttgtattagtttttgatgcagacataaaaatagcaatcattttaaattgtcaaaatttccagattactggtaaaaattatttgaaaacaaacttatgggtaataaaggctagtcagaaccctataccataaagtgtagttaccatacagattaatatgtagcaaaaatgtatgcttgatatttctcaactgtgttaatttttctgctgtattccagctgaccaaaacaatattaagaatgcatctttataaatgggtgctaattgataatggaaataatttagtaatggactatacaggatgttaataatgaagccatatgtttatgtctggatttaaaaattttaaacaatcatttactatgtcatttttctttaccttgaagaacataaactgttatttcacttctacaaatcagcaagatattatttatggcaagaaatattccattgaaatattgtgctgtaacatgggaaagtgtaaatgtttttcatggtttctatcaatgtgaaataaaatttaattctga

SEQ ID NO: 10046 - DNA, 2399 bp, Homo sapiens
cggcgggcgaggggcagggcagggcggaccctggacgcgcgggcgcgcgcggaaggtagcgcggggccgcgttggcgcgcacgcgcctgagcgtgcgcccggtggggccggccgggactcgccgctcgcacgcccttgggccgcggccgggcgcccgctcttccttccgcttgcgctgtgagctgaggcggtgtatgtgcggcaataacatgtcaaccccgctgcccgccatcgtgcccgccgcccggaaggccaccgctgcggtgattttcctgcatggattgggagatactgggcacggatgggcagaagcctttgcaggtatcagaagttcacatatcaaatatatctgcccgcatgcgcctgttaggcctgttacattaaatatgaacgtggctatgccttcatggtttgatattattgggctttcaccagattcacaggaggatgaatctgggattaaacaggcagcagaaaataggtcctatcggtggtgctaatagagatatttctattctccagtgccacggggattgtgaccctttggttcccctgatgtttggttctcttacggtggaaaaactaaaaacattggtgaatccagccaatgtgacctttaaaacctatgaaggtatgatgcacagttcgtgtcaacaggaaatgatggatgtcaagcaattcattgataaactcctacctccaattgattgacgtcactaagaggccttgtgtagaagtacaccagcatcattgtagtagagtgtaaaccttttcccatgcccagtcttcaaatttctaatgttttgcagtgttaaaatgttttgcaaatacatgccaataacacagatcaaataatatctcctcatgagaaatttatgatcttttaagtttctatacatgtattcttataagacgacccaggatctactatattagaatagatgaagcaggtagcttcttttttctcaaatgtaattcagcaaaataatacagtactgccaccagattttttattacatcatttgaaaattagcagtatgcttaatgaaaatttgttcaggtataaatgagcagttaagatataaacaatttatgcatgctgtgacttagtctatggatttattccaaaattgcttagtcaccatgcagtgtctgtatttttatatatgtgttcatatatacataatgattataatacataataagaatgaggtggtattacattattcctaataatagggataatgctgtttattgtcaagaaaaagtaaaatcgttctcttcaattaatggcccttttattttgggaccaggcttttattttccctgatattatttctatttaatactcttttctctcaagaaaaaaaaaaaagttggtttttcctttatggtccttcatagcaggccaagtatggcctctctgcaatagacagctactgtcaatacatgctgtaattggacattctggggtcacagatataaggtatttaaaatctatttatgctttatagagaaaccagacattaaaacttcatgcactacttatttcgaattactgtaccttatccaaatttacacctagctattaggatcttcaacccaggtaacaggaataattctgtggtttcatttttctgtaaacaactgaaagaataattagatcatattctagtatgttctgaaatatctttaagactgatcttaaaaactaacttctaagatgatttcatcttctcatagtatagagtttactttgtacacgtttgaaaccaactactgtagaagatgaggaatctattgtaattttttgctttattttcatctgccagtggacttatttgaaattttcactttagtcaaattattttttgtattagtttttgatgcagacataaaaatagcaatcattttaaattgtcaaaatttccagattactggtaaaaattatttgaaaacaaacttatgggtaataaaggctagtcagaaccctataccataaagtgtagttaccatacagattaatatgtagcaaaaatgtatgcttgatatttctcaactgtgttaatttttctgctgtattccagctgaccaaaacaatattaagaatgcatctttataaatgggtgctaattgataatggaaataatttagtaatggactatacaggatgttaataatgaagccatatgtttatgtctggatttaaaaattttaaacaatcatttactatgtcatttttctttaccttgaagaacataaactgttatttcacttctacaaatcagcaagatattatttatggcaagaaatattccattgaaatattgtgctgtaacatgggaaagtgtaaatgtttttcatggtttctatcaatgtgaaataaaatttaattctga

SEQ ID NO: 10047 - DNA, 1991 bp, Homo sapiens
  misc_feature (15)..(15): n is a, c, g, or t
  misc_feature (24)..(24): n is a, c, g, or t
  misc_feature (44)..(44): n is a, c, g, or t
  misc_feature (63)..(63): n is a, c, g, or t
  misc_feature (68)..(68): n is a, c, g, or t
acactggaattcggncattatggncgggcactggacttagttgntgggtggagtaggcgcttnctttnacagggtcctatcggtggtgctaatagagatatttctattctccagtgccacggggattgtgaccctttggttcccctgatgtttggttctcttacggtggaaaaactaaaaacattggtgaatccagccaatgtgacctttaaaacctatgaaggtatgatgcacagttcgtgtcaacaggaaatgatggatgtcaagcaattcattgataaactcctacctccaattgattgacgtcactaagaggccttgtgtagaagtacaccagcatcattgtagtagagtgtaaaccttttcccatgcccagtcttcaaatttctaatgttttgcagtgttaaaatgttttgcaaatacatgccaataacacagatcaaataatatctcctcatgagaaatttatgatcttttaagtttctatacatgtattcttataagacgacccaggatctactatattagaatagatgaagcaggtagcttcttttttctcaaatgtaattcagcaaaataatacagtactgccaccagattttttattacatcatttgaaaattagcagtatgcttaatgaaaatttgttcaggtataaatgagcagttaagatataaacaatttatgcatgctgtgacttagtctatggatttattccaaaattgcttagtcaccatgcagtgtctgtatttttatatatgtgttcatatatacataatgattataatacataataagaatgaggtggtattacattattcctaataatagggataatgctgtttattgtcaagaaaaagtaaaatcgttctcttcaattaatggcccttttattttgggaccaggcttttattttccctgatattatttctatttaatactcttttctctcaagaaaaaaaaaaaagttggtttttcctttatggtccttcatagcaggccaagtatggcctctctgcaatagacagctactgtcaatacatgctgtaattggacattctggggtcacagatataaggtatttaaaatctatttatgctttatagagaaaccagacattaaaacttcatgcactacttatttcgaattactgtaccttatccaaatttacacctagctattaggatcttcaacccaggtaacaggaataattctgtggtttcatttttctgtaaacaactgaaagaataattagatcatattctagtatgttctgaaatatctttaagactgatcttaaaaactaacttctaagatgatttcatcttctcatagtatagagtttactttgtacacgtttgaaaccaactactgtagaagatgaggaatctattgtaattttttgctttattttcatctgccagtggacttatttgaaattttcactttagtcaaattattttttgtattagtttttgatgcagacataaaaatagcaatcattttaaattgtcaaaatttccagattactggtaaaaattatttgaaaacaaacttatgggtaataaaggctagtcagaaccctataccataaagtgtagttaccatacagattaatatgtagcaaaaatgtatgcttgatatttctcaactgtgttaatttttctgctgtattccagctgaccaaaacaatattaagaatgcatctttataaatgggtgctaattgataatggaaataatttagtaatggactatacaggatgttaataatgaagccatatgtttatgtctggatttaaaaattttaaacaatcatttactatgtcatttttctttaccttgaagaacataaactgttatttcacttctacaaatcagcaagatattatttatggcaagaaatattccattgaaatattgtgctgtaacatgggaaagtgtaaatgtttttcatggtttctatcaatgtgaaataaaatttaattctga

SEQ ID NO: 10048 - DNA, 2533 bp, Homo sapiens
cggcgggcgaggggcagggcagggcggaccctggacgcgcgggcgcgcgcggaaggtagcgcggggccgcgttggcgcgcacgcgcctgagcgtgcgcccggtggggccggccgggactcgccgctcgcacgcccttgggccgcggccgggcgcccgctcttccttccgcttgcgctgtgagctgaggcggtgtatgtgcggcaataacatgtcaaccccgctgcccgccatcgtgcccgccgcccggaaggccaccgctgcggtgattttcctgcatggattgggagatactgggcacggatgggcagaagcctttgcaggtatcagaagttcacatatcaaatatatctgcccgcatgcgcctgttaggcctgttacattaaatatgaacgtggctatgccttcatggtttgatattattgggctttcaccagattcacaggaggatgaatctgggattaaacaggcagcagaaaatataaaagctttgattgatcaagaagtgaagaatggcattccttctaacagaattattttgggagggttttctcagggaggagctttatctttatatactgcccttaccacacagcagaaactggcaggtgtcactgcactcagttgctggcttccacttcgggcttcctttccacagtgccacggggattgtgaccctttggttcccctgatgtttggttctcttacggtggaaaaactaaaaacattggtgaatccagccaatgtgacctttaaaacctatgaaggtatgatgcacagttcgtgtcaacaggaaatgatggatgtcaagcaattcattgataaactcctacctccaattgattgacgtcactaagaggccttgtgtagaagtacaccagcatcattgtagtagagtgtaaaccttttcccatgcccagtcttcaaatttctaatgttttgcagtgttaaaatgttttgcaaatacatgccaataacacagatcaaataatatctcctcatgagaaatttatgatcttttaagtttctatacatgtattcttataagacgacccaggatctactatattagaatagatgaagcaggtagcttcttttttctcaaatgtaattcagcaaaataatacagtactgccaccagattttttattacatcatttgaaaattagcagtatgcttaatgaaaatttgttcaggtataaatgagcagttaagatataaacaatttatgcatgctgtgacttagtctatggatttattccaaaattgcttagtcaccatgcagtgtctgtatttttatatatgtgttcatatatacataatgattataatacataataagaatgaggtggtattacattattcctaataatagggataatgctgtttattgtcaagaaaaagtaaaatcgttctcttcaattaatggcccttttattttgggaccaggcttttattttccctgatattatttctatttaatactcttttctctcaagaaaaaaaaaaaagttggtttttcctttatggtccttcatagcaggccaagtatggcctctctgcaatagacagctactgtcaatacatgctgtaattggacattctggggtcacagatataaggtatttaaaatctatttatgctttatagagaaaccagacattaaaacttcatgcactacttatttcgaattactgtaccttatccaaatttacacctagctattaggatcttcaacccaggtaacaggaataattctgtggtttcatttttctgtaaacaactgaaagaataattagatcatattctagtatgttctgaaatatctttaagactgatcttaaaaactaacttctaagatgatttcatcttctcatagtatagagtttactttgtacacgtttgaaaccaactactgtagaagatgaggaatctattgtaattttttgctttattttcatctgccagtggacttatttgaaattttcactttagtcaaattattttttgtattagtttttgatgcagacataaaaatagcaatcattttaaattgtcaaaatttccagattactggtaaaaattatttgaaaacaaacttatgggtaataaaggctagtcagaaccctataccataaagtgtagttaccatacagattaatatgtagcaaaaatgtatgcttgatatttctcaactgtgttaatttttctgctgtattccagctgaccaaaacaatattaagaatgcatctttataaatgggtgctaattgataatggaaataatttagtaatggactatacaggatgttaataatgaagccatatgtttatgtctggatttaaaaattttaaacaatcatttactatgtcatttttctttaccttgaagaacataaactgttatttcacttctacaaatcagcaagatattatttatggcaagaaatattccattgaaatattgtgctgtaacatgggaaagtgtaaatgtttttcatggtttctatcaatgtgaaataaaatttaattctga

SEQ ID NO: 10049 - DNA, 2148 bp, Homo sapiens
aaaagattttgccttattttacaggtttgatattattgggctttcaccagattcacaggaggatgaatctgggattaaacaggcagcagaaaatataaaagctttgattgatcaagaagtgaagaatggcattccttctaacagaattattttgggagggttttctcagggaggagctttatctttatatactgcccttaccacacagcagaaactggcaggtgtcactgcactcagttgctggcttccacttcgggcttcctttccacagtgccacggggattgtgaccctttggttcccctgatgtttggttctcttacggtggaaaaactaaaaacattggtgaatccagccaatgtgacctttaaaacctatgaaggtatgatgcacagttcgtgtcaacaggaaatgatggatgtcaagcaattcattgataaactcctacctccaattgattgacgtcactaagaggccttgtgtagaagtacaccagcatcattgtagtagagtgtaaaccttttcccatgcccagtcttcaaatttctaatgttttgcagtgttaaaatgttttgcaaatacatgccaataacacagatcaaataatatctcctcatgagaaatttatgatcttttaagtttctatacatgtattcttataagacgacccaggatctactatattagaatagatgaagcaggtagcttcttttttctcaaatgtaattcagcaaaataatacagtactgccaccagattttttattacatcatttgaaaattagcagtatgcttaatgaaaatttgttcaggtataaatgagcagttaagatataaacaatttatgcatgctgtgacttagtctatggatttattccaaaattgcttagtcaccatgcagtgtctgtatttttatatatgtgttcatatatacataatgattataatacataataagaatgaggtggtattacattattcctaataatagggataatgctgtttattgtcaagaaaaagtaaaatcgttctcttcaattaatggcccttttattttgggaccaggcttttattttccctgatattatttctatttaatactcttttctctcaagaaaaaaaaaaaagttggtttttcctttatggtccttcatagcaggccaagtatggcctctctgcaatagacagctactgtcaatacatgctgtaattggacattctggggtcacagatataaggtatttaaaatctatttatgctttatagagaaaccagacattaaaacttcatgcactacttatttcgaattactgtaccttatccaaatttacacctagctattaggatcttcaacccaggtaacaggaataattctgtggtttcatttttctgtaaacaactgaaagaataattagatcatattctagtatgttctgaaatatctttaagactgatcttaaaaactaacttctaagatgatttcatcttctcatagtatagagtttactttgtacacgtttgaaaccaactactgtagaagatgaggaatctattgtaattttttgctttattttcatctgccagtggacttatttgaaattttcactttagtcaaattattttttgtattagtttttgatgcagacataaaaatagcaatcattttaaattgtcaaaatttccagattactggtaaaaattatttgaaaacaaacttatgggtaataaaggctagtcagaaccctataccataaagtgtagttaccatacagattaatatgtagcaaaaatgtatgcttgatatttctcaactgtgttaatttttctgctgtattccagctgaccaaaacaatattaagaatgcatctttataaatgggtgctaattgataatggaaataatttagtaatggactatacaggatgttaataatgaagccatatgtttatgtctggatttaaaaattttaaacaatcatttactatgtcatttttctttaccttgaagaacataaactgttatttcacttctacaaatcagcaagatattatttatggcaagaaatattccattgaaatattgtgctgtaacatgggaaagtgtaaatgtttttcatggtttctatcaatgtgaaataaaatttaattctga

SEQ ID NO: 10050 - DNA, 2476 bp, Homo sapiens
tgatctagaggatcctccgatgtgaaataggtaggtgtggtggcatgcactgtggtcccagctacttggaaggctgaggtggaaggatcacctgatcccaggagatcaaggctgcagtggtccatgattatgctatagcatttcggcactggcgattgtgaaataggtaggtgagaaaactgagccaaatgcaagaggctaagaggagaaagtttcttctatgataaatctttggtatattaatgttcatatcttcccaggaacatcttaggtacatgctctctatcaaatggttagttgtatgtaattctttatgaaagacacagcatagttaatgctatggatttagcgcataattcagtttgaagaatggtagaagctctgctttgtcactcatacttagttgtcagtaattgttcacttactgagacttctcagtgtaggcaccatcgcttctaaacttccctgccccccagtgtcttatattgttccagtataggaagatgcagaactagatactggatgggagctgtcatttcagtgtacaataatcatgataggaaatgtcctgaaatttctgttggagcctcatttctcttttgtcttatttaattgtagtaaaaatgtgatttcgcctttatgcataccatagatttgattagtggcattttagtgggaatttaatttctgacttacataactacctacctattaaattactttattccaaacaggaaatgatggatgtcaagcaattcattgataaactcctacctccaattgattgacgtcactaagaggccttgtgtagaagtacaccagcatcattgtagtagagtgtaaaccttttcccatgcccagtcttcaaatttctaatgttttgcagtgttaaaatgttttgcaaatacatgccaataacacagatcaaataatatctcctcatgagaaatttatgatcttttaagtttctatacatgtattcttataagacgacccaggatctactatattagaatagatgaagcaggtagcttcttttttctcaaatgtaattcagcaaaataatacagtactgccaccagattttttattacatcatttgaaaattagcagtatgcttaatgaaaatttgttcaggtataaatgagcagttaagatataaacaatttatgcatgctgtgacttagtctatggatttattccaaaattgcttagtcaccatgcagtgtctgtatttttatatatgtgttcatatatacataatgattataatacataataagaatgaggtggtattacattattcctaataatagggataatgctgtttattgtcaagaaaaagtaaaatcgttctcttcaattaatggcccttttattttgggaccaggcttttattttccctgatattatttctatttaatactcttttctctcaagaaaaaaaaaaaagttggtttttcctttatggtccttcatagcaggccaagtatggcctctctgcaatagacagctactgtcaatacatgctgtaattggacattctggggtcacagatataaggtatttaaaatctatttatgctttatagagaaaccagacattaaaacttcatgcactacttatttcgaattactgtaccttatccaaatttacacctagctattaggatcttcaacccaggtaacaggaataattctgtggtttcatttttctgtaaacaactgaaagaataattagatcatattctagtatgttctgaaatatctttaagactgatcttaaaaactaacttctaagatgatttcatcttctcatagtatagagtttactttgtacacgtttgaaaccaactactgtagaagatgaggaatctattgtaattttttgctttattttcatctgccagtggacttatttgaaattttcactttagtcaaattattttttgtattagtttttgatgcagacataaaaatagcaatcattttaaattgtcaaaatttccagattactggtaaaaattatttgaaaacaaacttatgggtaataaaggctagtcagaaccctataccataaagtgtagttaccatacagattaatatgtagcaaaaatgtatgcttgatatttctcaactgtgttaatttttctgctgtattccagctgaccaaaacaatattaagaatgcatctttataaatgggtgctaattgataatggaaataatttagtaatggactatacaggatgttaataatgaagccatatgtttatgtctggatttaaaaattttaaacaatcatttactatgtcatttttctttaccttgaagaacataaactgttatttcacttctacaaatcagcaagatattatttatggcaagaaatattccattgaaatattgtgctgtaacatgggaaagtgtaaatgtttttcatggtttctatcaatgtgaaataaaatttaattctga

SEQ ID NO: 10051 - DNA, 2513 bp, Homo sapiens
cggcgggcgaggggcagggcagggcggaccctggacgcgcgggcgcgcgcggaaggtagcgcggggccgcgttggcgcgcacgcgcctgagcgtgcgcccggtggggccggccgggactcgccgctcgcacgcccttgggccgcggccgggcgcccgctcttccttccgcttgcgctgtgagctgaggcggtgtatgtgcggcaataacatgtcaaccccgctgcccgccatcgtgcccgccgcccggaaggccaccgctgcggtgattttcctgcatggattgggagatactgggcacggatgggcagaagcctttgcaggtatcagaagttcacatatcaaatatatctgcccgcatgcgcctgttaggcctgttacattaaatatgaacgtggctatgccttcatggtttgatattattgggctttcaccagattcacaggaggatgaatctgggattaaacaggcagcagaaaatataaaagctttgattgatcaagaagtgaagaatggcattccttctaacagaattattttgggagggttttctcagggaggagctttatctttatatactgcccttaccacacagcagaaactggcaggtgtcactgcactcagttgctggcttccacttcgggcttcctttccacagggtcctatcggtggtgctaatagagatatttctattctccagtgccacggggattgtgaccctttggttcccctgatgtttggttctcttacggtggaaaaactaaaaacattggtgaatccagccaatgtgacctttaaaacctatgaaggtatgatgcacagttcgtgtcaacaggaaatgatggatgtcaagcaattcattgataaactcctacctccaattgattgacgtcactaagaggccttgtgtagaagtacaccagcatcattgtagtagagtgtaaaccttttcccatgcccagtcttcaaatttctaatgttttgcagtgttaaaatgttttgcaaatacatgccaataacacagatcaaataatatctcctcatgagaaatttatgatcttttaagtttctatacatgtattcttataagacgacccaggatctactatattagaatagatgaagcaggtagcttcttttttctcaaatgtaattcagcaaaataatacagtactgccaccagattttttattacatcatttgaaaattagcagtatgcttaatgaaaatttgttcaggtataaatgagcagttaagatataaacaatttatgcatgctgtgacttagtctatggatttattccaaaattgcttagtcaccatgcagtgtctgtatttttatatatgtgttcatatatacataatgattataatacataataagaatgaggtggtattacattattcctaataatagggataatgctgtttattgtcaagaaaaagtaaaatcgttctcttcaattaatggcccttttattttgggaccaggcttttattttccctgatattatttctatttaatactcttttctctcaatgcaatagacagctactgtcaatacatgctgtaattggacattctggggtcacagatataaggtatttaaaatctatttatgctttatagagaaaccagacattaaaacttcatgcactacttatttcgaattactgtaccttatccaaatttacacctagctattaggatcttcaacccaggtaacaggaataattctgtggtttcatttttctgtaaacaactgaaagaataattagatcatattctagtatgttctgaaatatctttaagactgatcttaaaaactaacttctaagatgatttcatcttctcatagtatagagtttactttgtacacgtttgaaaccaactactgtagaagatgaggaatctattgtaattttttgctttattttcatctgccagtggacttatttgaaattttcactttagtcaaattattttttgtattagtttttgatgcagacataaaaatagcaatcattttaaattgtcaaaatttccagattactggtaaaaattatttgaaaacaaacttatgggtaataaaggctagtcagaaccctataccataaagtgtagttaccatacagattaatatgtagcaaaaatgtatgcttgatatttctcaactgtgttaatttttctgctgtattccagctgaccaaaacaatattaagaatgcatctttataaatgggtgctaattgataatggaaataatttagtaatggactatacaggatgttaataatgaagccatatgtttatgtctggatttaaaaattttaaacaatcatttactatgtcatttttctttaccttgaagaacataaactgttatttcacttctacaaatcagcaagatattatttatggcaagaaatattccattgaaatattgtgctgtaacatgggaaagtgtaaatgtttttcatggtttctatcaatgtgaaataaaatttaattctga

SEQ ID NO: 10052 - DNA, 1461 bp, Homo sapiens
  misc_feature (7)..(7): n is a, c, g, or t
gcactgntgcctgcagtcgctctagaggatccccgaatccagcaaaataatacagtactgccaccagattttttattacatcatttgaaaattagcagtatgcttaatgaaaatttgttcaggtataaatgagcagttaagatataaacaatttatgcatgctgtgacttagtctatggatttattccaaaattgcttagtcaccatgcagtgtctgtatttttatatatgtgttcatatatacataatgattataatacataataagaatgaggtggtattacattattcctaataatagggataatgctgtttattgtcaagaaaaagtaaaatcgttctcttcaattaatggcccttttattttgggaccaggcttttattttccctgatattatttctatttaatactcttttctctcaagaaaaaaaaaaaagttggtttttcctttatggtccttcatagcaggccaagtatggcctctctgcaatagacagctactgtcaatacatgctgtaattggacattctggggtcacagatataaggtatttaaaatctatttatgctttatagagaaaccagacattaaaacttcatgcactacttatttcgaattactgtaccttatccaaatttacacctagctattaggatcttcaacccaggtaacaggaataattctgtggtttcatttttctgtaaacaactgaaagaataattagatcatattctagtatgttctgaaatatctttaagactgatcttaaaaactaacttctaagatgatttcatcttctcatagtatagagtttactttgtacacgtttgaaaccaactactgtagaagatgaggaatctattgtaattttttgctttattttcatctgccagtggacttatttgaaattttcactttagtcaaattattttttgtattagtttttgatgcagacataaaaatagcaatcattttaaattgtcaaaatttccagattactggtaaaaattatttgaaaacaaacttatgggtaataaaggctagtcagaaccctataccataaagtgtagttaccatacagattaatatgtagcaaaaatgtatgcttgatatttctcaactgtgttaatttttctgctgtattccagctgaccaaaacaatattaagaatgcatctttataaatgggtgctaattgataatggaaataatttagtaatggactatacaggatgttaataatgaagccatatgtttatgtctggatttaaaaattttaaacaatcatttactatgtcatttttctttaccttgaagaacataaactgttatttcacttctacaaatcagcaagatattatttatggcaagaaatattccattgaaatattgtgctgtaacatgggaaagtgtaaatgtttttcatggtttctatcaatgtgaaataaaatttaattctga

SEQ ID NO: 10053 - DNA, 1431 bp, Homo sapiens
  misc_feature (17)..(18): n is a, c, g, or t
gagcggtgctcctcaanntaccgcaaatatacgtacgccccgattatccatcatttgaaaattagcagtatgcttaatgaaaatttgttcaggtataaatgagcagttaagatataaacaatttatgcatgctgtgacttagtctatggatttattccaaaattgcttagtcaccatgcagtgtctgtatttttatatatgtgttcatatatacataatgattataatacataataagaatgaggtggtattacattattcctaataatagggataatgctgtttattgtcaagaaaaagtaaaatcgttctcttcaattaatggcccttttattttgggaccaggcttttattttccctgatattatttctatttaatactcttttctctcaagaaaaaaaaaaaagttggtttttcctttatggtccttcatagcaggccaagtatggcctctctgcaatagacagctactgtcaatacatgctgtaattggacattctggggtcacagatataaggtatttaaaatctatttatgctttatagagaaaccagacattaaaacttcatgcactacttatttcgaattactgtaccttatccaaatttacacctagctattaggatcttcaacccaggtaacaggaataattctgtggtttcatttttctgtaaacaactgaaagaataattagatcatattctagtatgttctgaaatatctttaagactgatcttaaaaactaacttctaagatgatttcatcttctcatagtatagagtttactttgtacacgtttgaaaccaactactgtagaagatgaggaatctattgtaattttttgctttattttcatctgccagtggacttatttgaaattttcactttagtcaaattattttttgtattagtttttgatgcagacataaaaatagcaatcattttaaattgtcaaaatttccagattactggtaaaaattatttgaaaacaaacttatgggtaataaaggctagtcagaaccctataccataaagtgtagttaccatacagattaatatgtagcaaaaatgtatgcttgatatttctcaactgtgttaatttttctgctgtattccagctgaccaaaacaatattaagaatgcatctttataaatgggtgctaattgataatggaaataatttagtaatggactatacaggatgttaataatgaagccatatgtttatgtctggatttaaaaattttaaacaatcatttactatgtcatttttctttaccttgaagaacataaactgttatttcacttctacaaatcagcaagatattatttatggcaagaaatattccattgaaatattgtgctgtaacatgggaaagtgtaaatgtttttcatggtttctatcaatgtgaaataaaatttaattctga

SEQ ID NO: 10054 - DNA, 1418 bp, Homo sapiens
tataaatgagcagttaagatataaacaatttatgcctgaacaaatttttcattaagcagcttaatgaaaatttgttcaggtataaatgagcagttaagatataaacaatttatgcatgctgtgacttagtctatggatttattccaaaattgcttagtcaccatgcagtgtctgtatttttatatatgtgttcatatatacataatgattataatacataataagaatgaggtggtattacattattcctaataatagggataatgctgtttattgtcaagaaaaagtaaaatcgttctcttcaattaatggcccttttattttgggaccaggcttttattttccctgatattatttctatttaatactcttttctctcaagaaaaaaaaaaaagttggtttttcctttatggtccttcatagcaggccaagtatggcctctctgcaatagacagctactgtcaatacatgctgtaattggacattctggggtcacagatataaggtatttaaaatctatttatgctttatagagaaaccagacattaaaacttcatgcactacttatttcgaattactgtaccttatccaaatttacacctagctattaggatcttcaacccaggtaacaggaataattctgtggtttcatttttctgtaaacaactgaaagaataattagatcatattctagtatgttctgaaatatctttaagactgatcttaaaaactaacttctaagatgatttcatcttctcatagtatagagtttactttgtacacgtttgaaaccaactactgtagaagatgaggaatctattgtaattttttgctttattttcatctgccagtggacttatttgaaattttcactttagtcaaattattttttgtattagtttttgatgcagacataaaaatagcaatcattttaaattgtcaaaatttccagattactggtaaaaattatttgaaaacaaacttatgggtaataaaggctagtcagaaccctataccataaagtgtagttaccatacagattaatatgtagcaaaaatgtatgcttgatatttctcaactgtgttaatttttctgctgtattccagctgaccaaaacaatattaagaatgcatctttataaatgggtgctaattgataatggaaataatttagtaatggactatacaggatgttaataatgaagccatatgtttatgtctggatttaaaaattttaaacaatcatttactatgtcatttttctttaccttgaagaacataaactgttatttcacttctacaaatcagcaagatattatttatggcaagaaatattccattgaaatattgtgctgtaacatgggaaagtgtaaatgtttttcatggtttctatcaatgtgaaataaaatttaattctga

SEQ ID NO: 10055 - DNA, 1281 bp, Homo sapiens
cggcgggcgaggggcagggcagggcggaccctggacgcgcgggcgcgcgcggaaggtagcgcggggccgcgttggcgcgcacgcgcctgagcgtgcgcccggtggggccggccgggactcgccgctcgcacgcccttgggccgcggccgggcgcccgctcttccttccgcttgcgctgtgagctgaggcggtgtatgtgcggcaataacatgtcaaccccgctgcccgccatcgtgcccgccgcccggaaggccaccgctgcggtgattttcctgcatggattgggagatactgggcacggatgggcagaagcctttgcaggtatcagaagttcacatatcaaatatatctgcccgcatgcgcctgttaggcctgttacattaaatatgaacgtggctatgccttcatggtttgatattattgggctttcaccagattcacaggaggatgaatctgggattaaacaggcagcagaaaatataaaagctttgattgatcaagaagtgaagaatggcattccttctaacagaattattttgggagggttttctcagggaggagctttatctttatatactgcccttaccacacagcagaaactggcaggtgtcactgcactcagttgctggcttccacttcgggcttcctttccacagggtcctatcggtggtgctaatagagatatttctattctccagtgccacggggattgtgaccctttggttcccctgatgtttggttctcttacggtggaaaaactaaaaacattggtgaatccagccaatgtgacctttaaaacctatgaaggtatgatgcacagttcgtgtcaacaggaaatgatggatgtcaagcaattcattgataaactcctacctccaattgattgacgtcactaagaggccttgtgtagaagtacaccagcatcattgtagtagagtgtaaaccttttcccatgcccagtcttcaaatttctaatgttttgcagtgtagaaattgaactggatgcgagatagtagtagggtcgtggtgctggagtttaagttgagtagtaggaatgcggtagtagttaggataatataaatagttaaattaagaatgggttatgttagggttgtacggtagaactgctattattcatcctattgtgggtaattgagggagtatgctaagattttgcgtagctggggtttggttttaatcccacctcaaatgcctgctatgatggataagattgagagagtgaggagaaggcttacgtctagtgagggtgtagaaattgaa

SEQ ID NO: 10056 - DNA, 1040 bp, Homo sapiens
cggcgggcgaggggcagggcagggcggaccctggacgcgcgggcgcgcgcggaaggtagcgcggggccgcgttggcgcgcacgcgcctgagcgtgcgcccggtggggccggccgggactcgccgctcgcacgcccttgggccgcggccgggcgcccgctcttccttccgcttgcgctgtgagctgaggcggtgtatgtgcggcaataacatgtcaaccccgctgcccgccatcgtgcccgccgcccggaaggccaccgctgcggtgattttcctgcatggattgggagatactgggcacggatgggcagaagcctttgcaggtatcagaagttcacatatcaaatatatctgcccgcatgcgcctgttaggcctgttacattaaatatgaacgtggctatgccttcatggtttgatattattgggctttcaccagattcacaggaggatgaatctgggattaaacaggcagcagaaaatataaaagctttgattgatcaagaagtgaagaatggcattccttctaacagaattattttgggagggttttctcaggtgtagccacacagagagtgactggtggtcatcgaatcccatttccacagtgccaggagaaaacatcactgcctgggatgtgaaaggctctcgtgtactcatgtgttgcagtaacccatggggcatggtcagagtgatggggcttctggatgctggcaggagtacagcttccagaatgtgggatgttgtgagctgggtaggcagatactctgaaggtgtctgctaaatagttattattatcttaaattctcatttagaaagtaataccaaatttaaggggccaggcaacggtgggctcacaccctgtaatcccaacactttgggaaggctgaggcgcgtggattcacctgaaggtcgggacgtttgagaaccaggcttaagcaacatggaggaaaaccccgggtttctaccaaggattcaacattacgcgggtgtggtggtgcatgctgttaatcccagtaaatccggaggctgaaggcgagaatc

SEQ ID NO: 10057 - DNA, 811 bp, Homo sapiens
tgatctagaggatcctccgatgtgaaataggtaggtgtggtggcatgcactgtggtcccagctacttggaaggctgaggtggaaggatcacctgatcccaggagatcaaggctgcagtggtccatgattatgctatagcatttcggcactggcgattgtgaaataggtaggtgagaaaactgagccaaatgcaagaggctaagaggagaaagtttcttctatgataaatctttggtatattaatgttcatatcttcccaggaacatcttaggtacatgctctctatcaaatggttagttgtatgtaattctttatgaaagacacagcatagttaatgctatggatttagcgcataattcagtttgaagaatggtagaagctctgctttgtcactcatacttagttgtcagtaattgttcacttactgagacttctcagtgtaggcaccatcgcttctaaacttccctgccccccagtgtcttatattgttccagtataggaagatgcagaactagatactggatgggagctgtcatttcagtgtacaataatcatgataggaaatgtcctgaaatttctgttggagcctcatttctcttttgtcttatttaattgtagtaaaaatgtgatttcgcctttatgcataccatagatttgattagtggcattttagtgggaatttaatttctgacttacataactacctacctatttcacaatcgccagagatttcctgcatacattaaaaaagacaggcttgtttttctactatatatcccgagcacctagcaacactacctggcccaatcta

SEQ ID NO: 10058 - DNA, 2964 bp, Homo sapiens
cggcgggcgaggggcagggcagggcggaccctggacgcgcgggcgcgcgcggaaggtagcgcggggccgcgttggcgcgcacgcgcctgagcgtgcgcccggtggggccggccgggactcgccgctcgcacgcccttgggccgcggccgggcgcccgctcttccttccgcttgcgctgtgagctgaggcggtgtatgtgcggcaataacatgtcaaccccgctgcccgccatcgtgcccgccgcccggaaggccaccgctgcggtgattttcctgcatggattgggagatactgggcacggatgggcagaagcctttgcaggtatcagaagttcacatatcaaatatatctgcccgcatgcgcctgttaggcctgttacattaaatatgaacgtggctatgccttcatggtttgatattattgggctttcaccagattcacaggaggatgaatctgggattaaacaggcagcagaaaatataaaagctttgattgatcaagaagtgaagaatggcattccttctaacagaattattttgggagggttttctcagggaggagctttatctttatatactgcccttaccacacagcagaaactggcaggtgtcactgcactcagttgctggcttccacttcgggcttcctttccacagggtcctatcggtggtgctaatagagatatttctattctccagtgccacggggattgtgaccctttggttcccctgatgtttggttctcttacggtggaaaaactaaaaacattggtgaatccagccaatgtgacctttaaaacctatgaaggtatgatgcacagttcgtgtcaacaggaaatgatggatgtcaagcaattcattgataaactcctacctccaattgattgacgtcactaagaggccttgtgtagaagtacaccagcatcattgtagtagagtgtaaaccttttcccatgcccagtcttcaaatttctaatgttttgcagtgttaaaatgttttgcaaatacatgccaataacacagatcaaataatatctcctcatgagaaatttatgatcttttaagtttctatacatgtattcttataagacgacccaggatctactatattagaatagatgaagcaggtagcttcttttttctcaaatgtaattcagcaaaataatacagtactgccaccagattttttattacatcatttgaaaattagcagtatgcttaatgaaaatttgttcaggtataaatgagcagttaagatataaacaatttatgcatgctgtgacttagtctatggatttattccaaaattgcttagtcaccatgcagtgtctgtatttttatatatgtgttcatatatacataatgattataatacataataagaatgaggtggtattacattattcctaataatagggataatgctgtttattgtcaagaaaaagtaaaatcgttctcttcaattaatggcccttttattttgggaccaggcttttattttccctgatattatttctatttaatactcttttctctcaagaaaaaaaaaaaagttggtttttcctttatggtccttcatagcaggccaagtatggcctctctgcaatagacagctactgtcaatacatgctgtaattggacattctggggtcacagatataaggtatttaaaatctatttatgctttatagagaaaccagacattaaaacttcatgcactacttatttcgaattactgtaccttatccaaatttacacctagctattaggatcttcaacccaggtaacaggaataattctgtggtttcatttttctgtaaacaactgaaagaataattagatcatattctagtatgttctgaaatatctttaagactgatcttaaaaactaacttctaagatgatttcatcttctcatagtatagagtttactttgtacacgtttgaaaccaactactgtagaagatgaggaatctattgtaattttttgctttattttcatctgccagtggacttatttgaaattttcactttagtcaaattattttttgtattagtttttgatgcagacataaaaatagcaatcattttaaattgtcaaaatttccagattactggtaaaaattatttgaaaacaaacttatgggtaataaaggctagtcagaaccctataccataaagtgtagttaccatacagattaatatgtagcaaaaatgtatgcttgatatttctcaactgtgttaatttttctgctgtattccagctgaccaaaacaatattaagaatgcatctttataaatgggtgctaattgataatggaaataatttagtaatggactatacaggatgttaataatgaagccatatgtttatgtctggatttaaaaattttaaacaatcatttactatgtcatttttctttaccttgaagaacataaactgttatttcacttctacaaatcagcaagatattatttatggcaagaaatattccattgaaatattgtgctgtaacatgggaaagtgtaaatgtttttcatggtttctatcaatgtgaaataaaatttaattctgaaaaaaaaaaaaaaaaaaaaaaaaaaaaaaaaaaaaaaaaaaaaaagaaaaaaaaaaacgaccaaagaaaaaaaaaaaaaaaaaggggaggggaagaaaaaaaaaaaacaagcgagaggaacacaaaagaacagaaaaaaatagaagcaaacagcatcagcaaagaagaacataaataaagaaagagaaaggaagaaaagaaaaaaagtagagaaaaaacaaaaccacagagaacgataagtgagaaaaaacacaaaacagagaggaaggaaaatagaggaaaaaaacacagagcgaaagaacacaggaagagaaaaaaaaaaagaagagcaaacagaagaacaacacgaaacaacagaggggaaagaaaaaaacgagagaaaacaaagc

SEQ ID NO: 10059 - DNA, 2531 bp, Homo sapiens
cggcgggcgaggggcagggcagggcggaccctggacgcgcgggcgcgcgcggaaggtagcgcggggccgcgttggcgcgcacgcgcctgagcgtgcgcccggtggggccggccgggactcgccgctcgcacgcccttgggccgcggccgggcgcccgctcttccttccgcttgcgctgtgagctgaggcggtgtatgtgcggcaataacatgtcaaccccgctgcccgccatcgtgcccgccgcccggaaggccaccgctgcgttttcctgcatggattgggagatactgggcacggatgggcagaagcctttgcaggcctgttaggcctgttacattaaatatgaacgtggctatgccttcatggtttgatattattgggctttcaccagattcacaggaggatgaatctgggattaaacaggcagcagaaaatataaaagctttgattgatcaagaagtgaagaatggcattccttctaacagaattattttgggagggttttctcagggaggagctttatctttatatactgcccttaccacacagcagaaactggcaggtgtcactgcactcagttgctggcttccacttcgggcttcctttccacagggtcctatcggtggtgctaatagagatatttctattctccagtgccacggggattgtgaccctttggttcccctgatgtttggttctcttacggtggaaaaactaaaaacattggtgaatccagccaatgtgacctttaaaacctatgaaggtatgatgcacagttcgtgtcaacaggaaatgatggatgtcaagcaattcattgataaactcctacctccaattgattgacgtcactaagaggccttgtgtagaagtacaccagcatcattgtagtagagtgtaaaccttttcccatgcccagtcttcaaatttctaatgttttgcagtgttaaaatgttttgcaaatacatgccaataacacagatcaaataatatctcctcatgagaaatttatgatcttttaagtttctatacatgtattcttataagacgacccaggatctactatattagaatagatgaagcaggtagcttcttttttctcaaatgtaattcagcaaaataatacagtactgccaccagattttttattacatcatttgaaaattagcagtatgcttaatgaaaatttgttcaggtataaatgagcagttaagatataaacaatttatgcatgctgtgacttagtctatggatttattccaaaattgcttagtcaccatgcagtgtctgtatttttatatatgtgttcatatatacataatgattataatacataataagaatgaggtggtattacattattcctaataatagggataatgctgtttattgtcaagaaaaagtaaaatcgttctcttcaattaatggcccttttattttgggaccaggcttttattttccctgatattatttctatttaatactcttttctctcaagaaaaaaaaaaaagttggtttttcctttatggtccttcatagcaggccaagtatggcctctctgcaatagacagctactgtcaatacatgctgtaattggacattctggggtcacagatataaggtatttaaaatctatttatgctttatagagaaaccagacattaaaacttcatgcactacttatttcgaattactgtaccttatccaaatttacacctagctattaggatcttcaacccaggtaacaggaataattctgtggtttcatttttctgtaaacaactgaaagaataattagatcatattctagtatgttctgaaatatctttaagactgatcttaaaaactaacttctaagatgatttcatcttctcatagtatagagtttactttgtacacgtttgaaaccaactactgtagaagatgaggaatctattgtaattttttgctttattttcatctgccagtggacttatttgaaattttcactttagtcaaattattttttgtattagtttttgatgcagacataaaaatagcaatcattttaaattgtcaaaatttccagattactggtaaaaattatttgaaaacaaacttatgggtaataaaggctagtcagaaccctataccataaagtgtagttaccatacagattaatatgtagcaaaaatgtatgcttgatatttctcaactgtgttaatttttctgctgtattccagctgaccaaaacaatattaagaatgcatctttataaatgggtgctaattgataatggaaataatttagtaatggactatacaggatgttaataatgaagccatatgtttatgtctggatttaaaaattttaaacaatcatttactatgtcatttttctttaccttgaagaacataaactgttatttcacttctacaaatcagcaagatattatttatggcaagaaatattccattgaaatattgtgctgtaacatgggaaagtgtaaatgtttttcatggtttctatcaatgtgaaataaaatttaattctga

SEQ ID NO: 10060 - DNA, 2543 bp, Homo sapiens
cggcgggcgaggggcagggcagggcggaccctggacgcgcgggcgcgcgcggaaggtagcgcggggccgcgttggcgcgcacgcgcctgagcgtgcgcccggtggggccggccgggactcgccgctcgcacgcccttgggccgcggccgggcgcccgctcttccttccgcttgcgctgtgagctgaggcggtgtatgtgcggcaataacatgtcaaccccgctgcccgccatcgtgcccgccgcccggaaggccaccgctgcggcacggatgggcagaagcctttgcaggtatcagaagttcacatatcaaatatatctgcccgcatgcgcctgttaggcctgttacattaaatatgaacgtggctatgccttcatggtttgatattattgggctttcaccagattcacaggaggatgaatctgggattaaacaggcagcagaaaatataaaagctttgattgatcaagaagtgaagaatggcattccttctaacagaattattttgggagggttttctcagggaggagctttatctttatatactgcccttaccacacagcagaaactggcaggtgtcactgcactcagttgctggcttccacttcgggcttcctttccacagggtcctatcggtggtgctaatagagatatttctattctccagtgccacggggattgtgaccctttggttcccctgatgtttggttctcttacggtggaaaaactaaaaacattggtgaatccagccaatgtgacctttaaaacctatgaaggtatgatgcacagttcgtgtcaacaggaaatgatggatgtcaagcaattcattgataaactcctacctccaattgattgacgtcactaagaggccttgtgtagaagtacaccagcatcattgtagtagagtgtaaaccttttcccatgcccagtcttcaaatttctaatgttttgcagtgttaaaatgttttgcaaatacatgccaataacacagatcaaataatatctcctcatgagaaatttatgatcttttaagtttctatacatgtattcttataagacgacccaggatctactatattagaatagatgaagcaggtagcttcttttttctcaaatgtaattcagcaaaataatacagtactgccaccagattttttattacatcatttgaaaattagcagtatgcttaatgaaaatttgttcaggtataaatgagcagttaagatataaacaatttatgcatgctgtgacttagtctatggatttattccaaaattgcttagtcaccatgcagtgtctgtatttttatatatgtgttcatatatacataatgattataatacataataagaatgaggtggtattacattattcctaataatagggataatgctgtttattgtcaagaaaaagtaaaatcgttctcttcaattaatggcccttttattttgggaccaggcttttattttccctgatattatttctatttaatactcttttctctcaagaaaaaaaaaaaagttggtttttcctttatggtccttcatagcaggccaagtatggcctctctgcaatagacagctactgtcaatacatgctgtaattggacattctggggtcacagatataaggtatttaaaatctatttatgctttatagagaaaccagacattaaaacttcatgcactacttatttcgaattactgtaccttatccaaatttacacctagctattaggatcttcaacccaggtaacaggaataattctgtggtttcatttttctgtaaacaactgaaagaataattagatcatattctagtatgttctgaaatatctttaagactgatcttaaaaactaacttctaagatgatttcatcttctcatagtatagagtttactttgtacacgtttgaaaccaactactgtagaagatgaggaatctattgtaattttttgctttattttcatctgccagtggacttatttgaaattttcactttagtcaaattattttttgtattagtttttgatgcagacataaaaatagcaatcattttaaattgtcaaaatttccagattactggtaaaaattatttgaaaacaaacttatgggtaataaaggctagtcagaaccctataccataaagtgtagttaccatacagattaatatgtagcaaaaatgtatgcttgatatttctcaactgtgttaatttttctgctgtattccagctgaccaaaacaatattaagaatgcatctttataaatgggtgctaattgataatggaaataatttagtaatggactatacaggatgttaataatgaagccatatgtttatgtctggatttaaaaattttaaacaatcatttactatgtcatttttctttaccttgaagaacataaactgttatttcacttctacaaatcagcaagatattatttatggcaagaaatattccattgaaatattgtgctgtaacatgggaaagtgtaaatgtttttcatggtttctatcaatgtgaaataaaatttaattctga

SEQ ID NO: 10061 - DNA, 2473 bp, Homo sapiens
cggcgggcgaggggcagggcagggcggaccctggacgcgcgggcgcgcgcggaaggtagcgcggggccgcgttggcgcgcacgcgcctgagcgtgcgcccggtggggccggccgggactcgccgctcgcacgcccttgggccgcggccgggcgcccgctcttccttccgcttgcgctgtgagctgaggcggtgtatgtgcggcaataacatgtcaaccccgctgcccgccatcgtgcccgccgcccggaaggccaccgctgcggtgattttcctgcatggattgggagatactgggcacggatgggcagaagcctttgcaggtatcagaagttcacatatcaaatatatctgcccgcatgcgcctgttaggcctgttacattaaatatgaacgtggctatgccttcatggtttgatattattgggctttcaccagattcacaggaggatgaatctgggattaaacaggcagcagaaaatataaaagctttgattgatcaagaagtgaagaatggcattccttctaacagaattattttgggagggttttctcagggtcctatcggtggtgctaatagagatatttctattctccagtgccacggggattgtgaccctttggttcccctgatgtttggttctcttacggtggaaaaactaaaaacattggtgaatccagccaatgtgacctttaaaacctatgaaggtatgatgcacagttcgtgtcaacaggaaatgatggatgtcaagcaattcattgataaactcctacctccaattgattgacgtcactaagaggccttgtgtagaagtacaccagcatcattgtagtagagtgtaaaccttttcccatgcccagtcttcaaatttctaatgttttgcagtgttaaaatgttttgcaaatacatgccaataacacagatcaaataatatctcctcatgagaaatttatgatcttttaagtttctatacatgtattcttataagacgacccaggatctactatattagaatagatgaagcaggtagcttcttttttctcaaatgtaattcagcaaaataatacagtactgccaccagattttttattacatcatttgaaaattagcagtatgcttaatgaaaatttgttcaggtataaatgagcagttaagatataaacaatttatgcatgctgtgacttagtctatggatttattccaaaattgcttagtcaccatgcagtgtctgtatttttatatatgtgttcatatatacataatgattataatacataataagaatgaggtggtattacattattcctaataatagggataatgctgtttattgtcaagaaaaagtaaaatcgttctcttcaattaatggcccttttattttgggaccaggcttttattttccctgatattatttctatttaatactcttttctctcaagaaaaaaaaaaaagttggtttttcctttatggtccttcatagcaggccaagtatggcctctctgcaatagacagctactgtcaatacatgctgtaattggacattctggggtcacagatataaggtatttaaaatctatttatgctttatagagaaaccagacattaaaacttcatgcactacttatttcgaattactgtaccttatccaaatttacacctagctattaggatcttcaacccaggtaacaggaataattctgtggtttcatttttctgtaaacaactgaaagaataattagatcatattctagtatgttctgaaatatctttaagactgatcttaaaaactaacttctaagatgatttcatcttctcatagtatagagtttactttgtacacgtttgaaaccaactactgtagaagatgaggaatctattgtaattttttgctttattttcatctgccagtggacttatttgaaattttcactttagtcaaattattttttgtattagtttttgatgcagacataaaaatagcaatcattttaaattgtcaaaatttccagattactggtaaaaattatttgaaaacaaacttatgggtaataaaggctagtcagaaccctataccataaagtgtagttaccatacagattaatatgtagcaaaaatgtatgcttgatatttctcaactgtgttaatttttctgctgtattccagctgaccaaaacaatattaagaatgcatctttataaatgggtgctaattgataatggaaataatttagtaatggactatacaggatgttaataatgaagccatatgtttatgtctggatttaaaaattttaaacaatcatttactatgtcatttttctttaccttgaagaacataaactgttatttcacttctacaaatcagcaagatattatttatggcaagaaatattccattgaaatattgtgctgtaacatgggaaagtgtaaatgtttttcatggtttctatcaatgtgaaataaaatttaattctga

SEQ ID NO: 10062 - DNA, 2192 bp, Homo sapiens
ggcccggaaggccaccgctgcggtgattttcctgcatggattgggagatactgggcacggatgggcagaagcctttgcaggcctgttaggcctgttacattaaatatgaacgtggctatgccttcatggtttgatattattgggctttcaccagattcacaggaggatgaatctgggattaaacaggcagcagaaaatataaaagctttgattgatcaagaagtgaagaatggcattccttctaacagaattattttgggagggttttctcagggtcctatcggtggtgctaatagagatatttctattctccagtgccacggggattgtgaccctttggttcccctgatgtttggttctcttacggtggaaaaactaaaaacattggtgaatccagccaatgtgacctttaaaacctatgaaggtatgatgcacagttcgtgtcaacaggaaatgatggatgtcaagcaattcattgataaactcctacctccaattgattgacgtcactaagaggccttgtgtagaagtacaccagcatcattgtagtagagtgtaaaccttttcccatgcccagtcttcaaatttctaatgttttgcagtgttaaaatgttttgcaaatacatgccaataacacagatcaaataatatctcctcatgagaaatttatgatcttttaagtttctatacatgtattcttataagacgacccaggatctactatattagaatagatgaagcaggtagcttcttttttctcaaatgtaattcagcaaaataatacagtactgccaccagattttttattacatcatttgaaaattagcagtatgcttaatgaaaatttgttcaggtataaatgagcagttaagatataaacaatttatgcatgctgtgacttagtctatggatttattccaaaattgcttagtcaccatgcagtgtctgtatttttatatatgtgttcatatatacataatgattataatacataataagaatgaggtggtattacattattcctaataatagggataatgctgtttattgtcaagaaaaagtaaaatcgttctcttcaattaatggcccttttattttgggaccaggcttttattttccctgatattatttctatttaatactcttttctctcaagaaaaaaaaaaaagttggtttttcctttatggtccttcatagcaggccaagtatggcctctctgcaatagacagctactgtcaatacatgctgtaattggacattctggggtcacagatataaggtatttaaaatctatttatgctttatagagaaaccagacattaaaacttcatgcactacttatttcgaattactgtaccttatccaaatttacacctagctattaggatcttcaacccaggtaacaggaataattctgtggtttcatttttctgtaaacaactgaaagaataattagatcatattctagtatgttctgaaatatctttaagactgatcttaaaaactaacttctaagatgatttcatcttctcatagtatagagtttactttgtacacgtttgaaaccaactactgtagaagatgaggaatctattgtaattttttgctttattttcatctgccagtggacttatttgaaattttcactttagtcaaattattttttgtattagtttttgatgcagacataaaaatagcaatcattttaaattgtcaaaatttccagattactggtaaaaattatttgaaaacaaacttatgggtaataaaggctagtcagaaccctataccataaagtgtagttaccatacagattaatatgtagcaaaaatgtatgcttgatatttctcaactgtgttaatttttctgctgtattccagctgaccaaaacaatattaagaatgcatctttataaatgggtgctaattgataatggaaataatttagtaatggactatacaggatgttaataatgaagccatatgtttatgtctggatttaaaaattttaaacaatcatttactatgtcatttttctttaccttgaagaacataaactgttatttcacttctacaaatcagcaagatattatttatggcaagaaatattccattgaaatattgtgctgtaacatgggaaagtgtaaatgtttttcatggtttctatcaatgtgaaataaaatttaattctga

SEQ ID NO: 10063 - DNA, 2209 bp, Homo sapiens
gcctctgcagcgtgtttctgcctggtgtgtgggtgagggaaacctaagtccgccaggaaatcgccttattgtcacctcgcactcttatcctcaatgaaagaagtttgaagattgagtgtcctacaaggttttcctgcatggattgggagatactggtaaaagctttgattgatcaagaagtgaagaatggcattccttctaacagaattattttgggagggttttctcagggaggagctttatctttatatactgcccttaccacacagcagaaactggcaggtgtcactgcactcagttgctggcttccacttcgggcttcctttccacagtgccacggggattgtgaccctttggttcccctgatgtttggttctcttacggtggaaaaactaaaaacattggtgaatccagccaatgtgacctttaaaacctatgaaggtatgatgcacagttcgtgtcaacaggaaatgatggatgtcaagcaattcattgataaactcctacctccaattgattgacgtcactaagaggccttgtgtagaagtacaccagcatcattgtagtagagtgtaaaccttttcccatgcccagtcttcaaatttctaatgttttgcagtgttaaaatgttttgcaaatacatgccaataacacagatcaaataatatctcctcatgagaaatttatgatcttttaagtttctatacatgtattcttataagacgacccaggatctactatattagaatagatgaagcaggtagcttcttttttctcaaatgtaattcagcaaaataatacagtactgccaccagattttttattacatcatttgaaaattagcagtatgcttaatgaaaatttgttcaggtataaatgagcagttaagatataaacaatttatgcatgctgtgacttagtctatggatttattccaaaattgcttagtcaccatgcagtgtctgtatttttatatatgtgttcatatatacataatgattataatacataataagaatgaggtggtattacattattcctaataatagggataatgctgtttattgtcaagaaaaagtaaaatcgttctcttcaattaatggcccttttattttgggaccaggcttttattttccctgatattatttctatttaatactcttttctctcaagaaaaaaaaaaaagttggtttttcctttatggtccttcatagcaggccaagtatggcctctctgcaatagacagctactgtcaatacatgctgtaattggacattctggggtcacagatataaggtatttaaaatctatttatgctttatagagaaaccagacattaaaacttcatgcactacttatttcgaattactgtaccttatccaaatttacacctagctattaggatcttcaacccaggtaacaggaataattctgtggtttcatttttctgtaaacaactgaaagaataattagatcatattctagtatgttctgaaatatctttaagactgatcttaaaaactaacttctaagatgatttcatcttctcatagtatagagtttactttgtacacgtttgaaaccaactactgtagaagatgaggaatctattgtaattttttgctttattttcatctgccagtggacttatttgaaattttcactttagtcaaattattttttgtattagtttttgatgcagacataaaaatagcaatcattttaaattgtcaaaatttccagattactggtaaaaattatttgaaaacaaacttatgggtaataaaggctagtcagaaccctataccataaagtgtagttaccatacagattaatatgtagcaaaaatgtatgcttgatatttctcaactgtgttaatttttctgctgtattccagctgaccaaaacaatattaagaatgcatctttataaatgggtgctaattgataatggaaataatttagtaatggactatacaggatgttaataatgaagccatatgtttatgtctggatttaaaaattttaaacaatcatttactatgtcatttttctttaccttgaagaacataaactgttatttcacttctacaaatcagcaagatattatttatggcaagaaatattccattgaaatattgtgctgtaacatgggaaagtgtaaatgtttttcatggtttctatcaatgtgaaataaaatttaattctga

SEQ ID NO: 10064 - DNA, 2043 bp, Homo sapiens
aaataggtgacttaaaagaaggcattccatcatagatggcaaaaaaccaaaaatctgttggaccagtaactcttctttttctttgacttgcttagtaggttaaaaagtgataatgaattcaagtttttgttattgttgttcaaaacatcatttttaagacccgaggctctagtgctgcatttcctacctgttaataaaggaatatctggaacataaatatttgtgcagtgagtgggcatttctctagaagtgtttcaacagatacagtacagactcctagaagtagagatgctacagcagtgggtttgcgtatttaacatcttggttgagattgtgaaactttctccgataactttctacccatttataactttagtaatatacaatgtgactttttttagtatccttgctagtattgggcattgtcattgttttaatctttgccaatctgatagttataagtgatactcatttaaatttaaatcacaatatttcttttttaattgaagaaaaaatcagcattaggtgaggtttaccaagcattggtggtgattactgggtattggtggctcagacgtaggatgatggactgttggcatgatattgccttgattgcctaatctgtaactcctaataaatactggaaaattagcttgcctgaaacattggtaagaactttttaaaaattacctttattttcttacttggtccttgactgcatcttgggccccagccagttacatatgcatataatatgatgacaaatgaaaatggttaagacagcatgtatcttgtcgctaaaaggatactcttagggcagagacttgttttgtatattttgaatacgaattttagcctaataacaacaaaatttgcttgaatatatatatattaactactctgtcacttttgctaatctgcattaaaggaaaatcaccttttggttaatgtaagactgtgaccttttctgcgttgctttctgtagtgtcttctgggactctcctactcattgcttgcctgtgcattgtggccaatggtggcatttgtagttcctgaacatcagctgggaactgcatatggcttcatgcagtccattcagaatcttgggttggccatcatttccatcattgctggtatgatactggattctcgggggtatttgtttttggaagtgttcttcattgcctgtgtttctttgtcacttttatctgtggtcttactctatttggtgaatcgtgcccagggtgggaacctaaattattctgcaagacaaagggaagaaataaaattttcccatactgaatgagaagttaaaatgaatgtgtcatgagaatgggcttaacacatcgttggtttgaaaacttccatttttaaaaatttagagtttagtcattagaaaaaataatggactggaaagttatatttatatccaaatatacctatttcaaagtgtatttgtgaggcctgttttagcctgtgtcttttgtattgtgtgttgctaaagaattctacttttagtaggctaatcaacaatgaaagggttagaaaattgctgtggaacatccaggtgaacttcaggaaagacagtgaaaaatggaaaacgttggagcttctgttgagataatcttcattaggtatatatcttagggatacagccttttctttatcttatagcaggaaaaaaaaacttttgagggaaatagaagggctgcgttacacaaaataaacaatggcattgtcataggccttccttttactagtagggcataatgctagggaatatgtgaagatgtttttatgaagtctctttctgatcacgaacaatagcttgcgctctactctgtagttatgtggattgccgagcaatgacccttttcaatttcttatttctgtgttactgaggaccctaatcacttagggatgtaattttatagtataaactttctgtacagtttttcttatagtctaataagtaaaaagtgtccttcaaattatgataattgcctatgtacatggataaattaaaacactgcacacggagta

SEQ ID NO: 10065 - DNA, 1426 bp, Homo sapiens
aaataggtgacttaaaagaaggcattccatcatagatggcaaaaaaccaaaaatctgttggaccagtaactcttctttttctttgacttgcttagtaggttaaaaagtgataatgaattcaagtttttgttattgttgttcaaaacatcatttttaagacccgaggctctagtgctgcatttcctacctgttaataaaggaatatctggaacataaatatttgtgcagtgagtgggcatttctctagaagtgtttcaacagatacagtacagactcctagaagtagagatgctacagcagtgggtttgcgtatttaacatcttggttgagattgtgaaactttctccgataactttctacccatttataactttagtaatatacaatgtgactttttttagtatccttgctagtattgggcattgtcattgttttaatctttgccaatctgatagttataagtgatactcatttaaatttaaatcacaatatttcttttttaattgaagaaaaaatcagcattaggtgaggtttaccaagcattggtggtgattactgggtattggtggctcagacgtaggatgatggactgttggcatgatattgccttgattgcctaatctgtaactcctaataaatactggaaaattagcttgcctgaaacattggtaagaactttttaaaaattacctttattttcttacttggtccttgactgcatcttgggccccagccagttacatatgcatataatatgatgacaaatgaaaatggttaagacagcatgtatcttgtcgctaaaaggatactcttagggcagagacttgttttgtatattttgaatacgaattttagcctaataacaacaaaatttgcttgaatatatatatattaactactctgtcacttttgctaatctgcattaaaggaaaatcaccttttggttaatgtaagactgtgaccttttctgcgttgctttctgtagtgtcttctgggactctcctactcattgcttgcctgtgcattgtggccaatggtggcatttgtagttcctgaacatcagctgggaactgcatatggcttcatgcagtccattcagaatcttgggttggccatcatttccatcattgctggtatgatactggattctcgggggtatttgtttttggaagtgttcttcattgcctgtgtttcttgtgagtattccgtatgacaacattttgtttcttttactacataacagaatgttcttatttttacttaggcatagctcccagatttgcctaattctcacctgtgaattagaatttcatagctggtgactttctagccctctgaagattcacaggcattttttaggagattcctatccttaaaggcagtgattgagttggtttcatattctgttttaactatttacagttta

SEQ ID NO: 10066 - DNA, 2247 bp, Homo sapiens
cgtgagctcccggagtcatgtgaccgccgtcttgacagtgttccacgggcgctgcttcctgcctgggtttggagttgtcaccactttcccctctccgtctcctgcgggcgcaatggaggaggaggatgaggaagcgcgggcgctcctggcaggcggccctgacgaggccgacagaggtgccccggccgcccctggagccctgccggccctctgcgaccccagtcgcctggcgcaccggcttttggtgctgttactgatgtgcttccttggctttggcagctatttttgctatgataatcctgctgcccttcagactcaagttaaacgagatatgcaagtgaataccacgaaattcatgctgctgtatgcctggtattcttggcccaatgtagttttgtgtttctttggtggctttttgatagaccgagtatttggaatacgatggggcacaatcatttttagctgctttgtttgcattggacaggttgtttttgccctgggtggaatatttaatgctttttggctgatggaatttggaagatttgtatttgggattggtggcgagtccttagcagttgcccagaatacatatgctgtgagctggtttaaaggcaaagaattaaacctggtgtttggacttcaacttagcatggctagaattggaagtacagtaaacatgaacctcatgggatggctgtattctaagattgaagctttgttaggttctgctggtcacacaaccctcgggatcacacttatgattgggggtgtaacgtgtattctttcactaatctgtgccttggctcttgcctacttggatcagagagcagagagaatccttcataaagaacaaggaaaaacaggtgaagttattaaattaactgatgtaaaggacttctccttacccctgtggcttatatttatcatctgtgtctgctattatgttgctgtgttcccttttattggacttgggaaagttttctttacagagaaatttggattttcttcccaggcagcaagtgcaattaacagtgttgtatatgtcatatcagctcccatgtccccggtgtttgggctcctggtggataaaacagggaagaacatcatctgggttctttgcgcagtagcagccactcttgtgtcccacatgatgctggcctttacgatgtggaacccttggattgctatgtgtcttctgggactctcctactcattgcttgcctgtgcattgtggccaatggtggcatttgtagttcctgaacatcagctgggaactgcatatggcttcatgcagtccattcagaatcttgggttggccatcatttccatcattgctggtatgatactggattctcgggggtatttgtttttggaagtgttcttcattgcctgtgtttctttgtcacttttatctgtggtcttactctatttggtgaatcgtgcccagggtgggaacctaaattattctgcaagacaaagggaagaaataaaattttcccatactgaatgagaagttaaaatgaatgtgtcatgagaatgggcttaacacatcgttggtttgaaaacttccatttttaaaaatttagagtttagtcattagaaaaaataatggactggaaagttatatttatatccaaatatacctatttcaaagtgtatttgtgaggcctgttttagcctgtgtcttttgtattgtgtgttgctaaagaattctacttttagtaggctaatcaacaatgaaagggttagaaaattgctgtggaacatccaggtgaacttcaggaaagacagtgaaaaatggaaaacgttggagcttctgttgagataatcttcattaggtatatatcttagggatacagccttttctttatcttatagcaggaaaaaaaaacttttgagggaaatagaagggctgcgttacacaaaataaacaatggcattgtcataggccttccttttactagtagggcataatgctagggaatatgtgaagatgtttttatgaagtctctttctgatcacgaacaatagcttgcgctctactctgtagttatgtggattgccgagcaatgacccttttcaatttcttatttctgtgttactgaggaccctaatcacttagggatgtaattttatagtataaactttctgtacagtttttcttatagtctaataagtaaaaagtgtccttcaaattatgataattgcctatgtacatggataaattaaaacactgcacacggagta

SEQ ID NO: 10067 - DNA, 1843 bp, Homo sapiens
gggatccccaagcagttattagactcaagttaaacgaatggggcacaatcatttttagctgctttgtttgcattggacaggttgtttttgccctgggtggaatatttaatgctttttggctgatggaatttggaagatttgtatttgggattggtggcgagtccttagcagttgcccagaatacatatgctgtgagctggtttaaaggcaaagaattaaacctggtgtttggacttcaacttagcatggctagaattggaagtacagtaaacatgaacctcatgggatggctgtattctaagattgaagctttgttaggttctgctggtcacacaaccctcgggatcacacttatgattgggggtgtaacgtgtattctttcactaatctgtgccttggctcttgcctacttggatcagagagcagagagaatccttcataaagaacaaggaaaaacaggtgaagttattaaattaactgatgtaaaggacttctccttacccctgtggcttatatttatcatctgtgtctgctattatgttgctgtgttcccttttattggacttgggaaagttttctttacagagaaatttggattttcttcccaggcagcaagtgcaattaacagtgttgtatatgtcatatcagctcccatgtccccggtgtttgggctcctggtggataaaacagggaagaacatcatctgggttctttgcgcagtagcagccactcttgtgtcccacatgatgctggcctttacgatgtggaacccttggattgctatgtgtcttctgggactctcctactcattgcttgcctgtgcattgtggccaatggtggcatttgtagttcctgaacatcagctgggaactgcatatggcttcatgcagtccattcagaatcttgggttggccatcatttccatcattgctggtatgatactggattctcgggggtatttgtttttggaagtgttcttcattgcctgtgtttctttgtcacttttatctgtggtcttactctatttggtgaatcgtgcccagggtgggaacctaaattattctgcaagacaaagggaagaaataaaattttcccatactgaatgagaagttaaaatgaatgtgtcatgagaatgggcttaacacatcgttggtttgaaaacttccatttttaaaaatttagagtttagtcattagaaaaaataatggactggaaagttatatttatatccaaatatacctatttcaaagtgtatttgtgaggcctgttttagcctgtgtcttttgtattgtgtgttgctaaagaattctacttttagtaggctaatcaacaatgaaagggttagaaaattgctgtggaacatccaggtgaacttcaggaaagacagtgaaaaatggaaaacgttggagcttctgttgagataatcttcattaggtatatatcttagggatacagccttttctttatcttatagcaggaaaaaaaaacttttgagggaaatagaagggctgcgttacacaaaataaacaatggcattgtcataggccttccttttactagtagggcataatgctagggaatatgtgaagatgtttttatgaagtctctttctgatcacgaacaatagcttgcgctctactctgtagttatgtggattgccgagcaatgacccttttcaatttcttatttctgtgttactgaggaccctaatcacttagggatgtaattttatagtataaactttctgtacagtttttcttatagtctaataagtaaaaagtgtccttcaaattatgataattgcctatgtacatggataaattaaaacactgcacacggagta

SEQ ID NO: 10068 - DNA, 1424 bp, Homo sapiens
gctaatagcaatcctccatgaagtgaacaaggaagaacaggtgaagttattaaattaactgatgtaaaggacttctccttacccctgtggcttatatttatcatctgtgtctgctattatgttgctgtgttcccttttattggacttgggaaagttttctttacagagaaatttggattttcttcccaggcagcaagtgcaattaacagtgttgtatatgtcatatcagctcccatgtccccggtgtttgggctcctggtggataaaacagggaagaacatcatctgggttctttgcgcagtagcagccactcttgtgtcccacatgatgctggcctttacgatgtggaacccttggattgctatgtgtcttctgggactctcctactcattgcttgcctgtgcattgtggccaatggtggcatttgtagttcctgaacatcagctgggaactgcatatggcttcatgcagtccattcagaatcttgggttggccatcatttccatcattgctggtatgatactggattctcgggggtatttgtttttggaagtgttcttcattgcctgtgtttctttgtcacttttatctgtggtcttactctatttggtgaatcgtgcccagggtgggaacctaaattattctgcaagacaaagggaagaaataaaattttcccatactgaatgagaagttaaaatgaatgtgtcatgagaatgggcttaacacatcgttggtttgaaaacttccatttttaaaaatttagagtttagtcattagaaaaaataatggactggaaagttatatttatatccaaatatacctatttcaaagtgtatttgtgaggcctgttttagcctgtgtcttttgtattgtgtgttgctaaagaattctacttttagtaggctaatcaacaatgaaagggttagaaaattgctgtggaacatccaggtgaacttcaggaaagacagtgaaaaatggaaaacgttggagcttctgttgagataatcttcattaggtatatatcttagggatacagccttttctttatcttatagcaggaaaaaaaaacttttgagggaaatagaagggctgcgttacacaaaataaacaatggcattgtcataggccttccttttactagtagggcataatgctagggaatatgtgaagatgtttttatgaagtctctttctgatcacgaacaatagcttgcgctctactctgtagttatgtggattgccgagcaatgacccttttcaatttcttatttctgtgttactgaggaccctaatcacttagggatgtaattttatagtataaactttctgtacagtttttcttatagtctaataagtaaaaagtgtccttcaaattatgataattgcctatgtacatggataaattaaaacactgcacacggagta

SEQ ID NO: 10069 - DNA, 2392 bp, Homo sapiens
  misc_feature (2259)..(2259): n is a, c, g, or t
  misc_feature (2261)..(2261): n is a, c, g, or t
  misc_feature (2280)..(2280): n is a, c, g, or t
  misc_feature (2282)..(2284): n is a, c, g, or t
cgtgagctcccggagtcatgtgaccgccgtcttgacagtgttccacgggcgctgcttcctgcctgggtttggagttgtcaccactttcccctctccgtctcctgcgggcgcaatggaggaggaggatgaggaagcgcgggcgctcctggcaggcggccctgacgaggccgacagaggtgccccggccgcccctggagccctgccggccctctgcgaccccagtcgcctggcgcaccggcttttggtgctgttactgatgtgcttccttggctttggcagctatttttgctatgataatcctgctgcccttcagactcaagttaaacgagatatgcaagtgaataccacgaaattcatgctgctgtatgcctggtattcttggcccaatgtagttttgtgtttctttggtggctttttgatagaccgagtatttggaatacgatggggcacaatcatttttagctgctttgtttgcattggacaggttgtttttgccctgggtggaatatttaatgctttttggctgatggaatttggaagatttgtatttgggattggtggcgagtccttagcagttgcccagaatacatatgctgtgagctggtttaaaggcaaagaattaaacctggtgtttggacttcaacttagcatggctagaattggaagtacagtaaacatgaacctcatgggatggctgtattctaagattgaagctttgttaggttctgctggtcacacaaccctcgggatcacacttatgattgggggtgtaacgtgtattctttcactaatctgtgccttggctcttgcctacttggatcagagagcagagagaatccttcataaagaacaaggaaaaacaggtgaagttattaaattaactgatgtaaaggacttctccttacccctgtggcttatatttatcatctgtgtctgctattatgttgctgtgttcccttttattggacttgggaaagttttctttacagagaaatttggattttcttcccaggcagcaagtgcaattaacagtgttgtatatgtcatatcagctcccatgtccccggtgtttgggctcctggtggataaaacagggaagaacatcatctgggttctttgcgcagtagcagccactcttgtgtcccacatgatgctggcctttacgatgtggaacccttggattgctatgtgtcttctgggactctcctactcattgcttgcctgtgcattgtggccaatggtggcatttgtagttcctgaacatcagctgggaactgcatatggcttcatgcagtccattcagaatcttgggttggccatcatttccatcattgctggtatgatactggattctcgggggtatttgtttttggaagtgttcttcattgcctgtgtttctttgtcacttttatctgtggtcttactctatttggtgaatcgtgcccagggtgggaacctaaattattctgcaagacaaagggaagaaataaaattttcccatactgaatgagaagttaaaatgaatgtgtcatgagaatgggcttaacacatcgttggtttgaaaacttccatttttaaaaatttagagtttagtcattagaaaaaataatggactggaaagttatatttatatccaaatatacctatttcaaagtgtatttgtgaggcctgttttagcctgtgtcttttgtattgtgtgttgctaaagaattctacttttagtaggctaatcaacaatgaaagggttagaaaattgctgtggaacatccaggtgaacttcaggaaagacagtgaaaaatggaaaacgttggagcttctgttgagataatcttcattaggtatatatcttagggatacagccttttctttatcttatagcaggaaaaaaaaacttttgagggaaatagaagggctgcgttacacaaaataaacaatggcattgtcataggccttccttttactagtagggcataatgctagggaatatgtgaagatgtttttatgaagtctctttctgatcacgaacaatagcttgcgctctactctgtagttatgtggattgccgagcaatgacccttttcaatttcttatttctgtgttactgaggaccctaatcacttagggatgtaattttatagtataaactttctgtacagtttttcttatagtctaataagtaaaaagtgtccttcaaattatgataattgcctatgtacatggataaattaaaacactgcacacggagtaaaaaaaaaaaananaaaaaaaaaaaaaaaaaanannnaaaaggcccagtcaattttaagctggggcaaggttttgcatgcggcccaaatttgggcttcttggccaattcgcctatgggaggcggtttaatcgcttgggcaatccc

SEQ ID NO: 10070 - DNA, 410 bp, Homo sapiens
cggccgctcacatgggcgtggccctgcgtgacctgccggggcgtcacgtgagctcccggagtcatgtgaccgccgtcttgacagtgttccacgggcgctgcttcctgcctgggtttggagttgtcaccactttcccctctccgtctcctgcgggcgcaatggaggaggaggatgaggaagcgcgggcgctcctggcaggcggccctgacgaggccgacagaggtgccccggccgcccctggagccctgccggccctctgcgaccccagtcgcctggcgcaccggcttttggtgctgttactgatgtgcttccttggctttggtgagccggccgggtgggttggggctgatctttaaggaattcccgactttctcttcgaggtagatcgtcatcgtggtcactggtgccac

SEQ ID NO: 10071 - DNA, 775 bp, Homo sapiens
cgtgagctcccggagtcatgtgaccgccgtcttgacagtgttccacgggcgctgcttcctgcctgggtttggagttgtcaccactttcccctctccgtctcctgcgggcgcaatggaggaggaggatgaggaagcgcgggcgctcctggcaggcggccctgacgaggccgacagaggtgccccggccgcccctggagccctgccggccctctgcgaccccagtcgcctggcgcaccggcttttggtgctgttactgatgtgcttccttggctttggcagctatttttgctatgataatcctgctgcccttcagactcaagttaaacgaatggggcacaatcatttttagctgctttgtttgcattggacaggttgtttttgccctgggtggaatatttaatgctttttggctgatggaatttggaagatttgtatttgggattggtggcgagtccttagcagttgcccagaatacatatgctgtgagctggtttaaaggcaaagaattaaacctggtgtttggacttcaacttagcatggctagaattggaagtacagtaaacatgaacctcatgggatggctgtattctaagattgaagctttgttaggttctgctggtcacacaaccctcgggatcacacttatgattgggggtgtaacgtgtattctttcactaatctgtgccttggctcttgcctacttggatcagagagcagagagaatccttcataaagaacaaggaaaaacaggtaagtctaaatgaaagaatgggac

SEQ ID NO: 10072 - DNA, 2604 bp, Homo sapiens
cctctgcgccatgagagccaagtggaggaagaagcgaatgcgcaggctgaagcgcaaaagaagaaagatgaggcagaggtccaagtaaaccgctagcttgttgcaccgtggaggccacaggagcagaaacatggaatgccagacgctggggatgctggtacaagttgtgggactgcatgctactgtctagagcttgtctcaatggatctagaacttcatcgccctctgatcgccgatcacctctgagacccaccttgctcataaacaaaatgcccatgttggtcctctgccctggacctgtgacattctggactatttctgtgtttatttgtggccgagtgtaacaaccatataataaatcacctcttccgctgttttagctgaaaaaaaaaaaaaaaggggcgccgtcgcgatctagaactagtttggagttgtcaccactttcccctctccgtctcctgcgggcgcaatggaggaggaggatgaggaagcgcgggcgctcctggcaggcggccctgacgaggccgacagaggtgccccggccgcccctggagccctgccggccctctgcgaccccagtcgcctggcgcaccggcttttggtgctgttactgatgtgcttccttggctttggcagctatttttgctatgataatcctgctgcccttcagactcaagttaaacgagatatgcaagtgaataccacgaaattcatgctgctgtatgcctggtattcttggcccaatgtagttttgtgtttctttggtggctttttgatagaccgagtatttggaatacgatggggcacaatcatttttagctgctttgtttgcattggacaggttgtttttgccctgggtggaatatttaatgctttttggctgatggaatttggaagatttgtatttgggattggtggcgagtccttagcagttgcccagaatacatatgctgtgagctggtttaaaggcaaagaattaaacctggtgtttggacttcaacttagcatggctagaattggaagtacagtaaacatgaacctcatgggatggctgtattctaagattgaagctttgttaggttctgctggtcacacaaccctcgggatcacacttatgattgggggtgtaacgtgtattctttcactaatctgtgccttggctcttgcctacttggatcagagagcagagagaatccttcataaagaacaaggaaaaacaggtgaagttattaaattaactgatgtaaaggacttctccttacccctgtggcttatatttatcatctgtgtctgctattatgttgctgtgttcccttttattggacttgggaaagttttctttacagagaaatttggattttcttcccaggcagcaagtgcaattaacagtgttgtatatgtcatatcagctcccatgtccccggtgtttgggctcctggtggataaaacagggaagaacatcatctgggttctttgcgcagtagcagccactcttgtgtcccacatgatgctggcctttacgatgtggaacccttggattgctatgtgtcttctgggactctcctactcattgcttgcctgtgcattgtggccaatggtggcatttgtagttcctgaacatcagctgggaactgcatatggcttcatgcagtccattcagaatcttgggttggccatcatttccatcattgctggtatgatactggattctcgggggtatttgtttttggaagtgttcttcattgcctgtgtttctttgtcacttttatctgtggtcttactctatttggtgaatcgtgcccagggtgggaacctaaattattctgcaagacaaagggaagaaataaaattttcccatactgaatgagaagttaaaatgaatgtgtcatgagaatgggcttaacacatcgttggtttgaaaacttccatttttaaaaatttagagtttagtcattagaaaaaataatggactggaaagttatatttatatccaaatatacctatttcaaagtgtatttgtgaggcctgttttagcctgtgtcttttgtattgtgtgttgctaaagaattctacttttagtaggctaatcaacaatgaaagggttagaaaattgctgtggaacatccaggtgaacttcaggaaagacagtgaaaaatggaaaacgttggagcttctgttgagataatcttcattaggtatatatcttagggatacagccttttctttatcttatagcaggaaaaaaaaacttttgagggaaatagaagggctgcgttacacaaaataaacaatggcattgtcataggccttccttttactagtagggcataatgctagggaatatgtgaagatgtttttatgaagtctctttctgatcacgaacaatagcttgcgctctactctgtagttatgtggattgccgagcaatgacccttttcaatttcttatttctgtgttactgaggaccctaatcacttagggatgtaattttatagtataaactttctgtacagtttttcttatagtctaataagtaaaaagtgtccttcaaattatgataattgcctatgtacatggataaattaaaacactgcacacggagta

SEQ ID NO: 10073 - DNA, 2391 bp, Homo sapiens
cttgtcaaggctcagccccgtggcctgcactcacctctcctcctgatggccttagcctcctgattgagactgcacactcagaccatgctgttaggactgagggatttttagtcccccaagtaccaatgagagctggagaagtgacaagtggatgtgtccagagaaggaggccgaggcagaccgtgctctctgtttccacagtatcccttctccatttctcccttactgtgatggtctgagttttgtgttccccacaaattaacatatttcagtcctaacactcaaagtgatggattaggaggtagggcctttgaggggtgattagtggctgtatgaaagaggcccgagagtggcacctcatcttttccatcacgcgaggacacagcaactttgatcttggatttccagccaccagaaccgcagctatttttgctatgataatcctgctgcccttcagactcaagttaaacgagatatgcaagtgaataccacgaaattcatgctgctgtatgcctggtattcttggcccaatgtagttttgtgtttctttggtggctttttgatagaccgagtatttggaatacgatggggcacaatcatttttagctgctttgtttgcattggacaggttgtttttgccctgggtggaatatttaatgctttttggctgatggaatttggaagatttgtatttgggattggtggcgagtccttagcagttgcccagaatacatatgctgtgagctggtttaaaggcaaagaattaaacctggtgtttggacttcaacttagcatggctagaattggaagtacagtaaacatgaacctcatgggatggctgtattctaagattgaagctttgttaggttctgctggtcacacaaccctcgggatcacacttatgattgggggtgtaacgtgtattctttcactaatctgtgccttggctcttgcctacttggatcagagagcagagagaatccttcataaagaacaaggaaaaacaggtgaagttattaaattaactgatgtaaaggacttctccttacccctgtggcttatatttatcatctgtgtctgctattatgttgctgtgttcccttttattggacttgggaaagttttctttacagagaaatttggattttcttcccaggcagcaagtgcaattaacagtgttgtatatgtcatatcagctcccatgtccccggtgtttgggctcctggtggataaaacagggaagaacatcatctgggttctttgcgcagtagcagccactcttgtgtcccacatgatgctggcctttacgatgtggaacccttggattgctatgtgtcttctgggactctcctactcattgcttgcctgtgcattgtggccaatggtggcatttgtagttcctgaacatcagctgggaactgcatatggcttcatgcagtccattcagaatcttgggttggccatcatttccatcattgctggtatgatactggattctcgggggtatttgtttttggaagtgttcttcattgcctgtgtttctttgtcacttttatctgtggtcttactctatttggtgaatcgtgcccagggtgggaacctaaattattctgcaagacaaagggaagaaataaaattttcccatactgaatgagaagttaaaatgaatgtgtcatgagaatgggcttaacacatcgttggtttgaaaacttccatttttaaaaatttagagtttagtcattagaaaaaataatggactggaaagttatatttatatccaaatatacctatttcaaagtgtatttgtgaggcctgttttagcctgtgtcttttgtattgtgtgttgctaaagaattctacttttagtaggctaatcaacaatgaaagggttagaaaattgctgtggaacatccaggtgaacttcaggaaagacagtgaaaaatggaaaacgttggagcttctgttgagataatcttcattaggtatatatcttagggatacagccttttctttatcttatagcaggaaaaaaaaacttttgagggaaatagaagggctgcgttacacaaaataaacaatggcattgtcataggccttccttttactagtagggcataatgctagggaatatgtgaagatgtttttatgaagtctctttctgatcacgaacaatagcttgcgctctactctgtagttatgtggattgccgagcaatgacccttttcaatttcttatttctgtgttactgaggaccctaatcacttagggatgtaattttatagtataaactttctgtacagtttttcttatagtctaataagtaaaaagtgtccttcaaattatgataattgcctatgtacatggataaattaaaacactgcacacggagta

SEQ ID NO: 10074 - DNA, 2134 bp, Homo sapiens
cgtgagctcccggagtcatgtgaccgccgtcttgacagtgttccacgggcgctgcttcctgcctgggtttggagttgtcaccactttcccctctccgtctcctgcgggcgcaatggaggaggaggatgaggaagcgcgggcgctcctggcaggcggccctgacgaggccgacagaggtgccccggccgcccctggagccctgccggccctctgcgaccccagtcgcctggcgcaccggcttttggtgctgttactgatgtgcttccttggctttggcagctatttttgctatgataatcctgctgcccttcagactcaagttaaacgaatggggcacaatcatttttagctgctttgtttgcattggacaggttgtttttgccctgggtggaatatttaatgctttttggctgatggaatttggaagatttgtatttgggattggtggcgagtccttagcagttgcccagaatacatatgctgtgagctggtttaaaggcaaagaattaaacctggtgtttggacttcaacttagcatggctagaattggaagtacagtaaacatgaacctcatgggatggctgtattctaagattgaagctttgttaggttctgctggtcacacaaccctcgggatcacacttatgattgggggtgtaacgtgtattctttcactaatctgtgccttggctcttgcctacttggatcagagagcagagagaatccttcataaagaacaaggaaaaacaggtgaagttattaaattaactgatgtaaaggacttctccttacccctgtggcttatatttatcatctgtgtctgctattatgttgctgtgttcccttttattggacttgggaaagttttctttacagagaaatttggattttcttcccaggcagcaagtgcaattaacagtgttgtatatgtcatatcagctcccatgtccccggtgtttgggctcctggtggataaaacagggaagaacatcatctgggttctttgcgcagtagcagccactcttgtgtcccacatgatgctggcctttacgatgtggaacccttggattgctatgtgtcttctgggactctcctactcattgcttgcctgtgcattgtggccaatggtggcatttgtagttcctgaacatcagctgggaactgcatatggcttcatgcagtccattcagaatcttgggttggccatcatttccatcattgctggtatgatactggattctcgggggtatttgtttttggaagtgttcttcattgcctgtgtttctttgtcacttttatctgtggtcttactctatttggtgaatcgtgcccagggtgggaacctaaattattctgcaagacaaagggaagaaataaaattttcccatactgaatgagaagttaaaatgaatgtgtcatgagaatgggcttaacacatcgttggtttgaaaacttccatttttaaaaatttagagtttagtcattagaaaaaataatggactggaaagttatatttatatccaaatatacctatttcaaagtgtatttgtgaggcctgttttagcctgtgtcttttgtattgtgtgttgctaaagaattctacttttagtaggctaatcaacaatgaaagggttagaaaattgctgtggaacatccaggtgaacttcaggaaagacagtgaaaaatggaaaacgttggagcttctgttgagataatcttcattaggtatatatcttagggatacagccttttctttatcttatagcaggaaaaaaaaacttttgagggaaatagaagggctgcgttacacaaaataaacaatggcattgtcataggccttccttttactagtagggcataatgctagggaatatgtgaagatgtttttatgaagtctctttctgatcacgaacaatagcttgcgctctactctgtagttatgtggattgccgagcaatgacccttttcaatttcttatttctgtgttactgaggaccctaatcacttagggatgtaattttatagtataaactttctgtacagtttttcttatagtctaataagtaaaaagtgtccttcaaattatgataattgcctatgtacatggataaattaaaacactgcacacggagta

SEQ ID NO: 10075 - DNA, 2762 bp, Homo sapiens
cgtgagctcccggagtcatgtgaccgccgtcttgacagtgttccacgggcgctgcttcctgcctgggtttggagttgtcaccactttcccctctccgtctcctgcgggcgcaatggaggaggaggatgaggaagcgcgggcgctcctggcaggcggccctgacgaggccgacagaggtgccccggccgcccctggagccctgccggccctctgcgaccccagtcgcctggcgcaccggcttttggtgctgttactgatgtgcttccttggctttggcagctatttttgctatgataatcctgctgcccttcagactcaagttaaacgagatatgcaagtgaataccacgaaattcatgctgctgtatgcctggtattcttggcccaatgtagttttgtgtttctttggtggctttttgatagaccgagtatttggaatacgatggggcacaatcatttttagctgctttgtttgcattggacaggttgtttttgccctgggtggaatatttaatgctttttggctgatggaatttggaagatttgtatttgggattggtggcgagtccttagcagttgcccagaatacatatgctgtgagctggtttaaaggcaaagaattaaacctggtgtttggacttcaacttagcatggctagaattggaagtacagtaaacatgaacctcatgggatggctgtattctaagattgaagctttgttaggttctgctggtcacacaaccctcgggatcacacttatgattgggggtgtaacgtgtattctttcactaatctgtgccttggctcttgcctacttggatcagagagcagagagaatccttcataaagaacaaggaaaaacaggtgaagttattaaattaactgatgtaaaggacttctccttacccctgtggcttatatttatcatctgtgtctgctattatgttgctgtgttcccttttattggacttgggaaagttttctttacagagaaatttggattttcttcccaggcagcaagtgcaattaacagtgttgtatatgtcatatcagctcccatgtccccggtgtttgggctcctggtggataaaacagggaagaacatcatctgggttctttgcgcagtagcagccactcttgtgtcccacatgatgctggcctttacgatgtggaacccttggattgctatgtgtcttctgggactctcctactcattgcttgcctgtgcattgtggccaatggtggcatttgtagttcctgaacatcagctgggaactgcatatggcttcatgcagtccattcagaatcttgggttggccatcatttccatcattgctggtatgatactggattctcgggggtatttgtttttggaagtgttcttcattgcctgtgtttctttgtcacttttatctgtggtcttactctatttggtgaatcgtgcccagggtgggaacctaaattattctgcaagacaaagggaagaaataaaattttcccatactgaatgagaagttaaaatgaatgtgtcatgagaatgggcttaacacatcgttggtttgaaaacttccatttttaaaaatttagagtttagtcattagaaaaaataatggactggaaagttatatttatatccaaatatacctatttcaaagtgtatttgtgaggcctgttttagcctgtgtcttttgtattgtgtgttgctaaagaattctacttttagtaggctaatcaacaatgaaagggttagaaaattgctgtggaacatccaggtgaacttcaggaaagacagtgaaaaatggaaaacgttggagcttctgttgagataatcttcattaggtatatatcttagggatacagccttttctttatcttatagcaggaaaaaaaaacttttgagggaaatagaagggctgcgttacacaaaataaacaatggcattgtcataggccttccttttactagtagggcataatgctagggaatatgtgaagatgtttttatgaagtctctttctgatcacgaacaatagcttgcgctctactctgtagttatgtggattgccgagcaatgacccttttcaatttcttatttctgtgttactgaggaccctaatcacttagggatgtaattttatagtataaactttctgtacagtttttcttatagtctaataagtaaaaagtgtccttcaaattatgataattgcctatgtacatggataaattaaaacactgcacacggagtactctcatgtcttcttttgattttaaaaaatacaaaaacactgattttaacttttattcatgcagaagattatctagaagaaaacccaagtcagaataaagagaacttgcccaattacagtcactgaaagattatgggggtagctttttctccagagtagaactttaagtaacatatgtggttttttttatattaagtaaaatatgagtatgaagcttctctgacaaactttaaatactttttaatatttttcagccttaacatattatttgttaaagtcaaagaatgcagatattttagacaagatattaaaccaatgtatttagctgattatattgtttaaagcacatggcatgatattgtaagtgtaaatgtttgggaacagattgaaagtacgttccttatgcaaggtagcttggcagctttatttacatctgtttttctgacttacagtttattgtgttgatatgacttgtctctgtgtccctacccaaatctcatctcgaattgtaatcc

SEQ ID NO: 10076 - DNA, 1127 bp, Homo sapiens
cgtgagctcccggagtcatgtgaccgccgtcttgacagtgttccacgggcgctgcttcctgcctgggtttggagttgtcaccactttcccctctccgtctcctgcgggcgcaatggaggaggaggatgaggaagcgcgggcgctcctggcaggcggccctgacgaggccgacagaggtgccccggccgcccctggagccctgccggccctctgcgaccccagtcgcctggcgcaccggcttttggtgctgttactgatgtgcttccttggctttggcagctatttttgctatgataatcctgctgcccttcagactcaagttaaacgagatatgcaagtgaataccacgaaattcatgctgctgtatgcctggtattcttggcccaatgtagttttgtgtttctttggtggctttttgatagaccgagtatttggaatacgatggggcacaatcatttttagctgctttgtttgcattggacaggttgtttttgccctgggtggaatatttaatgctttttggctgatggaatttggaagatttgtatttgggattggtggcgagtccttagcagttgcccagaatacatatgctgtgagctggtttaaaggcaaagaattaaacctggtgtttggacttcaacttagcatggctagaattggaagtacagtaaacatgaacctcatgggatggctgtattctaagattgaagctttgttaggttctgctggtcacacaaccctcgggatcacacttatgattgggggtgtaacgtgtattctttcactaatctgtgccttggctcttgcctacttggatcagagagcagagagaatccttcataaagaacaaggaaaaacaggtgaagttattaaattaactgatgtaaaggacttctccttacccctgtggcttatatttatcatctgtgtctgctattatgttgctgtgttcccttttattggacttgggaaaagtttttctttaccgagaactttggattttcttcccacggcgcaagtgccattcacagtgttggtttgtctatcagtcccattcccggtgttgggcccggtgctctcacgcgcgaaacccctctgggtttgccggacctcttgttcccgtt

SEQ ID NO: 10077 - DNA, 417 bp, Homo sapiens
cagcctgggtatccaccccttgggagagtatgtgtgccgtggagccctgcacagcagttcggggctgccagatgggacctaaaacccagtgctgaggggaaaaagtgtatcaagaatgtatacacaaaagttggccaggcgcggtggcttacttctgtaatgccagcactttgggagcctgaagcgggtggatcacctgagtcaggagttcgagaccagcctgacaaacatggttaaaccccgtctctactagaaatacaaaattagccaggcgtggtggcgcatacctgtaatcccagctactcaggaggctgaggcaggagaatcgcttgaacctgggaggcggaggttgcagtgagccaaggtcgcgccattgcactcctgcctaggcaataagagtgaaactccatctcaaaa

SEQ ID NO: 10078 - DNA, 206 bp, Homo sapiens
ttgtttcttctaaaagacgtatcaagggaaaacacatcttaaagtaaaactgagtaacaaaagttttatccaattgtacaattcccctttatctagctcagttcttgtacgactgcagcccaaagcctgctctgagaaaagggcaggcaacgtggagatttgtgttctactctttctctggcctttggacttccactttattgcag

SEQ ID NO: 10079 - DNA, 164 bp, Homo sapiens
acggcaaagataaaaattgcaacaacaccaaatattggtgaggatacagagaaactggattacttatacatatggtggaaatataaaatggtacagccactccagaaaacactttctcagtttcttaaacatccaaacacgcagccaaccatatgacctggcaa

SEQ ID NO: 10080 - DNA, 359 bp, Homo sapiens
ggaaagggggcaaagctgattgattacaagtaaaatgaaaaaatactgtttctgctaagacagaaagggacctttaatacgcgcccttttaatctgattgtcagaagtaggacagtgcacagtttctcaaagatggccagaggatctgataaaatacaaaagaattgtggaggcgatagtaaacattcttcttcctgtgctgctgatccacaggcttctctttgagaatgactggcctgcaagctgacaagggtgtttacccgctgactctggtggagtccatttggttcaccagaagggcttgagggcagacaaaagaccttgagctctctgcgtgtgccagtcatcctgtgtttcct

SEQ ID NO: 10081 - DNA, 476 bp, Homo sapiens
ggaaactgttgagaaatcctcaaatgcttggtggatgaatcttttctttttgcttctctggatcctctccggacccctctccactctagactgggccctgggaggctgtcctgcatggacctccttgccctctggcttttttgagggtttggccaatggggagcacaataccctgaatgtgtcccaccaatattcgtaggttgaaatcctaaccctgaatatgaatgcactttactttggggagtaatcaggtcatgagcatggagccttcatgaacgggattagtgcccttataagaagagatgcaagggtttgatcttgctctctactctccatcacttggggatacaacaagaaggtgaccatctgcaaaccaggaagcaggcccttcctagacaccagatctgccagcaccttgatctcggacttccagcttccggactgggagaaataaatttctgttgtttataaggcac

SEQ ID NO: 10082 - DNA, 694 bp, Homo sapiens
ggcaagcagcccttgctgattggctcaaagatgtcgagtagaaaaagcagccaatcctgccttcaagccagaactgtgccatggagacattacaaccactgcatggcgagaatgtgtacaaacctgtccgtgccacaaatatcagatcctagttacaaagactgccgccgaaaggaagagcctttgaagccaacactgacactgacctgtcatctacattctattactctagctctctttcggagggaaaaaaaaaactattttaaccaaaagcgcatgagagataaactgtgcccccgctaagatgactcactctattgaggatgaatttccaaacggacggcttagagagagtcccgatgagagaggggctctagaagggtcccattgagggacaaagttgcagatgggggcaggggaggcgggacgagggccaaagacacacaaatgccggggaggggaaagtctccccgcagtctccaaaatccgaacgtgtgagtggctgtgtgtctggacttgaactgagtaaataaacggctctgctaggactatgtgctcaggaaggtggcctgaagttcccagaaggctccgcctggcaaacacctaaggcgcctggaggggcgcaaggtcaggtcccggcgggaacagatctgggaggaaacctcggggggtcgagaggggtgtgtctggggcc

SEQ ID NO: 10083 - DNA, 474 bp, Homo sapiens
tgaagcacacatgctactggaagagaagtccgttacaaaagaatatggtaggtgatgcagagactcacaagagcacaaaagcagcagcagatgactatccgagccactcagttaaggtgatttttaagctatttatcaggaagccaaagatgaaaggggcaatccaaatgaaagaaagaacatgaacaaagacatgcagtcctgaaggaacaggaagtattagagaacaactatgactagagcctagagttcatgtgggggatggtgagaactgagaatggaaaagtagagaaggtaaaaagttgaagaaaaggaaatgaaagatcactcaagttaggcatgcagactgggaatagaagtcagaaaaagaagccctgaagaatccaactagatatgaaaagaatactgagattaaaattagagaagagggacaagcaagataaaattataacacaaaaacaagaagaaaaaata

SEQ ID NO: 10084 - DNA, 670 bp, Homo sapiens
tcttgcccttcacctccttctttgcctacaaggtctccccgattctcatctgcccataaccatggacacagccccaggatgtgcagggtcgagctcccaccctcttggaaatgcctctgaagctgcatagtcctcccctgatgcttgtgctcccttaggggatctccaggcctttgggtgtggtctggcccctggagaagtgtggtcgagtggaggatggggtcctgcagtggccatgatctggacgcccacatcacggggagttttgagggattgagcccactttagcttgggtcttaaaaccaccatggtaagaagtgtcaacctttgggggaaaaataaaaatatatagaaatatttagaaaaacccaccatgggggcctacaagttcctgagtcaaggcctctgccgagactccactgaccagcatggtcactgaagggcatggaggaccgtcctgtgggaagaggcttggacatgcactgtgaactcaagagcaaggacactgtgttgatctggagatgtgggcaatgggcgagtacacacggagcatcctcctgtgccttggaatgggacaaggtggattccagcagccctcagagcttctgctgggtggctttgcaaagaaggggctttccactctactgtggacatctgcagagattgggca

SEQ ID NO: 10085 - DNA, 328 bp, Homo sapiens
ttccttttgcccaggcacatcctcaaccttggtgaaataaacctctaaattgattgagactcacctcagtcattttctatcctcagcaattttcaagtatacaatacatttttattaactataaccacgatgttgtagaatagacctgttgaatttttcctccagtctaagtgaaattttgtatgctttgaccaacatctccacaacctaccccaccaaactgctctcagcttctagacacacacattttctttttttattttttaacttaattttttgttgttgttgttgttgttttttgagacagaatcttactctgttgcccagg

SEQ ID NO: 10086 - DNA, 148 bp, Homo sapiens
catacctcccaagcttataggccatgagaattagtctacacaggtagaatggccttacatcactgttcagacaccttggcctcattgtataggaaaatcttaactctgtttttttgttttcgtttttttaattcttgtcagtcaaaga

SEQ ID NO: 10087 - DNA, 414 bp, Homo sapiens
gaggcggccgttgcagtgagccaagatggcgccattgcactccagactggtcaacaagagcgaaactccgtctcaaaaaaagaaaaagaacagttagaacttttttttttttttttaaagaagagagttcctttctacagcagcgtcagccaccttttggcgaaagaattattgtctagcctttattattctttgtagcaaaagaactccttcccctcctcccatactagtttcactgttgccattacaaatattttattagtacgtatttcctagattcaaagcttcagtgggctttcttcaagtagctgttagaataattgttttgttttgaccataccctttaatattaacaaatgggaggggagattgttaacaaaatactagaatgctcttaactttttttttaactta

SEQ ID NO: 10088 - DNA, 404 bp, Homo sapiens
atccctctaggcccagggactatcaaagtagaggtggttgcctgagactgtaagggctgattttgagggagaagattagttcagtttttctttttgtttgtttgagacaaggtctccctctgtcacccagtgcagtggcgccatcacggcttaccacaacctctgcctcccaggctcaagcaatcttctcacctccacatcctgaatagctgagaccacagatgcacaccaccatacctgccttggcctcccagggtgctgggattacaggtgtgagccaccacactgagcctggagtttctctataaatcagacattaatatcaaaagcacactgatgcatggccagcatctgatcccttgtattggaaaagcagagttttcttggaacatagatctactctt

SEQ ID NO: 10089 - DNA, 276 bp, Homo sapiens
actctcctgtcactgccaagctgaccactattctaacttctatcaccactgattaattttacctaattttgaactgcatttaaatggtgcttttttccccagcaaaatgtttttgagattctctgtgcagatgcacttatcagtaggttttcttttctgttttatttgctaagtcatatttcattgcatggttgtacccaattggtttagcctgctaatatgcactagatggttttcctattgggggtattatgaataaagctgctgtgaactctt

SEQ ID NO: 10090 - DNA, 516 bp, Homo sapiens
tctgatatggcttcataggaacctggccgtccactccacccacgtgccttagcaaagtgcccttggtgaggctgagggactaggcagccaggactcctgaggggaccttatcagagagggaagccacctcggactgagtggtgagtgctgctctaggactgccctaaaactggatttgaacaaaagaccacatgccgtatgactccattggaatgaaacatccagaacaggcaaagccacagaggcaggaagcagcatccccccaggtcagcaacacctctggagctgaggctggcagaatgtggcgggggctcctctgagagcatggcagcttctaatggacccgcgtggttagtttgagagaaacagtcaccagaagacagccatatgtgtccgggctgggagacctaacatttcagagccaccaaccctgcatcactggctgacaggtggctggacatcgtgtcaccactgtcttctgggaataaacatttctcagctttccaaaaaaaaaca

SEQ ID NO: 10091 - DNA, 313 bp, Homo sapiens
ccagactctgtgacatctccactcctgcctggttttcctccatgaccagcatccccccaggtcagcaacacctctggagctgaggctggcagaatgtggcgggggctcctctgagagcatggcagcttctaatggacccgcgtggttagtttgagagaaacagtcaccagaagacagccatatgtgtccgggctgggagacctaacatttcagagccaccaaccctgcatcactggctgacaggtggctggacatcgtgtcaccactgtcttctgggaataaacatttctcagctttccaaaaaaaaacactg

SEQ ID NO: 10092 - DNA, 499 bp, Homo sapiens
tttactaaggtagaaactgagggtcacctagcaagttagcaaccaaaccaagattagaactctagctttttgtattgctggttcagcacatcttactgccccagttgaaggctggattagttataactcaatcccgtggaaggatgtggttaatatcaaataggtggtggatcattgaaaacgttaaatgttgattctttaattagcacctcctcaatcattttggaaaccccaaagtacttagtgaactcaacaggtgtatggtgttcaggtcaggaaaaacagatctagtaattaactgtcaccatcaaaaggctgggctttcttaggtcaacatgaagactagctcccatttccactaccacctgcactgtaataatttaatagattgaaatgctgagaatgctttgggtaaatgtaaaaacatacagaaaggaacttgatttagtcctacccagaatcagaataataccctaaagagctcatttatcttaactga

SEQ ID NO: 10093 - DNA, 538 bp, Homo sapiens
gatgggatggtagggacagaaactgcagggtccgcagaaggaactgctcaccgaaagccaacaagcttgccctgtggaatcccagaaaggcccaggaacttcgggacatcactgaaggcagagtgaagagaggaagagaagacagagaaatggaggggagaaaactattaaaataagtaataagaaaactttccccagaagtgcagaatctgaatttccagtataaaagggtccattgagcgccaagaacaatgaaggaaaaaaggtcccactcaggcctatgtatcattgtgaaatttcagaactagagggataaagaaaagatcctaaaagcttcccgagagataaaaaagaagatttttacaaaggatcagcaatcagaattgcctcagactgctcaataaaaacatcagaagctagaagaaaatagaatgaggcgtcaaaatcctgagggaaatgattcccacctataatttcatattctgctcaattatcaattgagtattgaagggaaataaagacatttttagacaaacag

SEQ ID NO: 10094 - DNA, 440 bp, Homo sapiens
cccaaaaccttaaatccagtactagtgttcttttctcaccatatattttcaacacccatggaactgtaatcccattttcccactcaatatctcattacaaagatgttccattcaaatctgatccttcaacattaagcttaaagcgcctctggcttgtccatgtcaactctccccttgtcccctaaaagctacatttaagcacagtgtgtataaaacagttcgttgttttgggataaggagttccttaaagctacgtttaagcatagtatgtataaaacaacagtttgttgatcaaacttttgtttgttgctttatatatattgcaacagtttgttgttttatacatactgctcttaaacatagctttaaggaactccttaaggaatgggaactaagtgcaatgtggagctcattttttactgaatcattaccttttagta

SEQ ID NO: 10095 - DNA, 414 bp, Homo sapiens
atacccagagaggcagaaactttggctgccctcctcctaaaagccatatgaaatgaattgccaggaaccgtattttaacgtcctttcccttttcccttaacgttgaaagtcacaaactgtagtaaaatcaggaagaacgtaaaaatgctgggggccagcgctgggggtgggggactggggaggactgaggagggggccactcagtctttgaggcctgacttgatcttgataggtatttctcaggctgttagtattccgatgaagcttagctttactgtcaagtaaaatacaggaaacatttttttttaatgttgttctagttactgtaaatgaaacggttaaaatgtcataaataccttatgataaacatttttcaaatttgcttaaaaagcaacacatcagtaggcagggtat

SEQ ID NO: 10096 - DNA, 372 bp, Homo sapiens
aaaaaataattcttggcacctccagcctaagcataaccaaccacacataggctgtaagttatggatgaatatttatatttatggttttttgtttttttttttttttttttgagacaaagtctcactccattgtccaggctggagtgcagtggcgcaatctcggctcgctgtaacctctacctcctcggttcaaatgactctcgtgcctcagcctcccctgtagctgggatttcaggcgtatgccaccacacttggctaatttttgtatttttagtagagacagggttttgccatgctggtcaggctggtcttgaactcctggcctcaagtaatctgcctgcttcaacctcccaaagtgctgggattacaggc

SEQ ID NO: 10097 - DNA, 472 bp, Homo sapiens
attcgccggcccgcgtcgacgccctacagcacacctagactgaacgggatagcctatggcttctaggctgtaaacctgtacagcatgttactgtactgaatactgtaggcagttgtaacgcagtagcatctgtgtatctaaacatctaatcacagaaaaggtacagtaaaaatatggtatgaaaaattaaaaaccacacctgtttagtgcacttaacatgaatggagctttcaggactaaaagttgccctgtgggagttagtgaatgaatggcagattaatgtgaatgtgatggtctacacgctcaggctacactgtatttattaaaaaccagtaacaggctgagcggggtggctcacgcctgtaatcctagcactttgggaggcccaggctggtgggttgcctgagctcaggcgtttgagaccagcctgggcaacatggtgaaacccatctactaaaatacaaaaaaaaaa

SEQ ID NO: 10098 - DNA, 523 bp, Homo sapiens
ttatgggctattttttcattgtcaaaaggattcaaggggatggggtgctactggcatttcgtcaacctgggcgggatgctagacatcatgaaatgctcagacctcccgtactgtgaagaattcccaagacaacttttgaatgaccagctttatgtatatgaaaaccctgtttatctgagcctagaactgtctttgcacatgtaaacgtgaaatagcgtttgtgcgttttgaaaagactcagtttgctaggaattcattcccatgtaaattaagacgactttattttgcttggcaccttaaccaagagtttgtttgccattttgaaaatcgggttaccaacatcagagtcaccgataaagcaccaatatcagctggcattgcagctattgcaaccacagcaattctcatagggtgtgggattggactacttcattgtactttattgtcttctggtttagttgtgcttaagccttcacgtaatgaaatacatgttattataaattttattctttacagtgaagca

SEQ ID NO: 10099 - DNA, 445 bp, Homo sapiens
tagctcctgcctgacatgtgcagcatattgctaaacacatgtgagacattattgtagtgatatttcctatagaaaacaccttggtataattcaagatgaaaaatagaatatacatgagaggtgaaaaggcaactttgattagtaaagtgctgacatcccagttggaagcactgagaagtacattcaattgcctctggcttgctgaatctgtctatcccatacccacccccatctcacagggctaacagggaagcacattttgaaaattctgatgaatgcattccaattctcttttggtgggaaaggctgagtttgcagggaattggtagtaaagtattggcactttctttgtttctataatatcaataaattgcaaactgtcgtttcttttactgaacatgtgtttcaaatacagagctcatcattaagtcctgtcattttgtgc

SEQ ID NO: 10100 - DNA, 257 bp, Homo sapiens
gactcagtctaatctattagaaaaactggcatacagcaaagagaaattttagaaagagatatatactggatacaaaaattttacatcttactcaaataaattgggggaagggagctgaatggggatgaaggagagagaggaagaatataaacgtaatttacaaaatagctaacagaatcagactacctgatctgtggtacaaaatcataatgcttaatttaattgaaacaactctccctctcctcctagaaactatc

SEQ ID NO: 10101 - DNA, 270 bp, Homo sapiens
tctttccttctctctctcctacagatactaaatgctgctggaacaatgaaaagaaagaacggatgtcacaaaaagcattttcatttgatgaatagaactaaaagagcaaagcaattgaaagctcaacacaacacaggagggatccatggctgaggattgtatttcagaaccactgactgctcttgacaattgttaacccactaggctcctttggttagagaagccacagtccttcagcctccacttgataccaatacttaggaagaccaa

SEQ ID NO: 10102 - DNA, 798 bp, Homo sapiens
gatgacatggtccaataaatgaagttaaaaataacaggtggcaacctcaggcagcttcatcccaaccagtaagaaagtaaatccttttgtaaactaagaggaagtattaatatgggcgtttgagcaaacatttaagtgttaggacaaagaattaaaaactagcacaggcacccctgaagcatgataggatggcaacagaagggctgatttagtttccaagaaataacttacaggcagtgttgtgcgtgtgtctactacttaggaacccaaaacaaaccttcagaccgttttcatgagtactgagaccaagaaaaccactgggcagtgggtggtctggaaatgtaaatgttgatggtactccagtaatgagtcatggaacaatgtttcatattgaaaatgtttttgtaaatgtgggtttcagggtttcaaagtgaacccatatgtgttaggagaaaggacacaccaaagcagtaaaataattgggtcaatataaaaagtagaatattgcccagagagaagatgtggataatttctaatacggatcaaaggcaccaaaaaggtgagctgtgagtaagatattcagacctgcaccgtcccaagcagtagccacagtggcaagtagcctcctcactggacagtgcagctacggaatgatgccatcaccggaaagttccatcagccagcaccgatgcagacctttgcaactgcccctcacgctggacagcacctgtttgatagattgtccactacgcagtgaaaagcctgggtgaaaagcggtatttggtagaagagcaaaaa

SEQ ID NO: 10103 - DNA, 451 bp, Homo sapiens
tttcaggtcagatgggtaatgtgctgacattgtaacaaggtttgagggtggtacatctcacatatgtgtgtgagcacccaatcatcatgctcacgaactacagaaggatcaagccaaatacatttccgataaattacctagtcttaagtattccgttacagtagcacagaacagactgagacgcgttattctggcctatgtcccttggttgttgcatgacaggatgttcccttcactactgagagccgatgtctccttgtctcctgttacttcttaggcattagtaccttgaaagtttgccataaaatctcagttagggcctcagaagacagacacatgagataactaggctttagaaacactccacccccacacactcagctatgaaaacggtttgtttcctgctgctggaaatccacacattcctccttgccagtgtacacacaagcag

SEQ ID NO: 10104 - DNA, 438 bp, Homo sapiens
aactgccacatccttgttggtttagtccaagagatcatttgcaacaacagtagatgtccgggttttgtttctgtctttttattatgaaaaactatgttaagggggaaaatgtggattatggtaaccagaggaatccctagccttgttttccttagaagacttgtttagtgttttatcagacgtctgttgtagttgtagacaggaaagcttgtgagaaaaacaccacatggagcctgtaaatgtttttgcacaacctgtaaagcattcttggaagtggccagtaaaaaggggttttaccatttaaaaaaaaaatgtaactgtgtcattgtttacatctgtaactttttcctcccctgttctcattacaccattctggcgaaaatgtaggcaaagtagcttccagttttagaataaataaccatttggattgaattcacc

SEQ ID NO: 10105 - DNA, 350 bp, Homo sapiens
tctgttcccacctttagtcactagaagatgcagtgttgtcaccacttattagtaaatcacaaaacgaacatttataaagtccatgttttcttattcagaggagggaatggggttcattacttaagtctggggaaaagaagagatatcttgtatgggttaatccgaccatgagctccgattaacccatacatgagccttccctgccacattgagatgatccttactgaaaaggaacagattgttcctaaaccagaagaggaggttgcccagaagaaaaagatatcccagaagaaaccgaagaaacaaaaacttatggcacgggagtaaattcagcattaaaataaatgtaa

SEQ ID NO: 10106 - DNA, 419 bp, Homo sapiens
catttccttgctgtctacctaaggcaagctaactaactccttttagtccaccctcaggagtggagaccctaactgctgttagggagattttgtgttgatcttcctggccatgtcttcctggaaagggacattttgcagggagcagcagctaggatttcccctaggcctgatttaggggtccttggaagaaaggcatacatgcatggtgtggtcaaaatctaggataaaggtcaaccttgacacctctcaagtattgttcaattaaatgtgttatttttttctttttgaaagaatctttgatgtgataatcagagtagggaacaaaatttagtatctaaattttatgttagtcttccagtattatgtatgtgccactattatgtatgtgccacttgtttatcagtaaaggaaataataat

SEQ ID NO: 10107 - DNA, 433 bp, Homo sapiens
ttttattgtatataaattatatctcaattgaaatgtgaaaacaaagcaataaaacatcccctgttcccatttcaggagtcatgtctgggctgcctgggaggacaacaggaatactgatcgctagagcaaataaaagactcttggcagtgggcaacttggtcctcctaaggctttagaaattgtcttgctccatgaaaatgacatgttctgaggccccagtctggggtatactgactttcattagctaacgtcaccatccgtggtgctccctcacttgccaacactgcactgtagatttgactcccaagagcctaaggatagtctctgccaatcctccagtagccaccatcatagtagtttttacccccatcagtcagcagtccagtgtctactaacccctccattaattcacagcagttcttaccaccccttt

SEQ ID NO: 10108 - DNA, 747 bp, Homo sapiens
tgcattagtcaaggtctagacaggaaacagtcagtgtactcaaagggttaattaaaaactctttaatgaagggattattcacaatagtgtgagtagtaaaggaaacatacaagggatagtggagcacccagggactggcaaggtagtgtccccaccctaggtgcaatgacggagtggggatgtgtcactggaacccagcaaaagcaatggccatgggagagaggggtcctctaaaggagctgtgaccttggttaaggaacacagctctgccagaaccatatcctgggagggagagaaggcaaaaaataaacaccttggcctttcctcctgctcgctgatctcttcctggttctttcccttggctggactcagatggaagccagaggacctggagcccagggctttagagactgaccttctgactccagagacaaaaagcagggcagagaggatcaggtagggaaggaggagcagaccaagaatactgagcacacccacctgtcaaagtccaaactcttgagattaacactttacgccaccagttctggctcctactcaccttgctgacttgtcacccctgaaattaggacttttcatctttttatgtcccacagctccctcgttagctcctcagaaaaggtgagacattgaccagattagtattggttttgaacagtggatcagaggcaaacagtcacccccagagcagacagtggaaggaacttgcctggctcacactcatgagga

SEQ ID NO: 10109 - DNA, 268 bp, Homo sapiens
tcacaattcgctaacaatatgcattttcacaatgtaaagctgattttcctttaaccaaatcaaacatgaaaagatagctgcatgcaatgggcaatctagatcattagaagattgatgtaaaattagaggacactgagactggaatagattgcaaacttcagggagctcagaaaacttgtaaactctacattttgaggaaatatgttgtcgatgcttttgcaactctatgcagtaacttaacaaataaagccttaaagtaacttatcta

SEQ ID NO: 10110 - DNA, 923 bp, Homo sapiens
ccctataaaccacccagggtcacacaagggccatccacggtgaccagcggtgagaaacgcaatgctgtcctcgtgccatgctggaggtgaacgaggagaacgtgagctggggtctcctcaccaactgctccccccaccccaacccccctgacggccagggctgtgtccggggctcagggcacaaggctccgttagctgggcagcagctggcccatgaaacagccctttcagctccacctctgaatggcagttctatgggctcctcggaagaacacaggcgccttctctgtgtcacttctccgctcattagcagagctgcagaaatacactacaggactcaaaattgagaacagtgtgtccggtatgagccagaaggaaaaaaaaatgcacgaaggggccttctgcaaggttgctcacaagtcaaacaggcagctgtgaagggctctgctgttccctcctcctgttttcacatccctcgggcttccagaaacttaaagccgttagtgtttcatgcaagagagagcatctgtgatccacggagaggcccctgggcagtgtggttcagtgggaagcacacaggactccctccccagtgctcccaggatcagctctttccctaaagagcaaacctggttatctcgcaatgacctagctaacacaaatgcaacatcagccggggcagcctgcccccttcactctttgcccaccatcagctgtttggcagtatccatatacgcctttaccagtatttatttaatctttttgtttaattcactctaaaccaactcacttcttaaaaatttctctgccttataagaaataatagccatgaaatcactggtttgatgtacggtttatttatttattccaataaacactcattcaatataaaattcaaataaattcaaaactaattaaattta

SEQ ID NO: 10111 - DNA, 658 bp, Homo sapiens
  misc_feature (644)..(644): n is a, c, g, or t
aacaacaccccaaaatacgtcttttattgcacccaattttgatttctccaaactaagtgaggacataaagacacttgggaaacagccttcatgcagaatttgctattttaatggcccttgcccaccaaatcttttacatttatttcaggcacacctaattggacaaactttttgtgttggggggtggaaattcagctttgttgaatgcttctaaatcactccactgcgttttcatagaatcagcaactctttttttaacaatcatacttctgaattcagcaaacatggaattacgtttatgtaagcagcacacacaggcttgggaagaaacatggctgactttaggaagtagagcacaactgttgggagcacaagcgcccatttgtgctggtgagtagcagtcattggccatagcactgagtgtgccgtggacatcattcatgtgtttgacagagggaaaaggaaagggttagttgttgggtgatcagggtaagtggtgctccatttagagagcttctactgtactttggaaggaactacctgagtcagacaagtaaagatgtataacataataactggttaagaagaatgtgcattgcattctccatgcactatctttcctccagcctgggtgacagaaacanaattcgtctcaaaa

SEQ ID NO: 10112 - DNA, 389 bp, Homo sapiens
gcacaaaagaattaaaggagaaaactatagaaaaaacaatgaaagataggtaagtgagcaatattctggtgacttcttttgaagacatcaaaggataaaacttaccaaaaggccagaatctaaatagtcactttttcactttggcttttctgtgaggtcacatttccttttaatctctcacaatgatagggtatttgggtcataacacataaatattactggaatgactgatttcattaatgttcaaagacacaagcaacttagagcctactttagatagtttaaatctattttaaattgcatttgtaaaaattcactatgtttactacccattgaacatgcaaaaattcctgtgcagagagatttagaattaaaaaagtgtaataaaa

SEQ ID NO: 10113 - DNA, 591 bp, Homo sapiens
accttgttggccaggctggtatcgaactcctgacctcaggtgatccacctgcctcggcctcccaaagtgttgagattacaggcgtgcccccacgcccagccaaaagaaaatattaactactaactttgaagactcctagacatctattcccatttctatccccttttccttcagacataacaattatcctgagatttatgtttataattctcttgcttttctttatagtttcagctacttactccaaaactatgttgtttatggatgtttttgagttttatataactatttcatatatcattctgtgactcgcttttttgtcaacattatgttcctgagattaagtagtgtagctataatccattcatttttatgggtacagtattccattgcttgactatattacagtttttaaaatccattctcagttgatagaaatgtgagttgcttcaaagtttgaatttatagttctattacgaacattcttgtacatgtttactgatggacatgcagaggctgttctagggcaagggtcatcaaactttcttgtgcaaagggacatataggaaatattttaggctttgcgggcca

SEQ ID NO: 10114 - DNA, 422 bp, Homo sapiens
tgttggcaaatgcagatggtagcaagggctgtgggagacgtgagtgagtttcagtgacagagactagcagggctgaccgggtgacttctgcccagctctggtaaaggttggccagtctccagtcatactggtggactgtagtcagtttcacccaatgccccattgatggacacccagctcttgtccacggctgtgctacttcaaataatgctgcacaacagacattcttgtgcctacgtcttcgtacctttatcttaacatatctcaaaaggaagttccaggtatggaactgctggaactgtggttggatgggtttaaaatttgctggattcaataaatgatgctgaaggagtgtctctccccacagaggcccacgtgagaagtagccacaacttgtttgccctctaaggagccagaggaag

SEQ ID NO: 10115 - DNA, 839 bp, Homo sapiens
agggcggggtttgccctgggccgctgccggtcaggtcggccgcccctgacagctccgggagcctcaagcgcgatcagcggcgccctcacctcgggacatccacacaccgaccgctcctgctccagaggcaacaacccagcgcgcctagcctggcgccgtgcagcgaagcccaagagctggcctcgccacgaaggttgaaccagccaaattttcgagacagctcacggcttagaggaaggttcatctaaataaaggccggctaaagtgacattgcagggattaaatccttctttggctgcctgtgtgaccagaaggcttatttgcaagtttcttctttcctggggtccagattattaggtctccagcgccctgcagcttgacagaaagagaagcatgaaatgaaggtcagagatgagatcccgcagcagggacgtgggggcctcccaggggcatttacgcaccagagtgcaagattctctggccatcaagggaaatagcaaacagaagcctttgtcctggggcacagcacctaccacaaagcatcagactccacgtctggccagaaagttcctggagtcccatcaggccagtgggtatgtaacatgtgcctaattgtacagctagagcctgcaagttcaacgtgagggaaggtgggaaatgtcttgagtgaggcgagcagctcctggctgggctgggcagactcagctaccacgttcactgccttcctcttcactaaagccgagagggaggctgctcagctctcaggaaaactctttttgaaccctggggcacctgctgtcctcagtttggcatctcccaccctttgagcctcttctgct

SEQ ID NO: 10116 - DNA, 690 bp, Homo sapiens
ggaaaatgattttctttgtaaatatatagcatcgtgtttggtttgggatgtagagtctatacctggctgctgattgcgtcgtttactacagctttttttaaataagatttttgctttaccatttatcataatgtagtaatgaagcaaaatggtcaaaactgggtgtgtgtgaacagagatacacccatattcgtgtatatacacatccacctacatgttttggtctgtggtttaagagactatttcaaggttccatttttataagctaaaacattctaagttaagatggaagaaagccctaaacacagtagattctgagtttttatgtgtattttaaccagagtttctgatagtactgtatctggctacctatatttccagatctaaagcaagaactactctaagtactgcatttggaatcctcctccattaggaatggccaggacaagtggagctagccattttcattacacggccatcccaatggacactggatccctggtccaactgtgtagagcggggactataaacacacatcaactttctttctgtttgctttcttttccttcttttcaaactcttaaactcaggcctttatgctgtgagtgactagtccaagaagcacacattttgtagtagtcctgcaccagccctgctcttgaataaaaaggaaaattactggctgcaccc

SEQ ID NO: 10117 - DNA, 744 bp, Homo sapiens
ggaaaatgattttctttgtaaatatatagcatcgtgtttggtttgggatgtagagtctatacctggctgctgattgcgtcgtttactacagctttttttaaataagatttttgctttaccatttatcataatgtagtaatgaagcaaaatggtcaaaactgggtgtgtgtgaacagagatacacccatattcgtgtatatacacatccacctacatgttttggtctgtggtttaagagactatttcaaggttccatttttataagctaaaacattctaagttaagatggaagaaagccctaaacacagtagattctgagtttttatgtgtattttaaccagagtttctgatagtactgtatctggctacctatatttccagatctaaagcaagaactactctaagtactgcatttggaatcctcctccattaggaatggccaggacaagtggagctagccattttcattacacggccatcccaatggacactggatccctggtccaactgtctaaaaggccagttgttcctttctgtggatgtggatgtctggccttcacctgaggtagagcggggactataaacacacatcaactttctttctgtttgctttcttttccttcttttcaaactcttaaactcaggcctttatgctgtgagtgactagtccaagaagcacacattttgtagtagtcctgcaccagccctgctcttgaataaaaaggaaaattactggctgcaccc

SEQ ID NO: 10118 - DNA, 689 bp, Homo sapiens
ggaaaatgattttctttgtaaatatatagcatcgtgtttggtttgggatgtagagtctatacctggctgctgattgcgtcgtttactacagctttttttaaataagatttttgctttaccatttatcataatgtagtaatgaagcaaaatggtcaaaactgggtgtgtgtgaacagagatacacccatattcgtgtatatacacatccacctacatgttttggtctgtggtttaagagactatttcaaggttccatttttataatttttatgtgtattttaaccagagtttctgatagtactgtatctggctacctatatttccagatctaaagcaagaactactctaagtactgcatttggaatcctcctccattaggaatggccaggacaagtggagctagccattttcattacacggccatcccaatggacactggatccctggtccaactgtctaaaaggccagttgttcctttctgtggatgtggatgtctggccttcacctgaggtagagcggggactataaacacacatcaactttctttctgtttgctttcttttccttcttttcaaactcttaaactcaggcctttatgctgtgagtgactagtccaagaagcacacattttgtagtagtcctgcaccagccctgctcttgaataaaaaggaaaattactggctgcaccc

SEQ ID NO: 10119 - DNA, 293 bp, Homo sapiens
ccttattttcaaaaaatctttagaatttcaaatattattatagttcatgtaaatatgtagatgaagaatagttgtattcttccttcttcctattttgtagcatactggaactaaaataataataagatatgacactaatatctttctgaaaggcaaattgaattaccaattctaaatattttcttttttgatatagtggcatatggtacatcaacttacatatctaagtataaaattcacatttcagagtccagatatttatgtaggttcttgaatgtttcccttttatcttg

SEQ ID NO: 10120 - DNA, 635 bp, Homo sapiens
ggtgccaggtgttactcccagggccacccgtaactgtgaatgtgcaggaaccctgattaggccctgggaatgagagtttggttccggtaccagggaaaccaccagcatcggcagaggtgatagctggggaggagcggggatttggacgagagacacaggatgagtaccgggggcagccctgtgatcaacaactgctgcaagaggggccgtttgttcgactcactagtcttctgtggctctatgcggtactaaagagcagaagacagaagatacaaaaaccacaaaaattagccgggcgtggtgctgcgcgtcaataatcccagctactcgggaggctgagacgggagaatcgcttgaatccgggaggtggaggtttcagcgagctgagatcacgccattgcagtccaacctgagcgtccgagcgagactatctcagaaagtaaagacagaattaaagtgcccagcgcagtggctcacgcctgtaatcccagcgctttgggaggccgaggcgggcagatcacctgaagtcaggagttcgagaccagcttggccaacttggcgagacctccttaaaaatacaaaaattagctgggcgtggtggcgaacacctgtaatcccagctacccaaggaggct

SEQ ID NO: 10121 - DNA, 617 bp, Homo sapiens
caatgcctagtcacctcagattttcctgtacctgcaggtatcaccagtgaagcctgcgaagcagcaaagatggcagtctgccccgtcttctaggagctctgtcacagggagacaagccgtgctgtgctggcggaccacttcagctcatggtcacctcagacactctgaagcctgaaggctggaacaactaaattgcccaaacagcaaatatgacagcatctacagaaatcattttatttgagttatgtagcaagaacccaacttaagcaaatataaaatttacaactaagtcactatttggatattaatgtgtatgctaaactgatttgttcatgggctagtcagctattcatatgatctttacaattttctgaattccattttttggttaaaaaaagaaaacaagctgatacttttatcactttctaagaaacatttgatttaaattcttatgccttcaatatctcatgtaaaatgctagtttcattactactgtaagtaaatatgtgtaaaacagaaagtatctgagacaagtctcaatcagttttgaagtttatttggccaaggttaaggatatgcccagaagaaataaacatgcaatcacagaaacagtccct

SEQ ID NO: 10122 - DNA, 278 bp, Homo sapiens
taaatgaggataatgactatacccaggtcacaaggctgttttgagaattaaataaattagtctgatctatatgaagtacttagaatatgcctggcatggaacgttacttgtattcattatttcagatcctaatcataaattatttaaaaaattccatgtatggccaggcacggtggctcacgcctataatcccaggactttgggaagccgaggtgggcagatcacctgaggccaggagtttgagactagcctggccaacacggtgaaaccctgtctct

SEQ ID NO: 10123 - DNA, 437 bp, Homo sapiens
cttcggttcttgatggagatcagaaaaattgcaagagacttcatcatctgtttacatatacttaggcaccgtcttatgttgatattgtagaatgaagaaacataactcagtcacaaaagcatccaaattaaaggcctacaacttgcacttgaaaaaccaattatgagctgcaacaacagacctaacaagttaaacaaataaaatataatgatttacttcctcctggagatgatgtgagactaaatgagaaaaattccattaagtactctttgaacatgtcatataaatgcatgatattaacagccatcattattttcccaacattttctggctcattaatttatatctggatttcaaaagattaatgcaccatttttaattttaaaaagacatgtgaaataattatttttaaaattaaattgatataaattcgtgaa

SEQ ID NO: 10124 - DNA, 1188 bp, Homo sapiens
gtgagctttttgtgccccgacagcgagtggttgtcaccccaggccctggcgaggggggcacgtgtctctgtcacgtgaatccctagtgggggggggtggcacaagactgtcacgcgaggtctgaggaagggggtggcccaggccccaggtcgggggttcttgtcgggcgctgggcctgagtgagcagtaacaaaggtgcactcctgaccctgcctggatctggggaaaaccctctggccacggggcctccacctcctccccggagaggcaggaggaggggcaggaggggggcaggacgggcccgggggggggctcccctcaccgaggcgcgtggacaggggctccgttcctgtgaagctctccctgacatgcatcttcgtctctccatcctggctttggatctagaggcagaaaagtgcagaaggaagggaagatcagctatgccgactttgtctggtttttgatctctgaggaagacaaaaaaacaccgaccagcatcgagtactggttccgctgcatggacctggacggggacggcgccctgtccatgttcgagctcgagtacttctacgaggagcagtgccgaaggctggacagcatggccatcgaggccctgcccttccaggactgcctctgccagatgctggacctggtcaagccgaggactgaagggaagatcacgctgcaggacctgaagcgctgcaagctggccaacgtcttcttcgacaccttcttcaacatcgagaagtacctcgaccacgagcagaaagagcagatctccctgctcagggacggtgacagcggcggccccgagctctcggactgggagaagtacgcggccgaggagtacgacatcctggtggccgaggagaccgcgggagagccctgggaggacgggttcgaggccgagctcagccctgtggagcagaagctgagtgcgctgcgctccccgctggcccagaggcccttcttcgaggcgccctcaccgctgggcgccgtggacctgtacgagtacgcatgcggggacgaggacctggagccgctgtgacgccgcccgcgagaacgccgccgcggggccgctccccacgtgccaccaccgggccaccgcggctcgtgtaaaaactgttgtggaaaatgagtgcgtttgtacggaatgataaacttttatttattcacaaaaaaaaaaaa

SEQ ID NO: 10125 - DNA, 2046 bp, Homo sapiens
ggaccgcgccccctcctcggtccccgcgccccgcgagtccgcgcagttcccgaggcgcgggccctgttccctgcgccgcgccccctcagcgggccgtgctcgcatcaccgaggtcggtccggggcggaccgaagcccccggggcggggcggggcgcgggcgtccgggggcgccgcgggccagcccccgccatgccgcccggcaaagtgctgcagccggtcctgaagatgaaggtggacgagctgttcctgtactggctcagcgaggccagcacgcagcggatgctgaggactgcctgcgccggatcaaggcgcccgggcgggaccagccgaccccgggggacggggagcagcccggggcctggcccacagcccgtcgcgccccggccagggtcgaacccccgggaacccccgggccgggccctgcgctgcccctgggcgccgctccagccccaggaacgcgccccacgttcgaggcacccgtagatccgcaggacgagagtagttcagacacggaaagaagagcctctgcccccggccacgagccaaagcattccgaccttctacttccccagaggacgcccgcaggactccgtcaacgtggatgccgtcatcagcaagatcgagagcaccttcgcccggttcccccacgagagggccaccatggatgacatgggcctggtggccaaggcctgcggctgccccctctactggaaggggccgctcttctatggcgccggcggggagcgcacgggctccgtgtccgtccacaagttcgtcgccatgtggagaaaaatcctccagaactgccacgacgacgcggccaagttcgtccatctgctcatgagccccggctgcaactacctggtgcaggaggactttgtccccttcttgcaggacgtggtgaacacgcacccggggctgtcgttcctgaaggaggcgtccgagttccactcgcgctacatcaccacggtcatccagcggatcttctacgccgtgaaccggtcctggtccggcaggatcacctgcgccgagctgcggaggagctccttcctgcagaatgtggcgctgctggaggaggaggcggacatcaaccagctgaccgaattcttctcgtacgagcatttctacgtcatctactgcaagttctgggagctggacacggaccacgacctgctcatcgacgcggacgacctggcgcggcacaatgaccacgccctttctaccaagatgatagacaggatcttctcaggagcagtcacacgaggcagaaaagtgcagaaggaagggaagatcagctatgccgactttgtctggtttttgatctctgaggaagacaaaaaaacaccgaccagcatcgagtactggttccgctgcatggacctggacggggacggcgccctgtccatgttcgagctcgagtacttctacgaggagcagtgccgaaggctggacagcatggccatcgaggccctgcccttccaggactgcctctgccagatgctggacctggtcaagccgaggactgaagggaagatcacgctgcaggacctgaagcgctgcaagctggccaacgtcttcttcgacaccttcttcaacatcgagaagtacctcgaccacgagcagaaagagcagatctccctgctcagggacggtgacagcggcggccccgagctctcggactgggagaagtacgcggccgaggagtacgacatcctggtggccgaggagaccgcgggagagccctgggaggacgggttcgaggccgagctcagccctgtggagcagaagctgagtgcgctgcgctccccgctggcccagaggcccttcttcgaggcgccctcaccgctgggcgccgtggacctgtacgagtacgcatgcggggacgaggacctggagccgctgtgacgccgcccgcgagaacgccgccgcggggccgctccccacgtgccaccaccgggccaccgcggctcgtgtaaaaactgttgtggaaaatgagtgcgtttgtacggaatgataaacttttatttattcacaaaaaaaaaaaa

SEQ ID NO: 10126 - DNA, 1776 bp, Homo sapiens
aaggaggagaggagagcagcgccgggagcagccgggtctgcacagtcgcgggtcgggagagcgcggcgcccggcccggcccgcggagagccctgcgcgccggcggcatgcgactccgcgagcgctcgctgcgccaggaccccgacctgcgccaggagctggcctcactggcccgcggctgcgacttcgtgctgccctctcggttcaagaagcggctgaaggccttccagcaggttcagacacggaaagaagagcctctgcccccggccacgagccaaagcattccgaccttctacttccccagaggacgcccgcaggactccgtcaacgtggatgccgtcatcagcaagatcgagagcaccttcgcccggttcccccacgagagggccaccatggatgacatgggcctggtggccaaggcctgcggctgccccctctactggaaggggccgctcttctatggcgccggcggggagcgcacgggctccgtgtccgtccacaagttcgtcgccatgtggagaaaaatcctccagaactgccacgacgacgcggccaagttcgtccatctgctcatgagccccggctgcaactacctggtgcaggaggactttgtccccttcttgcaggacgtggtgaacacgcacccggggctgtcgttcctgaaggaggcgtccgagttccactcgcgctacatcaccacggtcatccagcggatcttctacgccgtgaaccggtcctggtccggcaggatcacctgcgccgagctgcggaggagctccttcctgcagaatgtggcgctgctggaggaggaggcggacatcaaccagctgaccgaattcttctcgtacgagcatttctacgtcatctactgcaagttctgggagctggacacggaccacgacctgctcatcgacgcggacgacctggcgcggcacaatgaccacgccctttctaccaagatgatagacaggatcttctcaggagcagtcacacgaggcagaaaagtgcagaaggaagggaagatcagctatgccgactttgtctggtttttgatctctgaggaagacaaaaaaacaccgaccagcatcgagtactggttccgctgcatggacctggacggggacggcgccctgtccatgttcgagctcgagtacttctacgaggagcagtgccgaaggctggacagcatggccatcgaggccctgcccttccaggactgcctctgccagatgctggacctggtcaagccgaggactgaagggaagatcacgctgcaggacctgaagcgctgcaagctggccaacgtcttcttcgacaccttcttcaacatcgagaagtacctcgaccacgagcagaaagagcagatctccctgctcagggacggtgacagcggcggccccgagctctcggactgggagaagtacgcggccgaggagtacgacatcctggtggccgaggagaccgcgggagagccctgggaggacgggttcgaggccgagctcagccctgtggagcagaagctgagtgcgctgcgctccccgctggcccagaggcccttcttcgaggcgccctcaccgctgggcgccgtggacctgtacgagtacgcatgcggggacgaggacctggagccgctgtgacgccgcccgcgagaacgccgccgcggggccgctccccacgtgccaccaccgggccaccgcggctcgtgtaaaaactgttgtggaaaatgagtgcgtttgtacggaatgataaacttttatttattcacaaaaaaaaaaaa

SEQ ID NO: 10127 - DNA, 1590 bp, Homo sapiens
atatcagctcggaccttattccgcgtagatccgcaggacgagagtagttcagacacggaaagaagagcctctgcccccggccacgagccaaagcattccgaccttctacttccccagaggacgcccgcaggactccgtcaacgtggatgccgtcatcagcaagatcgagagcaccttcgcccggttcccccacgagagggccaccatggatgacatgggcctggtggccaaggcctgcggctgccccctctactggaaggggccgctcttctatggcgccggcggggagcgcacgggctccgtgtccgtccacaagttcgtcgccatgtggagaaaaatcctccagaactgccacgacgacgcggccaagttcgtccatctgctcatgagccccggctgcaactacctggtgcaggaggactttgtccccttcttgcaggacgtggtgaacacgcacccggggctgtcgttcctgaaggaggcgtccgagttccactcgcgctacatcaccacggtcatccagcggatcttctacgccgtgaaccggtcctggtccggcaggatcacctgcgccgagctgcggaggagctccttcctgcagaatgtggcgctgctggaggaggaggcggacatcaaccagctgaccgaattcttctcgtacgagcatttctacgtcatctactgcaagttctgggagctggacacggaccacgacctgctcatcgacgcggacgacctggcgcggcacaatgaccacgccctttctaccaagatgatagacaggatcttctcaggagcagtcacacgaggcagaaaagtgcagaaggaagggaagatcagctatgccgactttgtctggtttttgatctctgaggaagacaaaaaaacaccgaccagcatcgagtactggttccgctgcatggacctggacggggacggcgccctgtccatgttcgagctcgagtacttctacgaggagcagtgccgaaggctggacagcatggccatcgaggccctgcccttccaggactgcctctgccagatgctggacctggtcaagccgaggactgaagggaagatcacgctgcaggacctgaagcgctgcaagctggccaacgtcttcttcgacaccttcttcaacatcgagaagtacctcgaccacgagcagaaagagcagatctccctgctcagggacggtgacagcggcggccccgagctctcggactgggagaagtacgcggccgaggagtacgacatcctggtggccgaggagaccgcgggagagccctgggaggacgggttcgaggccgagctcagccctgtggagcagaagctgagtgcgctgcgctccccgctggcccagaggcccttcttcgaggcgccctcaccgctgggcgccgtggacctgtacgagtacgcatgcggggacgaggacctggagccgctgtgacgccgcccgcgagaacgccgccgcggggccgctccccacgtgccaccaccgggccaccgcggctcgtgtaaaaactgttgtggaaaatgagtgcgtttgtacggaatgataaacttttatttattcacaaaaaaaaaaaa

SEQ ID NO: 10128 - DNA, 1330 bp, Homo sapiens
ccggggtggccgcacccccttcccacctgtcctgggcccgtgtagctccggggcgtccccggccagaccctccccgctttccgcggcctggggcggcgcctcccgcagggcccttccctctgcccccgcctgtgccctggcggccccgtgcggctgagaccaagggcgcgcccctctcccggctcccggtctccgtgcggggcgaggctcctgggggtctctgcgcacccaccgcactgacagcgcccccgcaggtcatccagcggatcttctacgccgtgaaccggtcctggtccggcaggatcacctgcgccgagctgcggaggagctccttcctgcagaatgtggcgctgctggaggaggaggcggacatcaaccagctgaccgaattcttctcgtacgagcatttctacgtcatctactgcaagttctgggagctggacacggaccacgacctgctcatcgacgcggacgacctggcgcggcacaatgaccacgccctttctaccaagatgatagacaggatcttctcaggagcagtcacacgaggcagaaaagtgcagaaggaagggaagatcagctatgccgactttgtctggtttttgatctctgaggaagacaaaaaaacaccgaccagcatcgagtactggttccgctgcatggacctggacggggacggcgccctgtccatgttcgagctcgagtacttctacgaggagcagtgccgaaggctggacagcatggccatcgaggccctgcccttccaggactgcctctgccagatgctggacctggtcaagccgaggactgaagggaagatcacgctgcaggacctgaagcgctgcaagctggccaacgtcttcttcgacaccttcttcaacatcgagaagtacctcgaccacgagcagaaagagcagatctccctgctcagggacggtgacagcggcggccccgagctctcggactgggagaagtacgcggccgaggagtacgacatcctggtggccgaggagaccgcgggagagccctgggaggacgggttcgaggccgagctcagccctgtggagcagaagctgagtgcgctgcgctccccgctggcccagaggcccttcttcgaggcgccctcaccgctgggcgccgtggacctgtacgagtacgcatgcggggacgaggacctggagccgctgtgacgccgcccgcgagaacgccgccgcggggccgctccccacgtgccaccaccgggccaccgcggctcgtgtaaaaactgttgtggaaaatgagtgcgtttgtacggaatgataaacttttatttattcacaaaaaaaaaaaa

SEQ ID NO: 10129 - DNA, 1481 bp, Homo sapiens
cagcttgtcaccagcaagacatttactgttcacaggtctgcaggctggaagatctcggtgtggcagagtggtgcctggttcatcgacggcgccttcccgctgcgtcctcacggggtggaaggggcctgcggctgccccctctactggaaggggccgctcttctatggcgccggcggggagcgcacgggctccgtgtccgtccacaagttcgtcgccatgtggagaaaaatcctccagaactgccacgacgacgcggccaagttcgtccatctgctcatgagccccggctgcaactacctggtgcaggaggactttgtccccttcttgcaggacgtggtgaacacgcacccggggctgtcgttcctgaaggaggcgtccgagttccactcgcgctacatcaccacggtcatccagcggatcttctacgccgtgaaccggtcctggtccggcaggatcacctgcgccgagctgcggaggagctccttcctgcagaatgtggcgctgctggaggaggaggcggacatcaaccagctgaccgaattcttctcgtacgagcatttctacgtcatctactgcaagttctgggagctggacacggaccacgacctgctcatcgacgcggacgacctggcgcggcacaatgaccacgccctttctaccaagatgatagacaggatcttctcaggagcagtcacacgaggcagaaaagtgcagaaggaagggaagatcagctatgccgactttgtctggtttttgatctctgaggaagacaaaaaaacaccgaccagcatcgagtactggttccgctgcatggacctggacggggacggcgccctgtccatgttcgagctcgagtacttctacgaggagcagtgccgaaggctggacagcatggccatcgaggccctgcccttccaggactgcctctgccagatgctggacctggtcaagccgaggactgaagggaagatcacgctgcaggacctgaagcgctgcaagctggccaacgtcttcttcgacaccttcttcaacatcgagaagtacctcgaccacgagcagaaagagcagatctccctgctcagggacggtgacagcggcggccccgagctctcggactgggagaagtacgcggccgaggagtacgacatcctggtggccgaggagaccgcgggagagccctgggaggacgggttcgaggccgagctcagccctgtggagcagaagctgagtgcgctgcgctccccgctggcccagaggcccttcttcgaggcgccctcaccgctgggcgccgtggacctgtacgagtacgcatgcggggacgaggacctggagccgctgtgacgccgcccgcgagaacgccgccgcggggccgctccccacgtgccaccaccgggccaccgcggctcgtgtaaaaactgttgtggaaaatgagtgcgtttgtacggaatgataaacttttatttattcacaaaaaaaaaaaa

SEQ ID NO: 10130 - DNA, 1503 bp, Homo sapiens
agatgcccggacaggccgcgctgagcgtgctgtgtctttctgcagcagagggtctctgggcggcgtcggtcaggcgcgaggtacgcagcaggagcgccggcgtccaggccctgctgactgcccactcctgccctctctgccccaggcctgcggctgccccctctactggaaggggccgctcttctatggcgccggcggggagcgcacgggctccgtgtccgtccacaagttcgtcgccatgtggagaaaaatcctccagaactgccacgacgacgcggccaagttcgtccatctgctcatgagccccggctgcaactacctggtgcaggaggactttgtccccttcttgcaggacgtggtgaacacgcacccggggctgtcgttcctgaaggaggcgtccgagttccactcgcgctacatcaccacggtcatccagcggatcttctacgccgtgaaccggtcctggtccggcaggatcacctgcgccgagctgcggaggagctccttcctgcagaatgtggcgctgctggaggaggaggcggacatcaaccagctgaccgaattcttctcgtacgagcatttctacgtcatctactgcaagttctgggagctggacacggaccacgacctgctcatcgacgcggacgacctggcgcggcacaatgaccacgccctttctaccaagatgatagacaggatcttctcaggagcagtcacacgaggcagaaaagtgcagaaggaagggaagatcagctatgccgactttgtctggtttttgatctctgaggaagacaaaaaaacaccgaccagcatcgagtactggttccgctgcatggacctggacggggacggcgccctgtccatgttcgagctcgagtacttctacgaggagcagtgccgaaggctggacagcatggccatcgaggccctgcccttccaggactgcctctgccagatgctggacctggtcaagccgaggactgaagggaagatcacgctgcaggacctgaagcgctgcaagctggccaacgtcttcttcgacaccttcttcaacatcgagaagtacctcgaccacgagcagaaagagcagatctccctgctcagggacggtgacagcggcggccccgagctctcggactgggagaagtacgcggccgaggagtacgacatcctggtggccgaggagaccgcgggagagccctgggaggacgggttcgaggccgagctcagccctgtggagcagaagctgagtgcgctgcgctccccgctggcccagaggcccttcttcgaggcgccctcaccgctgggcgccgtggacctgtacgagtacgcatgcggggacgaggacctggagccgctgtgacgccgcccgcgagaacgccgccgcggggccgctccccacgtgccaccaccgggccaccgcggctcgtgtaaaaactgttgtggaaaatgagtgcgtttgtacggaatgataaacttttatttattcacaaaaaaaaaaaa

SEQ ID NO: 10131 - DNA, 2352 bp, Homo sapiens
ggaccgcgccccctcctcggtccccgcgccccgcgagtccgcgcagttcccgaggcgcgggccctgttccctgcgccgcgccccctcagcgggccgtgctcgcatcaccgaggtcggtccggggcggaccgaagcccccggggcggggcggggcgcgggcgtccgggggcgccgcgggccagcccccgccatgccgcccggcaaagtgctgcagccggtcctgaagatgaaggtggacgagctgttcctgtactggctcagcgaggccagcacgcagcggatgctgaggactgcctgcgccggatcaaggcgcccgggcgggaccagccgaccccgggggacggggagcagcccggggcctggcccacagcccgtcgcgccccggccagggtcgaacccccgggaacccccgggccgggccctgcgctgcccctgggcgccgctccagccccaggaacgcgccccacgttcgaggcacccgtagatccgcaggacgagagtagttcagacacggaaagaagagcctctgcccccggccacgagccaaagcattccgaccttctacttccccagaggacgcccgcaggactccgtcaacgtggatgccgtcatcagcaagatcgagagcaccttcgcccggttcccccacgagagggccaccatggatgacatgggcctggtggccaaggcctgcggctgccccctctactggaaggggccgctcttctatggcgccggcggggagcgcacgggctccgtgtccgtccacaagttcgtcgccatgtggagaaaaatcctccagaactgccacgacgacgcggccaagttcgtccatctgctcatgagccccggctgcaactacctggtgcaggaggactttgtccccttcttgcaggacgtggtgaacacgcacccggggctgtcgttcctgaaggaggcgtccgagttccactcgcgctacatcaccacggtcatccagcggatcttctacgccgtgaaccggtcctggtccggcaggatcacctgcgccgagctgcggaggagctccttcctgcagaatgtggcgctgctggaggaggaggcggacatcaaccagctgaccgaattcttctcgtacgagcatttctacgtcatctactgcaagttctgggagctggacacggaccacgacctgctcatcgacgcggacgacctggcgcggcacaatgaccacggtctctttctccgtctgaaagctgtacctttgaggcctgaatattctgctctttacaagtcggtcttggagccgcggtcagctttgcgctctgtggatttcatgctggacttggctctgctcgacgggaaagcgtggtgggcccctaggatgggccgtgcaggggcatcggggccccggggctctcccagacccaggcgtcctctcagcttttcggtccccaccgcatctagtctcggctccggggggtggtgacgtcggggccgaggcacggtgcgggctgcccatcaaccgcattcctttccagccctttctaccaagatgatagacaggatcttctcaggagcagtcacacgaggcagaaaagtgcagaaggaagggaagatcagctatgccgactttgtctggtttttgatctctgaggaagacaaaaaaacaccgaccagcatcgagtactggttccgctgcatggacctggacggggacggcgccctgtccatgttcgagctcgagtacttctacgaggagcagtgccgaaggctggacagcatggccatcgaggccctgcccttccaggactgcctctgccagatgctggacctggtcaagccgaggactgaagggaagatcacgctgcaggacctgaagcgctgcaagctggccaacgtcttcttcgacaccttcttcaacatcgagaagtacctcgaccacgagcagaaagagcagatctccctgctcagggacggtgacagcggcggccccgagctctcggactgggagaagtacgcggccgaggagtacgacatcctggtggccgaggagaccgcgggagagccctgggaggacgggttcgaggccgagctcagccctgtggagcagaagctgagtgcgctgcgctccccgctggcccagaggcccttcttcgaggcgccctcaccgctgggcgccgtggacctgtacgagtacgcatgcggggacgaggacctggagccgctgtgacgccgcccgcgagaacgccgccgcggggccgctccccacgtgccaccaccgggccaccgcggctcgtgtaaaaactgttgtggaaaatgagtgcgtttgtacggaatgataaacttttatttattcacaaaaaaaaaaaa

SEQ ID NO: 10132 - DNA, 716 bp, Homo sapiens
ctctctccacactggccacactggtttttaatatattcacaaagttgtgtaatcatcaccactatgtaattcctgaacattaggctgcgtgcagtggcttccctccttgggtctctggcagagtctgagaattaggttgacatagaataacaggagaaaagcttacgaatgttattttatttttttgagacggagtctcactttgtcgcccagtgtggagagaggcgctgcaagctggccaacgtcttcttcgacaccttcttcaacatcgagaagtacctcgaccacgagcagaaagagcagatctccctgctcagggacggtgacagcggcggccccgagctctcggactgggagaagtacgcggccgaggagtacgacatcctggtggccgaggagaccgcgggagagccctgggaggacgggttcgaggccgagctcagccctgtggagcagaagctgagtgcgctgcgctccccgctggcccagaggcccttcttcgaggcgccctcaccgctgggcgccgtggacctgtacgagtacgcatgcggggacgaggacctggagccgctgtgacgccgcccgcgagaacgccgccgcggggccgctccccacgtgccaccaccgggccaccgcggctcgtgtaaaaactgttgtggaaaatgagtgcgtttgtacggaatgataaacttttatttattcacaaaaaaaaaaaa

SEQ ID NO: 10133 - DNA, 2172 bp, Homo sapiens
ggaccgcgccccctcctcggtccccgcgccccgcgagtccgcgcagttcccgaggcgcgggccctgttccctgcgccgcgccccctcagcgggccgtgctcgcatcaccgaggtcggtccggggcggaccgaagcccccggggcggggcggggcgcgggcgtccgggggcgccgcgggccagcccccgccatgccgcccggcaaagtgctgcagccggtcctgaagatgaaggtggacgagctgttcctgtactggctcagcgaggccagcacgcagcggatgctgaggactgcctgcgccggatcaaggcgcccgggcgggaccagccgaccccgggggacggggagcagcccggggcctggcccacagcccgtcgcgccccggccagggtcgaacccccgggaacccccgggccgggccctgcgctgcccctgggcgccgctccagccccaggaacgcgccccacgttcgaggcacccgtagatccgcaggacgagagtagttcagacacggaaagaagagcctctgcccccggccacgagccaaagcattccgaccttctacttccccagaggacgcccgcaggactccgtcaacgtggatgccgtcatcagcaagatcgagagcaccttcgcccggttcccccacgagagggccaccatggatgacatgggcctggtggccaaggcctgcggctgccccctctactggaaggggccgctcttctatggcgccggcggggagcgcacgggctccgtgtccgtccacaagttcgtcgccatgtggagaaaaatcctccagaactgccacgacgacgcggccaagttcgtccatctgctcatgagccccggctgcaactacctggtgcaggaggactttgtccccttcttgcaggacgtggtgaacacgcacccggggctgtcgttcctgaaggaggcgtccgagttccactcgcgctacatcaccacggtcatccagcggatcttctacgccgtgaaccggtcctggtccggcaggatcacctgcgccgagctgcggaggagctccttcctgcagaatgtggcgctgctggaggaggaggcggacatcaaccagctgaccgaattcttctcgtacgagcatttctacgtcatctactgcaagttctgggagctggacacggaccacgacctgctcatcgacgcggacgacctggcgcggcacaatgaccacggtctctttctccgtctgaaagctgtacctttgaggcctgaatattctgctctttacaagtcggtcttggagccgcggtcagctttgcgctctgtggatttcatgctggacttggctctgctcgacgggaaagcgtggtgggcccctaggatgggccgtgcaggggcatcggggccccggggctctcccagacccaggcgtcctctcagcttttcggtccccaccgcatctagtctcggctccggggggtggtgacgtcggggccgaggcacggtgcgggctgcccatcaaccgcattcctttccagccctttctaccaagatgatagacaggatcttctcaggagcagtcacacgaggcagaaaagtgcagaaggaagggaagatcagctatgccgactttgtctggtttttgatctctgaggaagacaaaaaaacaccgaccagcatcgagtactggttccgctgcatggacctggacggggacggcgccctgtccatgttcgagctcgagtacttctacgaggagcagtgccgaaggctggacagcatggccatcgaggccctgcccttccaggactgcctctgccagatgctggacctggtcaagccgaggactgaagggaagatcacgctgcaggacctgaagcgctgcaagctggccaacgtcttcttcgacaccttcttcaacatcgagaagtacctcgaccacgagcagaaagagcagatctccctgctcagggacggtgacagcggcggccccgagctctcggactgggagaagtacgcgtgcggggacgaggacctggagccgctgtgacgccgcccgcgagaacgccgccgcggggccgctccccacgtgccaccaccgggccaccgcggctcgtgtaaaaactgttgtggaaaatgagtgcgtttgtacggaatgataaacttttatttattcacaaaaaaaaaaaa

SEQ ID NO: 10134 - DNA, 1034 bp, Homo sapiens
ggaccgcgccccctcctcggtccccgcgccccgcgagtccgcgcagttcccgaggcgcgggccctgttccctgcgccgcgccccctcagcgggccgtgctcgcatcaccgaggtcggtccggggcggaccgaagcccccggggcggggcggggcgcgggcgtccgggggcgccgcgggccagcccccgccatgccgcccggcaaagtgctgcagccggtcctgaagatgaaggtggacgagctgttcctgtactggctcagcgaggccagcacgcagcggatgctgaggactgcctgcgccggatcaaggcgcccgggcgggaccagccgaccccgggggacggggagcagcccggggcctggcccacagcccgtcgcgccccggccagggtcgaacccccgggaacccccgggccgggccctgcgctgcccctgggcgccgctccagccccaggaacgcgccccacgttcgaggcacccgtagatccgcaggacgagagtagttcagacacggaaagaagagcctctgcccccggccacgagccaaagcattccgaccttctacttccccagaggacgcccgcaggactccgtcaacgtggatgccgtcatcagcaagatcgagagcaccttcgcccggttcccccacgagagggccaccatggatgacatgggcctggtggccaaggcctgcggctgccccctctactggaaggggccgctcttctatggcgccggcggggagcgcacgggctccgtgtccgtccacaagttcgtcgccatgtggagaaaaatcctccagaactgccacgacgacgcggccaagttcgtccatctgctcatgagccccggctgcaactacctggtgcaggaggactttgtccccttcttgcaggacgtggtgaacacgcacccggggctgtcgttcctgaaggaggcgtccgagttccactcgcgctacatcaccacggtgggtccccagcggaggggccgtcggttccagcgcggggcgcgggtgtttctgcagcagccgc

SEQ ID NO: 10135 - DNA, 1482 bp, Homo sapiens
ggaccgcgccccctcctcggtccccgcgccccgcgagtccgcgcagttcccgaggcgcgggccctgttccctgcgccgcgccccctcagcgggccgtgctcgcatcaccgaggtcggtccggggcggaccgaagcccccggggcggggcggggcgcgggcgtccgggggcgccgcgggccagcccccgccatgccgcccggcaaagtgctgcagccggtcctgaagatgaaggtggacgagctgttcctgtactggctcagcgaggccagcacgcagcggatgctgaggactgcctgcgccggatcaaggcgcccgggcgggaccagccgaccccgggggacggggagcagcccggggcctggcccacagcccgtcgcgccccggccagggtcgaacccccgggaacccccgggccgggccctgcgctgcccctgggcgccgctccagccccaggaacgcgccccacgttcgaggcacccgtagatccgcaggacgagagtagttcagacacggaaagaagagcctctgcccccggccacgagccaaagcattccgaccttctacttccccagaggacgcccgcaggactccgtcaacgtggatgccgtcatcagcaagatcgagagcaccttcgcccggttcccccacgagagggccaccatggatgacatgggcctggtggccaaggcctgcggctgccccctctactggaaggggccgctcttctatggcgccggcggggagcgcacgggctccgtgtccgtccacaagttcgtcgccatgtggagaaaaatcctccagaactgccacgacgacgcggccaagttcgtccatctgctcatgagccccggctgcaactacctggtgcaggaggactttgtccccttcttgcaggacgtggtgaacacgcacccggggctgtcgttcctgaaggaggcgtccgagttccactcgcgctacatcaccacggtcatccagcggatcttctacgccgtgaaccggtcctggtccggcaggatcacctgcgccgagctgcggaggagctccttcctgcagaatgtggcgctgctggaggaggaggcggacatcaaccagctgaccgaattcttctcgtacgagcatttctacgtcatctactgcaagttctgggagctggacacggaccacgacctgctcatcgacgcggacgacctggcgcggcacaatgaccacgccctttctaccaagatgatagacaggatcttctcaggagcagtcacacgaggcagaaaagtgcagcagcagggaaggatcagtatgccgatggtcggttcgaccctggaggagaaaaaaaacaccgccagtctgagtaacggtcccggcgtggaccggaggggaagggccctggccagttcgagccgcgtattctacaaggaaggcggaaggtgccacaaggacggaggcgcgcctacaggagcgcgcaaagtgccgggaacacggag

SEQ ID NO: 10136 - DNA, 501 bp, Homo sapiens
gcggccgcccccacccccggcgccatgcgccctcctcagcctgaggaatgcgcgcggcgcgggccccggccccagagcgcctggcgggcgacgcatggagcgcgctgagcccgggccacgcctgcagcgccccgccggccccggcccggccctgccccgagagcgcggcgcccggcccggcccgcggagagccctgcgcgccggcggcatgcgactccgcgagcgctcgctgcgccaggaccccgacctgcgccaggagctggcctcactggcccgcggctgcgacttcgtgctgccctctcggttcaagaagcggctgaaggccttccagcaggtcagccccgcgcgccccgcggctgcccgacaccgggcgaggcctcccggcccggcgagccctgccctcccggccccgcgtgggcccccgctcgccgctgctggccgtgcacccgttgttgcgtggcggggcccaaacgccagatttacagggccagttgtgggcgc

SEQ ID NO: 10137 - DNA, 1169 bp, Homo sapiens
ggctggggcgtccccgtggtacggccccaccggccgtaaacaccggggacgcgcgccgacaggcggagagccagcttctgccttaaagatcacccgagagctgagaaacgtgttgccaaaagaaattgcacaaaaatagtcgcactagtgagctctgggtggcggggtgattgtgagcagtttttacgggctaccgtggctcctgtttttcacaaagtattaacaggtgggtttaaaacgtcagggagcacacaaaacactcagagaagccgaacaggcgccccggggctgccgggagggagacggaagctggcgggacagcgcccttcagatggcgcggtacgctgtcgatgagacctcaggtttttaaaaacagtctttaaacttcgaccctacaccataaggactacgtcgggtcaaaattacttctggtcagccgcgggccccaggtcccagggctgagcaagtccggtctgcgacaacacgaggctctcccgtgacggggcctagcccaaggctccccccgcagatctcctgggattcagaactaccaaatcgccggcagacagatctccatcagaggaagcctgtgacggccgccaggataaaataaaaaggacaatggcaagtgatagcaaagacgtagagaagctggaattctcctaaatccttggtaggagtgtaaaatggtgcagcttcttctataattcagcatcccctaccatactccctggaacccacccaagagaaatacgaccagagagacttgcatgcaaacattcctaacagcattgtccacgccaaccagaacgtccaccaaccgcggatgcatgagcagcagggaaatggccatgaaaagaaactgctgagacatgggcctacatggatgaacctcaaaaacgctaggccaggtgaaagatgccagacaagaaaattccattattccatttatgtgacacttcttaaaaaggtaaatctctagagaggaagcaaattcatgtttgcctgggggtgagagtgggatcaactgcaaacaggcacgaaggaacttttttgggtgatgaaaaataaaactttggatgtcgaacatattttgaaactagattgcaatgatagttgcataactgtatacatttattaaaatcgtggaacacttacaaaaaaaggat

SEQ ID NO: 10138 - DNA, 282 bp, Homo sapiens
gtaaaggaaaggaggaaaataggaaactatctttaaggatcctgaatgagaggggagaaaatggaaagggtatatgtcatcaacacctagaagctttcctatgtagggaggccgacaaatggaatggcagctgaagagggggataggactagtcaaatgatggttttttaaaatagatgggagatagttggaacctgtttttgtgtgtaagtaggaatgatccagtggagaagaggaaattggtataggagagtagaagccaaaagagaagggatgtagagc

SEQ ID NO: 10139 - DNA, 484 bp, Homo sapiens
tctggaagcaggtaggattgtttcccgattcaacagatgggggaactcaagtttagaaagggaaatgacttccccagggtcacataggagatagcagagccggcacttggactctaaactttccattgtcacgctctgcagcaggtcctgaaaaccgaaacacccacaggcaggtaaagtatacaacggaaggaggccaggcgcggtggctcacacctgtaatcctcagcctcccaaagtgctaagccgccgcgcttggccacgatgattaggtttttatgcacgtgtgagagatacgcctcccttaaaccttgttgcgaccttggcgcattacctgtctgatatgaaaaaataagacccggctcatggtggctcctgcctgtaatcccagcattttgggaggctgaggcaggaagactgcttgagcccaggagtttgagaccagcctgggcaaaatagcgataccctatctctataaaaagta

SEQ ID NO: 10140 - DNA, 485 bp, Homo sapiens
tctggaagcaggtaggattgtttcccgattcaacagatgggggaactcaagtttagaaagggaaatgacttccccagggtcacataggagatagcagagccggcacttggactctaaactttccattgtcacgctctgcagcaggtcctgaaaaccgaaacacccacaggcaggtaaagtatacaacggaaggaggccaggcgcggtggctcacacctgtaatcccagcactttgggaggctgaggcaggcggatcacgaggtcaggagatcgagaccatcctggctgacatggtgaaactccgtctcactaaaaatacaaaaaattagctgggtgtggtggcgggcgcctgtagtcccagctactcggtgggctgaggcaggtgagtggcgtgaacacgggaggcagaggttgcagtgagccgagatcgcaccactgcaatccagcctgggcaacagagtgagactccgtctcaaaaaaaaagc

SEQ ID NO: 10141 - DNA, 512 bp, Homo sapiens
gctgagggaattacttattgaaccaaaatatgttcaaaatatggcatgtcacacatagaagagtgaggtgtgcatatataactggaagattacaaatggcctattgaaaaaaagaaaatagtgttaaaagtataaagctattaaaaaaaagtaaatgtccccatacccaaggagagagacgtactaactagaagtcgaagttggcattctcctttattgtcctcccatgcacccataaaaaccaggcactttatcttggtatggtagcatgcctgtaataccagctcctcaggagactgaggtgagaggatcacttggtccctggagtttgtgaccagcgaacagtgatcacaccactgcttgccacgctgggcgagagtgagatctcaaaaaaaaaagcaaaaacacaaaagtcacctgtacgttgtgagagataccacaccaaactttgggtggcctcagaggtcagataatagagactgaggtgagggactagtaattgttcttattta

SEQ ID NO: 10142 - DNA, 280 bp, Homo sapiens
gaaaggctggaaagggaactagtttctgggatttgcctggaacttcccttggacattactagcacattctggaaaaaaagcaagttgaacatatctaccatcagtcctctcctacttccttcccaccccaccctatccactacccccactgatgctatgtttgcatcatcaaagtcaggggaattgagaaaagagattatcaaaataaattattaaaatccagaaaacagttttatgtgaagtaattcaggaagatctagtgttcattttgcatggattg

SEQ ID NO: 10143 - DNA, 556 bp, Homo sapiens
  misc_feature (91)..(91): n is a, c, g, or t
  misc_feature (109)..(109): n is a, c, g, or t
taattttgaaatagggctttaaaaaagatttggtagtcaatttccaagcatgcctgtactttttgatatctcagaataatttatacgtagncaatttcttttttgtttngtttttttgagacggagtccagcctgggcgacagagcgagactccacctcaaaaaaaaaaaaaagaaagtttacgaatttgtgttgggttggattcaaagtcgtcctgggccatatgcggtccacaggctgaggtttggacaagtttggtgtagagaatgaaagggatgaggcctttgctccagccttggagccattgatcaggatagtttttagagtgtacctctttgcttaaaaggcagagggtccaccctgggcaacatagcaaggccccacctacaaaagaactacaaacaactgggcgtggtggtgcactcttgcagtcccatctgcttaggagactgaggcaggagcattgcttgggcccgggagttggaagctacagtgagccatgattacaccactgcactccagcctgggtgatagagggagactcctcaaaaaaaaa

SEQ ID NO: 10144 - DNA, 418 bp, Homo sapiens
acccaggatggagaagggcagcacctgcgagtgtttgccccttggggagtcgagggcagaacctccctccttccttgcctggctttctgcagagcccctgccctccccaaggagcacagacccaggctactccctgggaccttgggagggtcacctgcagcccttctggagaccacagggaccaataacatgccacagtgacctcaggccatgcatgcccattggaggaccctctgcatttttagaaaaacacagatgtctttgaaagcaccaatcctgcaaacactttgtatatccttgcaaatcgggtaaaagaataattttctccaaatctatacaaatcctcactcgtccattcacctttgccatggaattcaccggcaaccccctctgaggaatgcacgtgtcaatgcagaaa

SEQ ID NO: 10145 - DNA, 689 bp, Homo sapiens
tatatttctgagttttttaagttttgggtttttctacacatttgctactgattagaaaaagatatatgaaatttcagagaaattatggaatttctggaagatgaagttattaccagaagccaatataggccaggcacagtggctcacgcctgtaaccccagtactttgggaggcgaaggcgggagaattgcttgagtccaggagtttgagaccagcctgcgcagcatggtgagatcccatctctacgaaaaattaaaaattagctgggcatggtggcttgtacctgtagtcccagctacttggaaggttgaagtgagaggattgcttgagcctaggacatcaaggctgcagtgagccatgatcattccgctgcactcagcctgggtgaaagagggagaccctgtctcaaaaaaaaaaaaaaaaaaaaaaaaagctaaattgagctatctacattttattgctaggaaacctaccagtttttttaaacactaatataaaaccttaagacttagatttttgtttgttttaaacagtaaatatataccattctcctaggaaagaattacaactctttattcctttttactttgcgtagtatataactccccagctaaccacaagttcacttcttttagaacaagtgacattattttcttgccttattcattctagctcaactgaaacacagg

SEQ ID NO: 10146 - DNA, 319 bp, Homo sapiens
gactaaataaacttttaaatgcatggaaatttgagtatttttaaatatatagagattataaacaagtttcttaaagacaagttaataggaatatataataactcataatttcaagagccacgactttaaaagtagctgctcttctgaaaaataagcaaacctttatccattgtattttattacaagatactatagaattttaaggtataaaggattataaagtttacctagttcatcctcttttgtatattcaaaatatattcaaataccttgcagaaattcatcatacaactagtttagtttccaattgcttatttct

SEQ ID NO: 10147 - DNA, 410 bp, Homo sapiens
tttacacacgtggacccggaagcccaggggaaggggaataccttccagctgatgcatccccacctggcacacagtctggtttttttttttgagatggagtctcactctgttgccaggctagagtgcagtggcgcgatctcggctcactgcaacctccgcctccgggttcaagcaattctcctgcctcagcctccatagtagctgggactacacgcacgtgacaacatgcccggctactttttgtacttttagtacagacggggtttcaccatgttggccagaatggtctggatcacttgaggtcaggagttcgagaccagcctggccaacatggtgaaacccgtctctactaaaagtacaagaattagccaggcgttgtggcaggcgcctgtaatcccagctacttggga

SEQ ID NO: 10148 - DNA, 346 bp, Homo sapiens
taattttctttttctgaatgattaaacatagacctacttcactgtggagtttaatttttgttttatattattttttaagccccttccattctgggatcactgtggaattttataacagtgtacttgctgagaaagttaattgatcttgataccagtcgcaaattgggaataaatgtagataacttttggtccaagttttaaacttatatacacaaatttacatttttgaaaattggtgaagcaatatgaattttttgtctgtgcaagagagccaggaagttgatgctgatttgttctgaacttttccacatgaattaccactggtttaaagagttattgattctca

SEQ ID NO: 10149 - DNA, 545 bp, Homo sapiens
agacctgggtggagcggtggaggtggtgatgcgttgtcaaattctggaggagctgtgaaaggtgagctgccagaatgtgcttccaggttggctgtggaggtgagagagaattagcttgactccaaggtttctctcttgagagatggaagggatgaagctgtcattcacagagatggagagaggtcatcggcagagcaggcctgagggagatgcttgagatggccgctgttgagctaaggagaggtgttgagcaggaaactggaaatctaggtctggaggcagggagaggcagctggaaatagcaatctgggggtccggccgggcatggtggttcacacctgtaatcccagcactttgggacggtgaaaccctgtctccactaaaaatacaaaaatcagctgggcatggtggtaggcgcctataatcccagctactggggaggctgagacaggagaaattgattgaacacgggaggcagaggttgcagtgagccaagatcgccccattgcactctagcctgggcgacagagtgagacttcctctgg

SEQ ID NO: 10150 - DNA, 402 bp, Homo sapiens
gttcttggacctgatggagaggtagtagacatcagttagcgtagagatatctggctaggcttttcagattctttttggtcaggcttttccaattctctttcatcaggttaaactacaacagatagacctaaagaattcttatttagccaggcacagtggtaacgcctataatcccagcacttttggaggctgaagtgagtagatcatttcagcctaggagttcgagagccgaggagttcaagaccagcctgggcagcatggcgaaaccctctctctacaaaaacaatacaaaaattagctgggcatagtggtgcacacctgtagacacaactactcaggagcctgaggtgggaggatcacctgagcctgagaaagtcaaggctgcagtgagctgtgattgca

SEQ ID NO: 10151 - DNA, 330 bp, Homo sapiens
caaggtggctcacacctgtaatcccagcactttaggaggctgagacaggtggatcacttgaacccaggagtttgagaccagcctgagcaacatagggacactctgtctctacaaaaaatacaaaaattagcttgacatggtggcacccacttgtagtttcagctacttgggaggctgagggtggaggatcgcttgagccaggaggcagaagttgcagtgagctgggaatgcaccactgcactagagcctgggcaacagagtgagactccacctcaaagactctctgtatatagatagaacagaaatattcagccttatttaacacttctt

SEQ ID NO: 10152 - DNA, 116 bp, Homo sapiens
tcacactttaggaagcaagttcgatgtggtttctattttacaaaatttaaatcagaatcactattattataccacatataattataatgacaatgatgccaacagataaaagcttg

SEQ ID NO: 10153 - DNA, 353 bp, Homo sapiens
aagcaaaaggaaagttcagtgcaaactgggcagttgataatatcacagtgaaaatattagaccaatttgtcctctaaggaagattgaaaagggcagatttttttttttttagggatatataagaaagctgaagataagtagaatgcacttgctctaaatctgttgttcccaacctgtgagcttcagaggttgagggtggagggatggtaactgactcatggtaagcacttaatgaaagtttagtttttgaatggcttaatgaatgcttcttcttgtcttggttgggggtggatgggagaagtgattccagttgcattggtacttcctgctgcccggcacaggaagccttctct

SEQ ID NO: 10154 - DNA, 426 bp, Homo sapiens
tcactgccagccagaagactttggatagcccctctgggaagctgtggcatgacgatcacaggtctctccagaatatcatccccgcatctactggtgctgccaaggctgtgggtgaggtcatccttgcccaaatgcaaggaccctataaatccccaatggaataaatcctctggaagcactttcctttcttatggcactctgcacatttactgtgcacagcacctaacatgtctcatatttcatctcccccactggaccactaaactgggagcagaaatggaaaattggaagtattagtcctgggtccagcctgcagacttgttttgttagtttgcatgcttttccccccacaaagtttaatttatttaaaaaattataacctatgataaacatacagaaaatttgagaaaatggtataataacata

SEQ ID NO: 10155 - DNA, 609 bp, Homo sapiens
atgcggccgcgtttccgtggagacagccgagcctgcggaaggcggcggcggcggcacctgcgatcagcggctggggcaggttatggtagtgcggactgcggtgtgagcagagcggccacggggcccgccatgcgccggcggccctgacatgggcgccagcgggtccaaagctcggggcctgtggcccttcgcctcggcggccggaggcggcggctcagaggcagcaggagctgagcaagctttggtgcggcctcggggccgagctgtgccccccttcgtattcacgcgccgcggctctatgttctatgatgaggatggggatctggctcacgagttctatgaggagacaatcgtcaccaagaacgggcagaagcgggccaagctgaggcgagtgcataagaatctgattcctcagggcatcgtgaagctggatcacccccgcatccacgtggatttccctgtgatcctctatgaggtgtgaccctgggaggtggcagacagaagcaccccctgccccggcaagaaactcccaggctcaatcaaggtgtggcttccattgaggagcccaggctggggccacaaccctgaataaactctgttggcccataa

SEQ ID NO: 10156 - DNA, 1693 bp, Homo sapiens
atgcggccgcgtttccgtggagacagccgagcctgcggaaggcggcggcggcggcacctgcgatcagcggctggggcaggttatggtagtgcggactgcggtgtgagcagagcggccacggggcccgccatgcgccggcggccctgacatgggcgccagcgggtccaaagctcggggcctgtggcccttcgcctcggcggccggaggcggcggctcagaggcagcaggagctgagcaagctttggtgcggcctcggggccgagctgtgccccccttcgtattcacgcgccgcggctctatgttctatgatgaggatggggatctggctcacgagttctatgaggagacaatcgtcaccaagaacgggcagaagcgggccaagctgaggcgagtgcataagaatctgattcctcagggcatcgtgaagctggatcacccccgcatccacgtggatttccctgtgatcctctatgaggtgtgaccctgggaggtggcagacagaagcaccccctgccccggcaagaaactcccaggctcaatcaaggtgtggcttccattgaggagcccaggctggggccacaaccctgaataaactctgttggcccataaccttcagctgtgagcgggtcggtcccacagtattggttgggtgttggtttgtgtgtggacaagaggtggttggtgggtggtgaaggctaatggcagagttagcaccccactctcccaagccacccctgcaagcagcacagcagggcatataccagtcaggaatgcccgttacctggttccttgcctggtctgctttcttccaagtttgcctggggcctagccctgctagaggctacagcactttacaagcaaggtatgctttcttccagcccctaggctgtgggcactgtatacaagtaggaacttcctttccttcacttcccttttaacccctagtcagagcatttcagccgtttgctacctcgattcctcctgtgttggacagaggctgggggcagtgccagcctgattcttccgacctacctgccatttgttcccgccttcagatggatggacagtttgctggctattgataggagtggggactgggtgggggcttctccctctacccagggctgggctgatccccctactgcaactaactgttgccccccaaccccgaacccccagttgaggagttgagagagtgcaggctggggtcaggacaggctgcggatgcttgtgcctatggggagttactccaacccacctattctgtctaatctccatggctttgcaccaaatcctccacccctccaattgggaggggactgttcaccaccttgtggtaagggacaacaccctaaggctggtgccagtagttatgagtagcctaccaccccctcccttacagtaacccccaccccttcaggatcagtcaagggaaagcactagaacccctgggtagggaaagaaaggagggaaaaaccataaaaggaatacttataatgtgaaggtttgtaaatagtccatgatgatgtcgtggcagagtctgatttctatatagaggtgactttttttttaagtactgtgcaagctctgtgcttctataatgtgggaaatggcttggggaggatggcccctagcttaggaagactgttgtgttatttgttcaatttcaataaaatgatttgtagatcctgca

SEQ ID NO: 10157 - DNA, 654 bp, Homo sapiens
atgcggccgcgtttccgtggagacagccgagcctgcggaaggcggcggcggcggcacctgcgatcagcggctggggcaggttatggtagtgcggactgcggtgtgagcagagcggccacggggcccgccatgcgccggcggccctgacatgggcgccagcgggtccaaagctcggggcctgtggcccttcgcctcggcggccggaggcggcggctcagaggcagcaggagctgagcaagctttggtgcggcctcggggccgagctgtgccccccttcgtattcacgcgccgcgggtaagggcatgggttccaccctggcggggggaacaggcgggcggccaggcgtcccgcgccacgggggaacttccaccgctgtaccccactacagccaagccaggacgacccccatattttgagcctcattggagctgggggtggagaaagccgggcagtggtctcctggcggcctggccactctgaaagtctccctagggaagagtgggcctgaggcttgtcactggtcggaccttccgcacggtaaagctaagctagggcctccataagacctccataagatctcttcctttcatcccttccggctcagcctgcatactgaagggtcctagcctccctttcccccccagttattccaag

SEQ ID NO: 10158 - DNA, 1665 bp, Homo sapiens
atgcggccgcgtttccgtggagacagccgagcctgcggaaggcggcggcggcggcacctgcgatcagcggctggggcaggttatggtagtgcggactgcggtgtgagcagagcggccacggggcccgccatgcgccggcggccctgacatgggcgccagcgggtccaaagctcggggcctgtggcccttcgcctcggcggccggaggcggcggctcagaggcagcaggagctgagcaagctttggtgcggcctcggggccgagctgtgccccccttcgtattcacgcgccgcggctctatgttctatgatgaggatggggatctggctcacgagttctatgaggagacaatcgtcaccaagaacgggcagaagcgggccaagctgagggcatcgtgaagctggatcacccccgcatccacgtggatttccctgtgatcctctatgaggtgtgaccctgggaggtggcagacagaagcaccccctgccccggcaagaaactcccaggctcaatcaaggtgtggcttccattgaggagcccaggctggggccacaaccctgaataaactctgttggcccataaccttcagctgtgagcgggtcggtcccacagtattggttgggtgttggtttgtgtgtggacaagaggtggttggtgggtggtgaaggctaatggcagagttagcaccccactctcccaagccacccctgcaagcagcacagcagggcatataccagtcaggaatgcccgttacctggttccttgcctggtctgctttcttccaagtttgcctggggcctagccctgctagaggctacagcactttacaagcaaggtatgctttcttccagcccctaggctgtgggcactgtatacaagtaggaacttcctttccttcacttcccttttaacccctagtcagagcatttcagccgtttgctacctcgattcctcctgtgttggacagaggctgggggcagtgccagcctgattcttccgacctacctgccatttgttcccgccttcagatggatggacagtttgctggctattgataggagtggggactgggtgggggcttctccctctacccagggctgggctgatccccctactgcaactaactgttgccccccaaccccgaacccccagttgaggagttgagagagtgcaggctggggtcaggacaggctgcggatgcttgtgcctatggggagttactccaacccacctattctgtctaatctccatggctttgcaccaaatcctccacccctccaattgggaggggactgttcaccaccttgtggtaagggacaacaccctaaggctggtgccagtagttatgagtagcctaccaccccctcccttacagtaacccccaccccttcaggatcagtcaagggaaagcactagaacccctgggtagggaaagaaaggagggaaaaaccataaaaggaatacttataatgtgaaggtttgtaaatagtccatgatgatgtcgtggcagagtctgatttctatatagaggtgactttttttttaagtactgtgcaagctctgtgcttctataatgtgggaaatggcttggggaggatggcccctagcttaggaagactgttgtgttatttgttcaatttcaataaaatgatttgtagatcctgca

SEQ ID NO: 10159 - DNA, 1531 bp, Homo sapiens
atgcggccgcgtttccgtggagacagccgagcctgcggaaggcggcggcggcggcacctgcgatcagcggctggggcaggttatggtagtgcggactgcggtgtgagcagagcggccacggggcccgccatgcgccggcggccctgacatgggcgccagcgggtccaaagctcggggcctgtggcccttcgcctcggcggccggaggcggcggctcagaggcagcaggagctgagcaagctttggtgcggcctcggggccgagctgtgccccccttcgtattcacgcgccgcggccctgtgatcctctatgaggtgtgaccctgggaggtggcagacagaagcaccccctgccccggcaagaaactcccaggctcaatcaaggtgtggcttccattgaggagcccaggctggggccacaaccctgaataaactctgttggcccataaccttcagctgtgagcgggtcggtcccacagtattggttgggtgttggtttgtgtgtggacaagaggtggttggtgggtggtgaaggctaatggcagagttagcaccccactctcccaagccacccctgcaagcagcacagcagggcatataccagtcaggaatgcccgttacctggttccttgcctggtctgctttcttccaagtttgcctggggcctagccctgctagaggctacagcactttacaagcaaggtatgctttcttccagcccctaggctgtgggcactgtatacaagtaggaacttcctttccttcacttcccttttaacccctagtcagagcatttcagccgtttgctacctcgattcctcctgtgttggacagaggctgggggcagtgccagcctgattcttccgacctacctgccatttgttcccgccttcagatggatggacagtttgctggctattgataggagtggggactgggtgggggcttctccctctacccagggctgggctgatccccctactgcaactaactgttgccccccaaccccgaacccccagttgaggagttgagagagtgcaggctggggtcaggacaggctgcggatgcttgtgcctatggggagttactccaacccacctattctgtctaatctccatggctttgcaccaaatcctccacccctccaattgggaggggactgttcaccaccttgtggtaagggacaacaccctaaggctggtgccagtagttatgagtagcctaccaccccctcccttacagtaacccccaccccttcaggatcagtcaagggaaagcactagaacccctgggtagggaaagaaaggagggaaaaaccataaaaggaatacttataatgtgaaggtttgtaaatagtccatgatgatgtcgtggcagagtctgatttctatatagaggtgactttttttttaagtactgtgcaagctctgtgcttctataatgtgggaaatggcttggggaggatggcccctagcttaggaagactgttgtgttatttgttcaatttcaataaaatgatttgtagatcctgca

SEQ ID NO: 10160 - DNA, 1505 bp, Homo sapiens
  misc_feature (17)..(17): n is a, c, g, or t
gaacttatgtgctagtncgaggctgggtgttctgcgatcagcggctggggcaggttatggtagtgcggactgcggtgtgagcagagcggccacggggcccgccatgcgccggcggccctgacatgggcgccagcgggtccaaagctcggggcctgtggcccttcgcctcggcggccggaggcggcggctcagaggcagcaggagctgagcaagctttggtgcggcctcggggccgagctgtgccccccttcgtattcacgcgccgcggccctgtgatcctctatgaggtgtgaccctgggaggtggcagacagaagcaccccctgccccggcaagaaactcccaggctcaatcaaggtgtggcttccattgaggagcccaggctggggccacaaccctgaataaactctgttggcccataaccttcagctgtgagcgggtcggtcccacagtattggttgggtgttggtttgtgtgtggacaagaggtggttggtgggtggtgaaggctaatggcagagttagcaccccactctcccaagccacccctgcaagcagcacagcagggcatataccagtcaggaatgcccgttacctggttccttgcctggtctgctttcttccaagtttgcctggggcctagccctgctagaggctacagcactttacaagcaaggtatgctttcttccagcccctaggctgtgggcactgtatacaagtaggaacttcctttccttcacttcccttttaacccctagtcagagcatttcagccgtttgctacctcgattcctcctgtgttggacagaggctgggggcagtgccagcctgattcttccgacctacctgccatttgttcccgccttcagatggatggacagtttgctggctattgataggagtggggactgggtgggggcttctccctctacccagggctgggctgatccccctactgcaactaactgttgccccccaaccccgaacccccagttgaggagttgagagagtgcaggctggggtcaggacaggctgcggatgcttgtgcctatggggagttactccaacccacctattctgtctaatctccatggctttgcaccaaatcctccacccctccaattgggaggggactgttcaccaccttgtggtaagggacaacaccctaaggctggtgccagtagttatgagtagcctaccaccccctcccttacagtaacccccaccccttcaggatcagtcaagggaaagcactagaacccctgggtagggaaagaaaggagggaaaaaccataaaaggaatacttataatgtgaaggtttgtaaatagtccatgatgatgtcgtggcagagtctgatttctatatagaggtgactttttttttaagtactgtgcaagctctgtgcttctataatgtgggaaatggcttggggaggatggcccctagcttaggaagactgttgtgttatttgttcaatttcaataaaatgatttgtagatcctgca

SEQ ID NO: 10161 - DNA, 1102 bp, Homo sapiens
atgcggccgcgtttccgtggagacagccgagcctgcggaaggcggcggcggcggcacctgcgatcagcggctggggcaggttatggtagtgcggactgcggtgtgagcagagcggccacggggcccgccatgcgccggcggccctgacatgggcgccagcgggtccaaagctcggggcctgtggcccttcgcctcggcggccggaggcggcggctcagaggcagcaggagctgagcaagctttggtgcggcctcggggccgagctgtgccccccttcgtattcacgcgccgcggctctatgttctatgatgaggatggggatctggctcacgagttctatgaggagacaatcgtcaccaagaacgggcagaagcgggccaagctgaggcgagtgcataagaatctgattcctcagggcatcgtgaagctggatcacccccgcatccacgtggatttccctgtgatcctctatgaggtgtgaccctgggaggtggcagacagaagcaccccctgccccggcaagaaactcccaggctcaatcaaggtgtggcttccattgaggagcccaggctggggccacaaccctgaataaactctgttggcccataaccttcagctgtgagcgggtcggtcccacagtattggttgggtgttggtttgtgtgtggacaagaggtggttggtgggtggtgaaggctaatggcagagttagcaccccactctcccaagccacccctgcaagcagcacagcagggcatataccagtcaggaatgcccgttacctggttccttgcctggtctgctttcttccaagtttgcctggggcctagccctgctagaggctacagcactttacaagcaaggtatgctttcttccagcccctaggctgtgggcactgtatacaagtaggaacttcctttccttcacttcccttttaacccctagtcagagcatttcagccgtttgctacctcgattcctcctgtgttggacagaggctgggggcagtgccagcctgattcttccgacctacctgccatttgttcccgccttcagatggatggacagtttgctggctcgacggccgccgacttagtagtagt

SEQ ID NO: 10162 - DNA, 889 bp, Homo sapiens
atgcggccgcgtttccgtggagacagccgagcctgcggaaggcggcggcggcggcacctgcgatcagcggctggggcaggttatggtagtgcggactgcggtgtgagcagagcggccacggggcccgccatgcgccggcggccctgacatgggcgccagcgggtccaaagctcggggcctgtggcccttcgcctcggcggccggaggcggcggctcagaggcagcaggagctgagcaagctttggtgcggcctcggggccgagctgtgccccccttcgtattcacgcgccgcggctctatgttctatgatgaggatggggatctggctcacgagttctatgaggagacaatcgtcaccaagaacgggcagaagcgggccaagctgaggcgagtgcataagaatctgattcctcagggcatcgtgaagctggatcacccccgcatccacgtggatttccctgtgatcctctatgaggtgtgaccctgggaggtggcagacagaagcaccccctgccccggcaagaaactcccaggctcaatcaaggtgtggcttccattgaggagcccaggctggggccacaaccctgaataaactctgttggcccataaccttcaggatcagtcaagggaaagcactagaacccctgggtagggaaagaaaggagggaaaaaccataaaaggaatacttataatgtgaaggtttgtaaatagtccatgatgatgtcgtggcagagtctgatttctatatagaggtgactttttttttaagtactgtgcaagctctgtgcttctataatgtgggaaatggcttggggaggatggcccctagcttaggaagactgttgtgttatttgttcaatttcaataaaatgatttgtagatcctgca

SEQ ID NO: 10163 - DNA, 791 bp, Homo sapiens
atgcggccgcgtttccgtggagacagccgagcctgcggaaggcggcggcggcggcacctgcgatcagcggctggggcaggttatggtagtgcggactgcggtgtgagcagagcggccacggggcccgccatgcgccggcggccctgacatgggcgccagcgggtccaaagctcggggcctgtggcccttcgcctcggcggccggaggcggcggctcagaggcagcaggagctgagcaagctttggtgcggcctcggggccgagctgtgccccccttcgtattcacgcgccgcgggcttctgctatttcagtctttgacactgggccagcagcatcttctggagtgagaccaacatgcccaggccaccaccctgcccactctagaagtcctgggtgaaggcaaagtcctgatattagaatggctgcccttgctgaacaaatcaaggatgagaactggccttggtggctgcctggatgctctatgttctatgatgaggatggggatctggctcacgagttctatgaggagacaatcgtcaccaagaacgggcagaagcgggccaagctgaggcgagtgcataagaatctgattcctcagggcatcgtgaagctggatcacccccgcatccacgtggatttccctgtgatcctctatgaggtgtgaccctgggaggtggcagacagaagcaccccctgccccggcaagaaactcccaggctcaatcaaggtgtggcttccattgaggagcccaggctggggccacaaccctgaataaactctgttggcccataa

SEQ ID NO: 10164 - DNA, 938 bp, Homo sapiens
atgcggccgcgtttccgtggagacagccgagcctgcggaaggcggcggcggcggcacctgcgatcagcggctggggcaggttatggtagtgcggactgcggtgtgagcagagcggccacggggcccgccatgcgccggcggccctgacatgggcgccagcgggtccaaagctcggggcctgtggcccttcgcctcggcggccggaggcggcggctcagaggcagcaggagctgagcaagctttggtgcggcctcggggccgagctgtgccccccttcgtattcacgcgccgcggctctatgttctatgatgaggatggggatctggctcacgagttctatgaggagacaatcgtcaccaagaacgggcagaagcgggccaagctgagggcatcgtgaagctggatcacccccgcatccacgtggatttccctgtgatcctctatgaggtgtgaccctgggaggtggcagacagaagcaccccctgccccggcaagaaactcccaggctcaatcaaggtgtggcttccattgaggagcccaggctggggccacaaccctgaataaactctgttggcccataaaaaaaaaaaaaaaaaaaaaaaaaaaaaaaaaaaaaaaaaaaaaaaaaaaccgggggggtttggggggggggagcacaacggcgtaatcatagaagagcgcatgtgctaacctgcgtttctctgcaccccagttttttgtaacagggggagtaactgtcggggggcccccccataaggaaagagcgcaaataagtgcagaaacccgggttcccctttatcgtctagtccgacctacaacacaagaagtaggcacaacaaccagggcggacgacgtcagacgacctagctagtagtcgagaggtcaaggatagcagtcagttcatatcacccagtcacacacacagagctcagcatagt

SEQ ID NO: 10165 - DNA, 581 bp, Homo sapiens
atgcggccgcgtttccgtggagacagccgagcctgcggaaggcggcggcggcggcacctgcgatcagcggctggggcaggttatggtagtgcggactgcggtgtgagcagagcggccacggggcccgccatgcgccggcggccctgacatgggcgccagcgggtccaaagctcggggcctgtggcccttcgcctcggcggccggaggcggcggctcagaggcagcaggagctgagcaagctttggtgcggcctcggggccgagctgtgccccccttcgtattcacgcgccgcggctctatgttctatgatgaggatggggatctggctcacgagttctatgaggagacaatcgtcaccaagaacgggcagaagcgggccaagctgagggcatcgtgaagctggatcacccccgcatccacgtggatttccctgtgatcctctatgaggtgtgaccctgggaggtggcagacagaagcaccccctgccccggcaagaaactcccaggctcaatcaaggtgtggcttccattgaggagcccaggctggggccacaaccctgaataaactctgttggcccataa

SEQ ID NO: 10166 - DNA, 144 bp, Homo sapiens
aagactccaatactttttccagaagcctaccccactggtaatcagtgatctaacatacacttcttactgtccactccagcctaaggaagattggaaggatgctcagctttacaataagcatcctaaagtctaggaatttcaacc

SEQ ID NO: 10167 - DNA, 132 bp, Homo sapiens
gggatgttgataatgggggaggctatacatgcatgaggacaaatgatatacaaaaactctctatatcttcctctcaattttgctgtgaacataaatctgccctacagaaaaatagtctttaaaaatttttaa

SEQ ID NO: 10168 - DNA, 691 bp, Homo sapiens
attctcatgtaagagaataatagaaatatctcattgagatcaatgcacattgctacatgagaatattacagcaggaagaattaagtttagtttgcttcaccatgttaatacatgatcacaaaatgtgcatgagtgttattgacttatcttgtacagtactaggattcctgtaaccactcttttttttcttcgctgtattgaaactggttcagtgttaaccaggcaagcatagttattcacaggttatttactttatgtttactaattctgcttagttattgttgaatatgttctgttccagattatttttattgttttgatgtttaaaacattttgcatactgtttatcataaaacttcatgaagtaaataattttgcatataattgcaataagcactgacttttgaactgaaaagaaggaaagtgtttttttgtgcagtgcttctgaggttcatataatagtcttgtactataatgtgctttactacacgataaatgacaaaaacaagccctgtttcatgtttcatttagtgcaaaaagtcagatttccccagtgttttgttgtctgttgtacctgctgaaactacagtagttgaatattgcggtagcatttcagttctctttttttattaaagtgctcaaaaattgttttttaaatgttttcaaaaacaattaaaaacattttatatta

SEQ ID NO: 10169 - DNA, 5492 bp, Homo sapiens
gctcggtacccccgtgatagttctggcagacggagcactgcagaaaccttcaaatgaaggtgtcattgaaataaaagcaactaaggtctgtgaccagaggaccaaatgtaaaagtcgctgtaatgaaatgctgccaggcacgtcaacaggcaataatcaaagcactatcactctatcagttgcttctcagaacttaactttcaccagcagcagctcaccacctaatggtgactcaatcaataaagaccctaaattatgcactaaaagcccaagaaaacgactgtcttctacattgcaagagacccaggtgcctcctgtaaagaaaccaattgtggaacagctttcagcagctaccatagaagggcagaaacaaggcagtgttaagaaggaccaaaaggttccacattcagggaaaacagaaggttcaacagcaggtgctcagattcctagcaaggtatcagtaaatgtcagttcacacataggagcaaatcaacccttgaattcctctgcccttgttatcagtgattcagctttggaacagcaaacaaccccatcatcatctccagatataaaagtaaaacttgaaggaagtgtctttctcttggacagtgattcaaagtcagttggcagctttaatccaaatggatggcaacaaatcactaaagattctgagtttatatctgccagttgtgaacaacagcaagatatcagtgttatgacaattcctgagcactctgatatcaatgacttagagaaatctgtttgggaattagaaggaatgccacaggacacatatagccagcagctacatagccagatacaggaatcttctttaaatcaaatacaagcacattcttcagatcagttacctctgcaatctgaactgaaggagtttgagccttctgtttcccagacaaatgaaagctactttccttttgatgatgaacttacacaagatagtattgtggaagagctggtgcttatggagcagcaaatgtcaatgaacaattctcattcttacggcaactgtttgggaatgacccttcagagtcagtcagtaactccaggagctccaatgtcatctcacacttccagcacccacttctatcatccaatccacagcaatggcactccaatccacacacccacacccacacccacacccactcctactccaaccccaaccccaaccccgacatctgaaatgattgctggatctcagagtctgtcacgggagagcccttgctccaggctagcccagactacacctgtggatagtgctttaggaagtagccgacatacacccattggtactccacattctaactgcagcagtagtgtcccccccagccctgttgaatgcaggaatccgtttgcattcactccaataagctccagtatggcatatcatgacgccagcattgtctcaagtagtcctgtgaaaccgatgcaaagacccatggccacacaccctgacaaaaccaagcttgaatggatgaataatgggtatagtggggttggtaattcatcagtttctggccatggtattctcccaagctatcaggaactagtggaagaccgtttcaggaaacctcatgcttttgctgtgcctggacagtcttatcagtctcaatccagacatcatgacactcattttggtcgtttgactcctgtctctcctgtgcagcatcaaggtgccactgtaaataacaccaacaaacaggagggttttgcagtccctgcccctcttgataataaaggaactaattcatctgccagcagcaacttcagatgccggagtgtgagccctgctgttcatcgccaacgtaatcttagtggaagcaccctctatccagtatctaatatcccacgatctaatgtgaccccctttggaagtccagttaccccagaagttcatgttttcacaaatgttcacacagacgcatgtgccaacaacatagctcaaagaagccaatcagttccattgacagtcatgatgcagacagccttcccaaacgctcttcagaagcaagcaaacagtaaaaaaataaccaatgttttgttgagtaaacttgattccgacaatgatgatgcagtgagaggtttgggaatgaacaacctgccctctaattatacagcccggatgaatctcactcagattttggaaccttccactgtttttcctagtgccaacccacaaaatatgatcgattccagcacttctgtttatgagttccaaacaccatcttacctcaccaaaagtaatagcaccggtcagatcaatttttctcctggagataatcaagcacaatcagaaattggagagcaacaattagatttcaatagcactgttaaagacctgttgagtggagacagcttgcaaaccaaccagcagctggtaggtcagggagcatctgatctcactaatactgcatctgatttctctagcgatatcaggttgtcttctgagctctcaggcagcatcaatgatttgaacactttagacccaaatctactgtttgatccaggtcgtcagcagggacaagatgatgaagctacactggaagaattaaagaatgacccattatttcaacaaatttgcagtgaatccatgaattctatgacttcatcaggttttgaatggatagaaagcaaggaccatcctactgttgaaatgttgggttaaattgtgttttataacatgtagcacactgtatctaaagacatatgtattgtatttgtcttaatggaagtgcctcccgcagcagaaatactattaattgtgacattttaaaagcgtttgctgcagaagtggtttcttcagtaggaaatggttagacttgcctcagttcttaacaagtgtctaaagacagtaggctgtagaagaacaagtattaggttttaaattttataatgtgccccatttattcacattgattgactatccagctgttacaagagcagtcgatctttattttgtgtaagttagtttcatttcatcagatgatctgcacagaactcagaataaaccatcaattttaggtataggctgttttgttgttggcattatcttttagatataaaatcatagctagggtgaactgtagacaagaaagtcttccttgaaacagggataatattcaggttattataaatatttaggcttgaagcatagagctactgtagggtgaaaaatctctgtaggactttctggggcttcagtaccatttacacccacgatgaagggcttaaatagaaaataatggaaaattaaatattactttaaggaaagcaaagctgcactaaaatttttaagggaaaaaaaacaagtagccatttatatttgtgaccttgcattaatatttaaatgttgattttaatatggagctagcacacatagatgcgcaggcacgcacacacaaaacaagcaaatgtaactccaggcatttgtaatttaatataataaatacaagcatgttagaaaaatgctttatgtcttattatttgttaagttaggggaatgagaaggaaaacaaaagcattctcttagtttcatcacaatggctgcatgtacatattgagattctaattgagatttactttgaaatttttcattaaaatattccacaataatcagtttttttcctcttcaattgagtgactgactccctcactcctcctgaatatagtaatgtagtttgatcataggatccctttgaaaaacaggaaggaggataacataaaaaacaacaaaaaacatttcaccacctaaggtctgaagccacaaatctttatatctctgatgaaacaaaggggatatcaatagtacttgaagaagaagagcattttattacttgcttaatttatttattgtgataaccacaattgcaaaagaagaactcaggatttgttttaaaatgtttctctctatggctcccattttgttttgtgaataattatttatgagttgcatgttgacacaaacctactcactggttgaaagctccatttaagtgagtttcaagatcactttcaaagagatttttaaattgccattgtttttaaagctaacataaaaccatttgctatgctaccttgaacctagctaagctttcctttaccttagtaagccaatcagaagactacaatcaatgaatatttagcaaatgtgctgaagggtttaataaggttttgttgttcaataaatttgcaaggtagggtattaacatattttgataaataaatggtgctagagttggcgcagaggtttatatattgatatgtcttagttattggcatttgtgtgtgtttgctgttatcttgatttcatgatttgttaggtatttttttcttgatgctagttatttcttcactgtacattgagacacagcactactgcacaccaaagtatgcaatacccaaaggaaactgtgtgatttctcctgacaaatgatgggagcctttctttatgagatactctgaaaaggagattttgaggccattctaatcccttgtttacattattagcttcctactaatataaaaataatggaaatcttttttgataaaaatattaagactggaggatttttaaccccttgtacagtattgcagcaaactctttaaatttggttgaattcgtccagcaaactttctggggttcatatattgcactaaatttgttgaacctgtggtaggcacatctcttaggataaatgcaaccaatacagtccacagattaaactttttaaatgtgtttcattatgaaaagacaaaatgtcatcaaagtgacagataaaattgtcttatgtagcaatgtgcattgatctcaatgagatatttctattattctcttacatgagaatattacagcaggaagaattaagtttagtttgcttcaccatgttaatacatgatcacaaaatgtgcatgagtgttattgacttatcttgtacagtactaggattcctgtaaccactcttttttttcttcgctgtattgaaactggttcagtgttaaccaggcaagcatagttattcacaggttatttactttatgtttactaattctgcttagttattgttgaatatgttctgttccagattatttttattgttttgatgtttaaaacattttgcatactgtttatcataaaacttcatgaagtaaataattttgcatataattgcaataagcactgacttttgaactgaaaagaaggaaagtgtttttttgtgcagtgcttctgaggttcatataatagtcttgtactataatgtgctttactacacgataaatgacaaaaacaagccctgtttcatgtttcatttagtgcaaaaagtcagatttccccagtgttttgttgtctgttgtacctgctgaaactacagtagttgaatattgcggtagcatttcagttctctttttttattaaagtgctcaaaaattgttttttaaatgttttcaaaaacaattaaaaacattttatatta

SEQ ID NO: 10170 - DNA, 5438 bp, Homo sapiens
gctcggtacccccgtgatagttctggcagacggagcactgcagaaaccttcaaatgaaggtgtcattgaaataaaagcaactaaggtctgtgaccagaggaccaaatgtaaaagtcgctgtaatgaaatgctgccaggcacgtcaacaggcaataatcaaagcactatcactctatcagttgcttctcagaacttaactttcaccagcagcagctcaccacctaatggtgactcaatcaataaagaccctaaattatgcactaaaagcccaagaaaacgactgtcttctacattgcaagagacccaggtgcctcctgtaaagaaaccaattgtggaacagctttcagcagctaccatagaagggcagaaacaaggcagtgttaagaaggaccaaaaggttccacattcagggaaaacagaaggttcaacagcaggtgctcagattcctagcaaggtatcagtaaatgtcagttcacacataggagcaaatcaacccttgaattcctctgcccttgttatcagtgattcagctttggaacagcaaacaaccccatcatcatctccagatataaaagtaaaacttgaaggaagtgtctttctcttggacagtgattcaaagtcagttggcagctttaatccaaatggatggcaacaaatcactaaagattctgagtttatatctgccagttgtgaacaacagcaagatatcagtgttatgacaattcctgagcactctgatatcaatgacttagagaaatctgtttgggaattagaaggaatgccacaggacacatatagccagcagctacatagccagatacaggaatcttctttaaatcaaatacaagcacattcttcagatcagttacctctgcaatctgaactgaaggagtttgagccttctgtttcccagacaaatgaaagctactttccttttgatgatgaacttacacaagatagtattgtggaagagctggtgcttatggagcagcaaatgtcaatgaacaattctcattcttacggcaactgtttgggaatgacccttcagagtcagtcagtaactccaggagctccaatgtcatctcacacttccagcacccacttctatcatccaatccacagcaatggcactccaatccacacacccacacccacacccacacccactcctactccaaccccaaccccaaccccgacatctgaaatgattgctggatctcagagtctgtcacgggagagcccttgctccaggctagcccagactacacctgtggatagtgctttaggaagtagccgacatacacccattggtactccacattctaactgcagcagtagtgtcccccccagccctgttgaatgcaggaatccgtttgcattcactccaataagctccagtatggcatatcatgacgccagcattgtctcaagtagtcctgtgaaaccgatgcaaagacccatggccacacaccctgacatttctggccatggtattctcccaagctatcaggaactagtggaagaccgtttcaggaaacctcatgcttttgctgtgcctggacagtcttatcagtctcaatccagacatcatgacactcattttggtcgtttgactcctgtctctcctgtgcagcatcaaggtgccactgtaaataacaccaacaaacaggagggttttgcagtccctgcccctcttgataataaaggaactaattcatctgccagcagcaacttcagatgccggagtgtgagccctgctgttcatcgccaacgtaatcttagtggaagcaccctctatccagtatctaatatcccacgatctaatgtgaccccctttggaagtccagttaccccagaagttcatgttttcacaaatgttcacacagacgcatgtgccaacaacatagctcaaagaagccaatcagttccattgacagtcatgatgcagacagccttcccaaacgctcttcagaagcaagcaaacagtaaaaaaataaccaatgttttgttgagtaaacttgattccgacaatgatgatgcagtgagaggtttgggaatgaacaacctgccctctaattatacagcccggatgaatctcactcagattttggaaccttccactgtttttcctagtgccaacccacaaaatatgatcgattccagcacttctgtttatgagttccaaacaccatcttacctcaccaaaagtaatagcaccggtcagatcaatttttctcctggagataatcaagcacaatcagaaattggagagcaacaattagatttcaatagcactgttaaagacctgttgagtggagacagcttgcaaaccaaccagcagctggtaggtcagggagcatctgatctcactaatactgcatctgatttctctagcgatatcaggttgtcttctgagctctcaggcagcatcaatgatttgaacactttagacccaaatctactgtttgatccaggtcgtcagcagggacaagatgatgaagctacactggaagaattaaagaatgacccattatttcaacaaatttgcagtgaatccatgaattctatgacttcatcaggttttgaatggatagaaagcaaggaccatcctactgttgaaatgttgggttaaattgtgttttataacatgtagcacactgtatctaaagacatatgtattgtatttgtcttaatggaagtgcctcccgcagcagaaatactattaattgtgacattttaaaagcgtttgctgcagaagtggtttcttcagtaggaaatggttagacttgcctcagttcttaacaagtgtctaaagacagtaggctgtagaagaacaagtattaggttttaaattttataatgtgccccatttattcacattgattgactatccagctgttacaagagcagtcgatctttattttgtgtaagttagtttcatttcatcagatgatctgcacagaactcagaataaaccatcaattttaggtataggctgttttgttgttggcattatcttttagatataaaatcatagctagggtgaactgtagacaagaaagtcttccttgaaacagggataatattcaggttattataaatatttaggcttgaagcatagagctactgtagggtgaaaaatctctgtaggactttctggggcttcagtaccatttacacccacgatgaagggcttaaatagaaaataatggaaaattaaatattactttaaggaaagcaaagctgcactaaaatttttaagggaaaaaaaacaagtagccatttatatttgtgaccttgcattaatatttaaatgttgattttaatatggagctagcacacatagatgcgcaggcacgcacacacaaaacaagcaaatgtaactccaggcatttgtaatttaatataataaatacaagcatgttagaaaaatgctttatgtcttattatttgttaagttaggggaatgagaaggaaaacaaaagcattctcttagtttcatcacaatggctgcatgtacatattgagattctaattgagatttactttgaaatttttcattaaaatattccacaataatcagtttttttcctcttcaattgagtgactgactccctcactcctcctgaatatagtaatgtagtttgatcataggatccctttgaaaaacaggaaggaggataacataaaaaacaacaaaaaacatttcaccacctaaggtctgaagccacaaatctttatatctctgatgaaacaaaggggatatcaatagtacttgaagaagaagagcattttattacttgcttaatttatttattgtgataaccacaattgcaaaagaagaactcaggatttgttttaaaatgtttctctctatggctcccattttgttttgtgaataattatttatgagttgcatgttgacacaaacctactcactggttgaaagctccatttaagtgagtttcaagatcactttcaaagagatttttaaattgccattgtttttaaagctaacataaaaccatttgctatgctaccttgaacctagctaagctttcctttaccttagtaagccaatcagaagactacaatcaatgaatatttagcaaatgtgctgaagggtttaataaggttttgttgttcaataaatttgcaaggtagggtattaacatattttgataaataaatggtgctagagttggcgcagaggtttatatattgatatgtcttagttattggcatttgtgtgtgtttgctgttatcttgatttcatgatttgttaggtatttttttcttgatgctagttatttcttcactgtacattgagacacagcactactgcacaccaaagtatgcaatacccaaaggaaactgtgtgatttctcctgacaaatgatgggagcctttctttatgagatactctgaaaaggagattttgaggccattctaatcccttgtttacattattagcttcctactaatataaaaataatggaaatcttttttgataaaaatattaagactggaggatttttaaccccttgtacagtattgcagcaaactctttaaatttggttgaattcgtccagcaaactttctggggttcatatattgcactaaatttgttgaacctgtggtaggcacatctcttaggataaatgcaaccaatacagtccacagattaaactttttaaatgtgtttcattatgaaaagacaaaatgtcatcaaagtgacagataaaattgtcttatgtagcaatgtgcattgatctcaatgagatatttctattattctcttacatgagaatattacagcaggaagaattaagtttagtttgcttcaccatgttaatacatgatcacaaaatgtgcatgagtgttattgacttatcttgtacagtactaggattcctgtaaccactcttttttttcttcgctgtattgaaactggttcagtgttaaccaggcaagcatagttattcacaggttatttactttatgtttactaattctgcttagttattgttgaatatgttctgttccagattatttttattgttttgatgtttaaaacattttgcatactgtttatcataaaacttcatgaagtaaataattttgcatataattgcaataagcactgacttttgaactgaaaagaaggaaagtgtttttttgtgcagtgcttctgaggttcatataatagtcttgtactataatgtgctttactacacgataaatgacaaaaacaagccctgtttcatgtttcatttagtgcaaaaagtcagatttccccagtgttttgttgtctgttgtacctgctgaaactacagtagttgaatattgcggtagcatttcagttctctttttttattaaagtgctcaaaaattgttttttaaatgttttcaaaaacaattaaaaacattttatatta

SEQ ID NO: 10171 - DNA, 3062 bp, Homo sapiens
gctcggtacccccgtgatagttctggcagacggagcactgcagaaaccttcaaatgaaggtgtcattgaaataaaagcaactaaggtctgtgaccagaggaccaaatgtaaaagtcgctgtaatgaaatgctgccaggcacgtcaacaggcaataatcaaagcactatcactctatcagttgcttctcagaacttaactttcaccagcagcagctcaccacctaatggtgactcaatcaataaagaccctaaattatgcactaaaagcccaagaaaacgactgtcttctacattgcaagagacccaggtgcctcctgtaaagaaaccaattgtggaacagctttcagcagctaccatagaagggcagaaacaaggcagtgttaagaaggaccaaaaggttccacattcagggaaaacagaaggttcaacagcaggtgctcagattcctagcaaggtatcagtaaatgtcagttcacacataggagcaaatcaacccttgaattcctctgcccttgttatcagtgattcagctttggaacagcaaacaaccccatcatcatctccagatataaaagtaaaacttgaaggaagtgtctttctcttggacagtgattcaaagtcagttggcagctttaatccaaatggatggcaacaaatcactaaagattctgagtttatatctgccagttgtgaacaacagcaagatatcagtgttatgacaattcctgagcactctgatatcaatgacttagagaaatctgtttgggaattagaaggaatgccacaggacacatatagccagcagctacatagccagatacaggaatcttctttaaatcaaatacaagcacattcttcagatcagttacctctgcaatctgaactgaaggagtttgagccttctgtttcccagacaaatgaaagctactttccttttgatgatgaacttacacaagatagtattgtggaagagctggtgcttatggagcagcaaatgtcaatgaacaattctcattcttacggcaactgtttgggaatgacccttcagagtcagtcagtaactccaggagctccaatgtcatctcacacttccagcacccacttctatcatccaatccacagcaatggcactccaatccacacacccacacccacacccacacccactcctactccaaccccaaccccaaccccgacatctgaaatgattgctggatctcagagtctgtcacgggagagcccttgctccaggctagcccagactacacctgtggatagtgctttaggaagtagccgacatacacccattggtactccacattctaactgcagcagtagtgtcccccccagccctgttgaatgcaggaatccgtttgcattcactccaataagctccagtatggcatatcatgacgccagcattgtctcaagtagtcctgtgaaaccgatgcaaagacccatggccacacaccctgacatttctggccatggtattctcccaagctatcaggaactagtggaagaccgtttcaggaaacctcatgcttttgctgtgcctggacagtcttatcagtctcaatccagacatcatgacactcattttggtcgtttgactcctgtctctcctgtgcagcatcaaggtgccactgtaaataacaccaacaaacaggagggttttgcagtccctgcccctcttgataataaaggaactaattcatctgccagcagcaacttcagatgccggagtgtgagccctgctgttcatcgccaacgtaatcttagtggaagcaccctctatccagtatctaatatcccacgatctaatgtgaccccctttggaagtccagttaccccagaagttcatgttttcacaaatgttcacacagacgcatgtgccaacaacatagctcaaagaagccaatcagttccattgacagtcatgatgcagacagccttcccaaacgctcttcagaagcaagcaaacagtaaaaaaataaccaatgttttgttgagtaaacttgattccgacaatgatgatgcagtgagaggtttgggaatgaacaacctgccctctaattatacagcccggatgaatctcactcagattttggaaccttccactgtttttcctagtgccaacccacaaaatatgatcgattccagcacttctgtttatgagttccaaacaccatcttacctcaccaaaagtaatagcaccggtcagatcaatttttctcctggagataatcaagcacaatcagaaattggagagcaacaattagatttcaatagcactgttaaagacctgttgagtggagacagcttgcaaaccaaccagcagctgaaataccctgatgtattaggagaatgaagatttaaaaacaaaattttgttttccacacagcttttcaagcatatttcatacaggtatactctagtcatatttatgtttaaatcacttaaaatgtcatcaaaataaaaatgggactttttttttaacagatgataaagtgcctaaaatatgtcagtctctgtacaaggtgctagagaagacacctgccattttgaaattttgcaatataatgaaaaagacacagtgaatgtctttgcaggatgcaatgaggtcactatagcagaggcggatacttaccagtagtatgcattctccccttcttctttactgtaaaagtccttgatttttagctgagcacacagccatctgaccaaaaggctgcatctgccaacttcccttgcagttaagtggagacacttaccaagtactcaaagagatgtaaccaaaaggtttgggtgctacttctttgcagtgttcttgtccttcctctctgctggctggaatgcaaatgtgatggctagaactcaagcagccctcctggacttcatgttaaagacacatgctgaggatgattgagcaacaagatacaaggagcccagggcatgatgactttggaagggaagatgcccaactagtcctgactgcttacctctggatgtgttttacatgagagaaataaatgtctttctggtttaactcacaaatattt

SEQ ID NO: 10172 - DNA, 2581 bp, Homo sapiens
gctcggtacccccgtgatagttctggcagacggagcactgcagaaaccttcaaatgaaggtgtcattgaaataaaagcaactaaggtctgtgaccagaggaccaaatgtaaaagtcgctgtaatgaaatgctgccaggcacgtcaacaggcaataatcaaagcactatcactctatcagttgcttctcagaacttaactttcaccagcagcagctcaccacctaatggtgactcaatcaataaagaccctaaattatgcactaaaagcccaagaaaacgactgtcttctacattgcaagagacccaggtgcctcctgtaaagaaaccaattgtggaacagctttcagcagctaccatagaagggcagaaacaaggcagtgttaagaaggaccaaaaggttccacattcagggaaaacagaaggttcaacagcaggtgctcagattcctagcaaggtatcagtaaatgtcagttcacacataggagcaaatcaacccttgaattcctctgcccttgttatcagtgattcagctttggaacagcaaacaaccccatcatcatctccagatataaaagtaaaacttgaaggaagtgtctttctcttggacagtgattcaaagtcagttggcagctttaatccaaatggatggcaacaaatcactaaagattctgagtttatatctgccagttgtgaacaacagcaagatatcagtgttatgacaattcctgagcactctgatatcaatgacttagagaaatctgtttgggaattagaaggaatgccacaggacacatatagccagcagctacatagccagatacaggaatcttctttaaatcaaatacaagcacattcttcagatcagttacctctgcaatctgaactgaaggagtttgagccttctgtttcccagacaaatgaaagctactttccttttgatgatgaacttacacaagatagtattgtggaagagctggtgcttatggagcagcaaatgtcaatgaacaattctcattcttacggcaactgtttgggaatgacccttcagagtcagtcagtaactccaggagctccaatgtcatctcacacttccagcacccacttctatcatccaatccacagcaatggcactccaatccacacacccacacccacacccacacccactcctactccaaccccaaccccaaccccgacatctgaaatgattgctggatctcagagtctgtcacgggagagcccttgctccaggctagcccagactacacctgtggatagtgctttaggaagtagccgacatacacccattggtactccacattctaactgcagcagtagtgtcccccccagccctgttgaatgcaggaatccgtttgcattcactccaataagctccagtatggcatatcatgacgccagcattgtctcaagtagtcctgtgaaaccgatgcaaagacccatggccacacaccctgacatttctggccatggtattctcccaagctatcaggaactagtggaagaccgtttcaggaaacctcatgcttttgctgtgcctggacagtcttatcagtctcaatccagacatcatgacactcattttggtcgtttgactcctgtctctcctgtgcagcatcaaggtgccactgtaaataacaccaacaaacaggagggttttgcagtccctgcccctcttgataataaaggaactaattcatctgccagcagcaacttcagatgccggagtgtgagccctgctgttcatcgccaacgtaatcttagtggaagcaccctctatccagtatctaatatcccacgatctaatgtgaccccctttggaagtccagttaccccagaagttcatgttttcacaaatgttcacacagacgcatgtgccaacaacatagctcaaagaagccaatcagttccattgacagtcatgatgcagacagccttcccaaacgctcttcagaagcaagcaaacagtaaaaaaataaccaatgttttgttgagtaaacttgattccgacaatgatgatgcagtgagaggtttgggaatgaacaacctgccctctaattatacagcccggatgaatctcactcagattttggaaccttccactgtttttcctagtgccaacccacaaaatatgatcgattccagcacttctgtttatgagttccaaacaccatcttacctcaccaaaagtaatagcaccggtcagatcaatttttctcctggagataatcaagcacaatcagaaattggagagcaacaattagatttcaatagcactgttaaagacctgttgagtggagacagcttgcaaaccaaccagcagctgtgttcttgtccttcctctctgctggctggaatgcaaatgtgatggctagaactcaagcagccctcctggacttcatgttaaagacacatgctgaggatgattgagcaacaagatacaaggagcccagggcatgatgactttggaagggaagatgcccaactagtcctgactgcttacctctggatgtgttttacatgagagaaataaatgtctttctggtttaactcacaaatattt

SEQ ID NO: 10173 - DNA, 1404 bp, Homo sapiens
cattgttataaatgaatttttaaataattaaagttataaatttatggatgggatcacttattaatattgcatcatctgaaattttaaaaatatgtatgccagtcttgttgctataatctgcttagaaaaaagaacaaaacaaaaagactacatttttcaagatttgatttttaagaagtacttaattcttggagaggagaagagagtcatataaataaaatatatcatgagagtgatattactgtggtatatagagtatttctttgcattagacccagtgttagtttgcatatattctcatgtcctcattgtaacaatttttagcgagtattatttttcaggtgagaaaattttacttcagagattaactggtgggaggtaacataataacaggaagagccagggattatcttaatttcaaatcccacttccataccattatgctatacttaaggatatgtgttcacagtgtacctactgccagttgtatgatctggttgcttctttgaaattttcattctggttttaaatttagaattgagtttgatttttgtggagttctttatttaacctcccatccttatatgtcaacaattctttttcatttttattgcttttagatttacctgtagtttgtaattttcctccaaattacttgaatccttttccctcccttctctccatagaaataccctgatgtattaggagaatgaagatttaaaaacaaaattttgttttccacacagcttttcaagcatatttcatacaggtatactctagtcatatttatgtttaaatcacttaaaatgtcatcaaaataaaaatgggactttttttttaacagatgataaagtgcctaaaatatgtcagtctctgtacaaggtgctagagaagacacctgccattttgaaattttgcaatataatgaaaaagacacagtgaatgtctttgcaggatgcaatgaggtcactatagcagaggcggatacttaccagtagtatgcattctccccttcttctttactgtaaaagtccttgatttttagctgagcacacagccatctgaccaaaaggctgcatctgccaacttcccttgcagttaagtggagacacttaccaagtactcaaagagatgtaaccaaaaggtttgggtgctacttctttgcagtgttcttgtccttcctctctgctggctggaatgcaaatgtgatggctagaactcaagcagccctcctggacttcatgttaaagacacatgctgaggatgattgagcaacaagatacaaggagcccagggcatgatgactttggaagggaagatgcccaactagtcctgactgcttacctctggatgtgttttacatgagagaaataaatgtctttctggtttaactcacaaatattt

SEQ ID NO: 10174 - DNA, 2664 bp, Homo sapiens
gctcggtacccccgtgatagttctggcagacggagcactgcagaaaccttcaaatgaaggtgtcattgaaataaaagcaactaaggtctgtgaccagaggaccaaatgtaaaagtcgctgtaatgaaatgctgccaggcacgtcaacaggcaataatcaaagcactatcactctatcagttgcttctcagaacttaactttcaccagcagcagctcaccacctaatggtgactcaatcaataaagaccctaaattatgcactaaaagcccaagaaaacgactgtcttctacattgcaagagacccaggtgcctcctgtaaagaaaccaattgtggaacagctttcagcagctaccatagaagggcagaaacaaggcagtgttaagaaggaccaaaaggttccacattcagggaaaacagaaggttcaacagcaggtgctcagattcctagcaaggtatcagtaaatgtcagttcacacataggagcaaatcaacccttgaattcctctgcccttgttatcagtgattcagctttggaacagcaaacaaccccatcatcatctccagatataaaagtaaaacttgaaggaagtgtctttctcttggacagtgattcaaagtcagttggcagctttaatccaaatggatggcaacaaatcactaaagattctgagtttatatctgccagttgtgaacaacagcaagatatcagtgttatgacaattcctgagcactctgatatcaatgacttagagaaatctgtttgggaattagaaggaatgccacaggacacatatagccagcagctacatagccagatacaggaatcttctttaaatcaaatacaagcacattcttcagatcagttacctctgcaatctgaactgaaggagtttgagccttctgtttcccagacaaatgaaagctactttccttttgatgatgaacttacacaagatagtattgtggaagagctggtgcttatggagcagcaaatgtcaatgaacaattctcattcttacggcaactgtttgggaatgacccttcagagtcagtcagtaactccaggagctccaatgtcatctcacacttccagcacccacttctatcatccaatccacagcaatggcactccaatccacacacccacacccacacccacacccactcctactccaaccccaaccccaaccccgacatctgaaatgattgctggatctcagagtctgtcacgggagagcccttgctccaggctagcccagactacacctgtggatagtgctttaggaagtagccgacatacacccattggtactccacattctaactgcagcagtagtgtcccccccagccctgttgaatgcaggaatccgtttgcattcactccaataagctccagtatggcatatcatgacgccagcattgtctcaagtagtcctgtgaaaccgatgcaaagacccatggccacacaccctgacatttctggccatggtattctcccaagctatcaggaactagtggaagaccgtttcaggaaacctcatgcttttgctgtgcctggacagtcttatcagtctcaatccagacatcatgacactcattttggtcgtttgactcctgtctctcctgtgcagcatcaaggtgccactgtaaataacaccaacaaacaggagggttttgcagtccctgcccctcttgataataaaggaactaattcatctgccagcagcaacttcagatgccggagtgtgagccctgctgttcatcgccaacgtaatcttagtggaagcaccctctatccagtatctaatatcccacgatctaatgtgaccccctttggaagtccagttaccccagaagttcatgttttcacaaatgttcacacagacgcatgtgccaacaacatagctcaaagaagccaatcagttccattgacagtcatgatgcagacagccttcccaaacgctcttcagaagcaagcaaacagtaaaaaaataaccaatgttttgttgagtaaacttgattccgacaatgatgatgcagtgagaggtttgggaatgaacaacctgccctctaattatacagcccggatgaatctcactcagattttggaaccttccactgtttttcctagtgccaacccacaaaatatgatcgattccagcacttctgtttatgagttccaaacaccatcttacctcaccaaaagtaatagcaccggtcagatcaatttttctcctggagataatcaagcacaatcagaaattggagagcaacaattagatttcaatagcactgttaaagacctgttgagtggagacagcttgcaaaccaaccagcagctgaaataccctgatgtattaggagaatgaagatttaaaaacaaaattttgttttccacacagcttttcaagcatatttcatacagtgttcttgtccttcctctctgctggctggaatgcaaatgtgatggctagaactcaagcagccctcctggacttcatgttaaagacacatgctgaggatgattgagcaacaagatacaaggagcccagggcatgatgactttggaagggaagatgcccaactagtcctgactgcttacctctggatgtgttttacatgagagaaataaatgtctttctggtttaactcacaaatattt

SEQ ID NO: 10175 - DNA, 1714 bp, Homo sapiens
gctcggtacccccgtgatagttctggcagacggagcactgcagaaaccttcaaatgaaggtgtcattgaaataaaagcaactaaggtctgtgaccagaggaccaaatgtaaaagtcgctgtaatgaaatgctgccaggcacgtcaacaggcaataatcaaagcactatcactctatcagttgcttctcagaacttaactttcaccagcagcagctcaccacctaatggtgactcaatcaataaagaccctaaattatgcactaaaagcccaagaaaacgactgtcttctacattgcaagagacccaggtgcctcctgtaaagaaaccaattgtggaacagctttcagcagctaccatagaagggcagaaacaaggcagtgttaagaaggaccaaaaggttccacattcagggaaaacagaaggttcaacagcaggtgctcagattcctagcaaggtatcagtaaatgtcagttcacacataggagcaaatcaacccttgaattcctctgcccttgttatcagtgattcagctttggaacagcaaacaaccccatcatcatctccagatataaaagtaaaacttgaaggaagtgtctttctcttggacagtgattcaaagtcagttggcagctttaatccaaatggatggcaacaaatcactaaagattctgagtttatatctgccagttgtgaacaacagcaagatatcagtgttatgacaattcctgagcactctgatatcaatgacttagagaaatctgtttgggaattagaaggaatgccacaggacacatatagccagcagctacatagccagatacaggaatcttctttaaatcaaatacaagcacattcttcagatcagttacctctgcaatctgaactgaaggagtttgagccttctgtttcccagacaaatgaaagctactttccttttgatgatgaacttacacaagatagtattgtggaagagctggtgcttatggagcagcaaatgtcaatgaacaattctcattcttacggcaactgtttgggaatgacccttcagagtcagtcagtaactccaggagctccaatgtcatctcacacttccagcacccacttctatcatccaatccacagcaatggcactccaatccacacacccacacccacacccacacccactcctactccaaccccaaccccaaccccgacatctgaaatgattgctggatctcagagtctgtcacgggagagcccttgctccaggctagcccagactacacctgtggatagtgctttaggaagtagccgacatacacccattggtactccacattctaactgcagcagtagtgtcccccccagccctgttgaatgcaggaatccgtttgcattcactccaataagctccagtatggcatatcatgacgccagcattgtctcaagtagtcctgtgaaaccgatgcaaagacccatggccacacaccctgacaaaaccaagcttgaatggatgaataatgggtatagtggggttggtaattcatcagtttctggccatggtattctcccgacacgagccccagatgcagtctacacagaactccagcccacctctcctgaccccaacctggcctgctgatgtaacaccacaactccagacccagaccctagcaactggaaggtacggatggcctgtagtgacacttgcatccagacgggtatcctctgg

SEQ ID NO: 10176 - DNA, 673 bp, Homo sapiens
caaagactccccagaacgttccagccagtcctggtggggatcgttctgcccggcaccgttaccctcagatcttacccaaaccagcgaacaccagtgcactcaccattcgctctccaactactgtcctctttactagtagtcccatcaaaactgctgttgtacccgcttcacacatgagttctctaaatgtggtgaaaatgacaacaatatccctcacacccagcaacagtaacacccctcttaaacattctgcctcagtcagcagtgctacaggaacaacagaagaatcaaggagtgttccacagatcaagaatggttctgtcgtgtcgcttcagtctcctgggtccaggagcagcagtgcggggggaacatctgctgtggaagtcaaagtggaacccgaaacatcatcagatgagcatcctgtacagtgccaagagaactctgatgaggctaaagctccccagacacctagtgcccttttggggcagaaaagtaatacagacggagcactgcagaaaccttcaaatgaaggtgtcattgaaataaaagcaactaaggtctgtgaccagaggaccaaatgtaaaagtcgctgtaatgaaatgctgccaggcacgtcaacaggcaataatcaaagcactatcactctatcagttgcttctcagaacttaacttt

SEQ ID NO: 10177 - DNA, 960 bp, Homo sapiens
gaaggatggggacaacttggaagccagaagaagaacctggaagccacagtgggtgcgactcaattcacacccggatccagagtttcaaagagaggcaaagggggaaagagactgaggttgtaaacgttataagcagtttttatatataacttatttaatacaaatgtgacttaattaagcgtaaccttttctctggagttgtggtgaaactaatcacgtctgtgagagatcagaaagaaagagacttagggaagtggaagagaaagggaattttggaatttatttctttaaaaataatgcaatggaaatatatcaaaacatgtaaacgcccaccttaaaccaaatgttatttggtcatgaggcaccttgctggagtctcagattccaaaagtctcttcttcagactgggtagggaatatgatattttagggacaaagctgaggactggttttaaataggctttaaaataaaagatcaatattatcataatgctatcattctgctaaacggccccaaaacagtagaatttctgctcatgtcctagcaggttcagaagactgcagccaagttcagatgtaaaaacaagaagtagcacttttccaaaggaaaacaacaaaacaaatgggaaaaagataatggaccgcatttcacctattttaatactattttaacaattttttcatctaccaatatatccccaataaataaatataaaagggggggagggtcaatctggggaatcttagttttttatgttttaagaaaacaaaaaaaactgcattatttttgtaaagtatttattgagtcacggattattgtgcatcaagcaattgttaatatgacctggtcctatggggtagaacttaggaaaaataaagttggttcttattcaatattttactttgcaaaattctagtaaaagagagtatataataaaatcataataaaaggtgttacctg

SEQ ID NO: 10178 - DNA, 393 bp, Homo sapiens
atcttctgactgaagttgaagataaaacctgataccagtttggagtagaaagagacacagtattgtaatcataaatgacatttgaccttaaaacagtaacacagcaaatttctaattaaagtggagcatgtcctgtcttgactgaggcaccaagacgatttgttgcagattgttgctggcagtgtgcagtccccaagaccaaatcaccaagaggcacagtggtaagagtggtcagcaaggagcggagcgccttcctcccaccagcaggtgactcaccacatcgtgtcctccttggcgtaagaggcgccctaaaggtttctccgttccagttatcctaactggaatactgttcctgaaaaaagcgtatatttaaggccctgctagctataagca

SEQ ID NO: 10179 - DNA, 292 bp, Homo sapiens
cactgaagcctcaaactgctgggctcaagtggtcctcctgcgtaagcctcctgaatagctaggactacaggtactcgtcaccatggctggctaattgtttgtacttcgttgtagagacagggtgtcactatgttgaccaggctggtctcaaactcctgggctcaagtgatcttcccacctcggcctcccaaagtgctgggattacaaacagcccctttgcccagccttccttcctgtctttcaacaatgttttgtagttttcagaatataagttttgttcttgttaaattta

SEQ ID NO: 10180 - DNA, 401 bp, Homo sapiens
tttttttttaactattatccccaaggtgggaaacagttttgttagctggtactactggaagcaccctggggcaattttgtattcaggatctttctgcttgaactccccatttgagatttctgaatggcttctctaagaaacaaccatgcacccaggagcccctcactctgtagcaagaattgattagggttgggaagccattgagaaaacacgcctgggcctgaataacatcaaaatgcctaagttcatctagcacagacatcttaatgtgacacatttcaagaatatttattccttctttagcagaaaaacaggattcaaaagtctctgtttcatggccatgactgtgccccatcatgataaacaattgattattcagtacacaatggccaggattaaat

SEQ ID NO: 10181 - DNA, 611 bp, Homo sapiens
agtagagacagggtttcaccatgttggccaggctggtctcgaactcctgacctcgtgatctgcccgcctcagcctcccaaagtgctgggattacatgcgtgaaccaccgcacccggctgcctttgcattatttttaaagtcacttctcagctttatcctcaactgattaataatactgttcatttttttcttttacgctttatgaatatctatcccttttccatacttctagcacttgaacttgtcttcactgcctctctcagttttcactaccaacaacatcctaggttggccttcttcaccctaaattttctgtcaatccatctgtatttcactgctaattgattttttctttaaagccattttcatcaagttagtaatctgcttaaagacctttaagtctaaattctggcctcaattccaagactctccataatctggttttacacatggtagttcttaagttagataaacctttcttcactagcttctaaacctaacatcttcattccctttatatctgtttattccctttatatctgttgtttctccattcccctttcaccatgcttctattccctaggcccgttcagattgagtattgtataaag

SEQ ID NO: 10182 - DNA, 417 bp, Homo sapiens
acttatattcctggtgaattgatatgttccttcatcttcagtgatgtgtcttgccacaaacactgtatttgtatgtttacaataatttccttttatttaggattcgcatcgtaaacttttcccttccttgtactttcaatctattttcatccttatgtttaaggtgtatctgttgtgtctactgttgtcgttttttaatccagtctgacaagttttgtcatttaataagagtatttaattcatttacatttaataaagctacttatgtaactggacttaaatctactaccttccaagttgatttatgtttctccataaacataaacacagaacacagaacatgttctgtgttcctttttctatggtttcttattgtatagattatttaaaatagtttacattttcccctattgcttg

SEQ ID NO: 10183 - DNA, 1229 bp, Homo sapiens
gctgaaggacagtgaaactggcagcagaaagggggaaagaaaaaaacaagaattatgaataatctacaaatataattatctctaaataatggagagttgaccaaaataccagagtggtaatacattctgagtccagaaatgtcaattaagtgttccccaacagcttctcttttctgcagcaatccctcgaaaacaaatctatacttgaaagggtgggggcaagatgggggagaatcaccccacagaactgttaattaagggaaccggagcaggttttacccagtggctttctaccattaaattgagttctttaaaaatgtgacatgaagtgcagttaatgataggaattcggtgattgaaccataatgatctctccctgtccttaaacacaaatgtagggaaggcttcaggttattgggaaaatgtatacctgaagcaaaatgccatcagcactcaaattggcataaagccttgaggatgatggcaagaaatagagtgttagaaattactgcatgttcaatgaaagctttattcaggaaacacacgtttcctacccttacagactgctaagaatttaaatgctggaacctcagaagtatgcctgtgtttcagaattttgcattttaaactaaaatcacctactatggtgggggaaacatgtcttagacttgacataggttggctttgttatattaagttttatataagcaatctagaaactatcccctaaaatgaaattaaaaggtaacagggtaaaactgaaacatgggggttgagaatgactggaagtaaatgttaaaaagcaaatctagatgtttgaacacaaaatagatcataaagcccaagttacctggatttattttctttttttattaatgcagcccaggcttcccaaataaatttcaactttctgctctatttggagttgtatagatccaggtaatttctgaacagtttcaccctaagtggtaaaaatacgttcatttgcacaaatgttttcaatttaaaaagcaagcatttgtttaaatttggaggacgaaatatgtttatttctccatgtgtcatttccaaattatatggattctgaaaaatacaacatcatttttctatccaaccttaagttttatgattttttttacaatatggttactgtgtctatgtcaatagacatttatgaaatgacctattaataggaattttcactgaaaatatatggctgtcatatatct

SEQ ID NO: 10184 - DNA, 1109 bp, Homo sapiens
gctgaaggacagtgaaactggcagcagaaagggggaaagaaaaaaacaagaattatgaataatctacaaatataattatctctaaataatggagagttgaccaaaataccagagtggtaatacattctgagtccagaaatgtcaattaagtgttccccaacagcttctcttttctgcagcaatccctcgaaaacaaatctatacttgaaagggtgggggcaagatgggggagaatcaccccacagaactgttaattaagggaaccggagcaggttttacccagtggctttctaccattaaattgagttctttaaaaatgtgacatgaagtgcagttaatgataggaattcggtgattgaaccataatgatctctccctgtccttaaacacaaatgtagggaaggcttcaggttattgggaaaatgtatacctgaagcaaaatgccatcagcactcaaattggcataaagccttgaggatgatggcaagaaatagagtgttagaaattactgcatgttcaatgaaagctttattcaggaaacacacgtttcctacccttacagactgctaagaatttaaatgctggaacctcagaagtatgcctgtgtttcagaattttgcattttaaactaaaatcacctactatggtgggggaaacatgtcttagacttgacataggttggctttgttatattaagttttatataagcaatctagaaactatcccctaaaatgaaattaaaaggtaacagggtaaaactgaaacatgggggttgagaatgactggaagtaaatgttaaaaagcaaatctagatgtttgaacacaaaatagatcataaagcccaagttacctggatttattttctttttttattaatgcagcccaggcttcccaaataaatttcaactttctgctctatttggagttgtatagatccaggtaatttctgaacagtttcaccctaagtggtaaaaatacgttcatttgcacaaatgttttcaatttaaaaagcaagcatttgtttaaatttggaggacgaaatatgtttatttcgcagggcccttacctttacaacttcctatcatctgaaattatttcaaaatataaag

SEQ ID NO: 10185 - DNA, 285 bp, Homo sapiens
aattcagaaaagtatcagactaaattttaaagtctactttaaactgagtctttgctttatagttgcataaataaattcattttgatggttttctcagaacagatgaactggctgggtgcggtggttcatgcctgtaatcttagcactttgggaggccaaggccgatggctcacttcaagtcaggagtttgagaccagccaaaaaattagccgggtgtggtggtgcacgtttgtaataccagctactcaggaggctgaggcaggagaatcgcttgaacctgggagg

SEQ ID NO: 10186 - DNA, 861 bp, Homo sapiens
aaaaaaaacagacaaggtgtcaggagattaggattactggtttagctacagcctcttccttaatctatggtatctcagtctcagtgtactcacttacatgtaatatctaatggtatttgtacagaactaaaatacataaattcataaaagttattaatgtgtaaagcactgataaagtttttttttgttgttgttgtttttttttttgagatggagttccactctttttgcccaggctggaatggtgtgatctcccgtcactacaacctccacctcccaggttcgagcgattctccagcctcagcctcccgagtagctgagattacaggcgcccgccactatgcctggctaatttttgtatttttagtagagatggggtttcaccatgttggccaggctgctctcaaactccagacctcaggtgatctgcccgcctcggcctcccgaagtgctgggattacaggcttgagccaccacgcctggccaagatttttcaaatgcttctcacaagcactttttaatttacaaagcattactttagactttgtatacattcatgtgagtaaggggacaagaatttaaggcccagtagtattgcttgttcagaaaggtactgctcagtattggaccagcttgctgtgtagctggacacctgaaagacattttctacttctacaggcagagattgagcagcatcttgatgctccctagtgcgttaacataagcagaatttacacccttttcagccttggccgagtgcctctgcttagccaacattcctactaagctcctttgtctcgattgtgtcttgctttggttgctaaaaaaaaaatcttaactaaaataacagatgttttgggg

SEQ ID NO: 10187 - DNA, 214 bp, Homo sapiens
gtagtacatcttgtgctcttattggccaagtttttcatctgcattccatggaaaaaaagtttggctatcatttgtaagagtatgatcagtggtgtgttgctatgagcccgtgaaatagaaaaacaaaattaggaaagacctatgtagctagaaaatgtggctttttaaaattgtcatcagaaagctattaatgacttttaaggaagcaagaaag

SEQ ID NO: 10188 - DNA, 276 bp, Homo sapiens
gggactacaggcgcccgccaccacgcccagctaattttttgtatttttggtagagacggggtttcactctgttagccaggatggtctcgatctcctgacctcgtgatccgcccacctcagcctcccaaagtgctgggattacaggcgtgagccaccacgcccaggcaattcaggggttttaagtgaaggacaactgaaatcacctagcccaccccttgcgtgtttaagcatcaaggagcattcattggtgatgatttgaatgtcctgggacagtgg

SEQ ID NO: 10189 - DNA, 1021 bp, Homo sapiens
atctggaataaagtccaaaattactgggcataaaagaaccaagaaaatttcaactctgaaaaagacaaccgatgtcagtattaagatgacacagatgttggaattatttgacaggctttaaagtggctattatgaaaatgctccagcaagtgagggcaaacagtcttgaaatgaatggaatgatagacaggtcagcaaataaacagaagaccttaagaagaaccaaatggagattttagcactgaaaaatactgtaagaaaatttaaatctcactgcataaatcagtaatagaatggatttgactaaggagtcagtgaacttgaagataggtaatacaaattatcctatctgaacaacagagagaaaaaaagattttaaaataatgtctgagggacctgtggggcaattataaaaggtctaacattggggccactggaagagaaggagaagaggaggagaaagtgcagtacagaagtctttaaagaaagtaatggctgaaaacttctcagatttggcaacaggcataaacctacagattcaaaaagctcagcagaccctaaataggataaacctaaagaattccatgcccaaacctataatcaaactgctgaaaagattaaaaaagaagtctcgaaagcagttggaaaaaaacaactcattgcttaaaaagaaacaagaatttgaatggttacgaatttctcatcagaaatcttggaggccagaaagaagaacagcattcttaaagtatggagagaaaaagaattgtcaacccagaattctatatccagtgaatatttcaccttcatttctaaaggatattaagatattattaagaatatcttaacaaagaaactaagagaattcatagtcaatagatcttctcaaaaggagttttaaaaggaagttcctcagacagaatggagatgataccagatggaaacttcaaacatcaggtataaaagaagagtggtagaaatggtaaatatgtgggtaaatataatggacagttctctaaaatag

SEQ ID NO: 10190 - DNA, 299 bp, Homo sapiens
gctgggttgccagattttggaaagcggaggcgatgctgaatttatctgtgtatccttagtgtccggcaccgtgtttggatctcaaggggagctcagtgaatttgatgaatgaacatgtaatttaacaaatgctcgcttcctttcggaaaggcttcatctggcttccccagataatttcatgtcgcctctgctgcagtccacttcctatcacgaatctctacctatttaaactgcactctctctactcttcatttactattttgaggtttttccaaataaaaatcatacgtcagcatgca

SEQ ID NO: 10191 - DNA, 126 bp, Homo sapiens
gaagaatgttacagaaagcggtggaagggaacaacgaaaataagaaatgtgctagaagcttgtacaccagctgggttctccttactgccagggctttagctacaaaaaaaaaaaaaaaaaagaaag

SEQ ID NO: 10192 - DNA, 372 bp, Homo sapiens
tttcaagcacccaaaaatggaagactgcactgaaggaaatttgttcgaaagaacttgagagattagggggtgaaattagatagagaaaaaaattctaaacacgttgagatatgtcgtcagtaaaatgcgctttggcataacaaagttgtgaattgaaacagttacagaaatattgtggctggggaaatcccaagtgtttctacagttgaacatccctgattagaaaatccaaaatcagaaatgttccaaaatccaaaactttttaagcactgacatgatatcacaaatggaaaattccacacctgacttcatgtgagaggtcacagtcaaaacgcagccaaaactttgtttcacacaaaaaatatttaaaat

SEQ ID NO: 10193 - DNA, 480 bp, Homo sapiens
acctggataagactcccagatgctcccttgtttatctgtgaccaggccagacacagaccctctaaattcccattcttggcctcataaatgattagctgggctgcttgtcccacagatcaataagaacaaaagcctgtaaccaaaccttggttcagattctctccttttccaagcccttgagctttggcccacccacagcttgtgccaacccgcagccctcctgaggttccctcctgagaacaggctgtccgcagggtaagacctcctcgatcgtgacactcttgctcagcccactttcccataacagttctttctagccacgtttacgcctccctatacaagatcagccctttgcctaacctctgagacacttgcagatcatatgggaagcctgcgagtggccgcactgcaacgtttccctattgcaatggtcacccccacaacaatcctttggaataaattcgctccttatataatcca

SEQ ID NO: 10194 - DNA, 294 bp, Homo sapiens
cccttggaggattagtggccccacgcaggtgtgcaagacccacgggtcccctcaatcagaagcgggatgtgtggcagggagctttggagagctttccattttggattagtgatttccctgtcgacttttccctcgtttttgtcacagcacactcggaacatttctcatcagctgtgtacactatgtcaggcatttcaaatatgtttctggaagttgtcagtgctgttctctatgaggcctgaaggaaaaattcaatgtttgtagtaaataaagtacaaaaattatatcagtcta

SEQ ID NO: 10195 - DNA, 286 bp, Homo sapiens
tgggggacaggctattcacatagtctcaaataatcacattctaggttatttattagttataaagttaaagaggtactgtcacaggggagaaacctggcagacatcacttgaatcgagtgatcaacctgaacaggaccagcaatgggatgcagcaaccctcctgggccctcggaaaacagtgtggaaaatactatggaatagtatgcagacagaaaaaagaatgaaatcatgtcctttgcagcaacatgggcggagctggaggctattattctaagtgaaatagaat

SEQ ID NO: 10196 - DNA, 1805 bp, Homo sapiens
gagggctccactcaagtgaccacttgcagccctgagccattaccaatcgcgacccgcctggctggaagttggctgtcttgtttcctgtgaccttgggggtggaaaggacagagcccaggcgacctagggcactatctccctaccccacgccttctcccttcctcgttcctccctacccttatcgcttctaccccgcccacaccgccctaaacggcttcctggggcggaactgtttcgcttttccccgtcccagtggagggtggggtgggggggtcgcagccctaagcctctgggagacatggagcccaggagggcggcgcccggggtgcctggctgggggtctcgggaggccgcggggtcggcatcggccgcggagcttgtgtaccatctagccggggccctgggcactgagctgcaggatctggcgcgccgtttcgggccggaggcggcggccgggctggtgccgctagtggtgcgggcgctggagctcttggaacaggctgccgtggggcccgccccggactcgctgcaggtgtcggcgcagccggcggagcaggagctgcggcggctgcgggaggagaacgagcgcctccgcagggagctgcgcgcggggccacaggaggagcgcgcgctgctgcggcagctcaaggaggtcacggaccgacagcgggacgaactccgggcgcacaaccgcgacctgcggcagcgcggccaggagaccgaggcgttgcaggagcagctgcagcgcctcctgctggtgaacgctgagctgcggcacaagctggcggccatgcagacccagctgcgcgccgcgcaggaccgcgagagggagcgccagcagcctggcgaagccgcgactccgcaggctaaagagcgagcgcgggggcaggccgggcggcccgggcaccagcacggacaggagcccgaatgggcgaccgccggcgcaggcgccccagggaaccctgaggacccggcggaggccgcgcagcagctcgggcgcccctcggaggcagggcagtgccgcttcagtcgggaggagtttgagcagatccttcaggagcggaatgaactcaaagccaaagtgttcctgctcaaggaggaactggcctacttccagcgggagctgctcacagaccaccgggtccccggccttctgctcgaggccatgaaggtggctgtccggaagcagcggaagaagatcaaggccaagatgttagggacaccagaggaagcagagagcagtgaggatgaggctggcccatggatcctgctctccgatgacaagggagaccatcccccacccccggagtccaaaatacagagtttctttggcctatggtatcggggtaaagctgaatcctctgaggatgagaccagcagccctgcacccagcaagctagggggagaagaggaggcccaaccacagtctccagctcctgatccgccctgttctgccctccacgaacacctttgtctgggggcctcagccgccccagaggcctgacttaggggtctggctgtggaaggatgtgtggcctcaaatgaggacagggctcccgccttcacagccctcgccaggggtctgccccaatcctggcctgcatcagggcaggacggggtctcagcccgcctccctctctacgtctctgtaccgagcctctggggccagatataagagtgcctctctgagtctcagtttccccatccatgaaatgagagctgactgcctagctcccagggctttgtgcagacggcctgagctcatgtaataaagaactgcccgtaatacacagaaaaaaaaaatc

SEQ ID NO: 10197 - DNA, 534 bp, Homo sapiens
gagggctccactcaagtgaccacttgcagccctgagccattaccaatcgcgacccgcctggctggaagttggctgtcttgtttcctgtgaccttgggggtggaaaggacagagcccaggcgacctagggcactatctccctaccccacgccttctcccttcctcgttcctccctacccttatcgcttctaccccgcccacaccgccctaaacggcttcctggggcggaactgtttcgcttttccccgtcccagtggagggtggggtgggggggtcgcagccctaagcctctgggagacatggagcccaggagggcggcgcccggggtgcctggctgggggtctcgggaggccgcggggtcggcatcggccgcggagcttgtcgagcctctggggccagatataagagtgcctctctgagtctcagtttccccatccatgaaatgagagctgactgcctagctcccagggctttgtgcagacggcctgagctcatgtaataaagaactgcccgtaatacacagaaaaaaaaaatc

SEQ ID NO: 10198 - DNA, 1721 bp, Homo sapiens
gagggctccactcaagtgaccacttgcagccctgagccattaccaatcgcgacccgcctggctggaagttggctgtcttgtttcctgtgaccttgggggtggaaaggacagagcccaggcgacctagggcactatctccctaccccacgccttctcccttcctcgttcctccctacccttatcgcttctaccccgcccacaccgccctaaacggcttcctggggcggaactgtttcgcttttccccgtcccagtggagggtggggtgggggggtcgcagccctaagcctctgggagacatggagcccaggagggcggcgcccggggtgcctggctgggggtctcgggaggccgcggggtcggcatcggccgcggagcttgtgtaccatctagccggggccctgggcactgagctgcaggatctggcgcgccgtttcgggccggaggcggcggccgggctggtgccgctagtggtgcgggcgctggagctcttggaacaggctgccgtggggcccgccccggactcgctgcaggtgtcggcgcagccggcggagcaggagctgcggcggctgcgggaggagaacgagcgcctccgcagggagctgcgcgcggggccacaggaggagcgcgcgctgctgcggcagctcaaggaggtcacggaccgacagcgggacgaactccgggcgcacaaccgcgacctgcggcagcgcggccaggagaccgaggcgttgcaggagcagctgcagcgcctcctgctggtgaacgctgagctgcggcacaagctggcggccatgcagacccagctgcgcgccgcgcaggaccgcgagagggagcgccagcagcctggcgaagccgcgactccgcaggctaaagagcgagcgcgggggcaggccgggcggcccgggcaccagcacggacaggagcccgaatgggcgaccgccggcgcaggcgccccagggaaccctgaggacccggcggaggccgcgcagcagctcgggcgcccctcggaggcagggcagtgccgcttcagtcgggaggagtttgagcagatccttcaggagcggaatgaactcaaagccaaagtgttcctgctcaaggaggaactggcctacttccagcgggagctgctcacagaccaccgggtccccggccttctgctcgaggccatgaaggtggctgtccggaagcagcggaagaagatcaaggccaagatgttagggacaccagaggaagcagagagcagctttggcctatggtatcggggtaaagctgaatcctctgaggatgagaccagcagccctgcacccagcaagctagggggagaagaggaggcccaaccacagtctccagctcctgatccgccctgttctgccctccacgaacacctttgtctgggggcctcagccgccccagaggcctgacttaggggtctggctgtggaaggatgtgtggcctcaaatgaggacagggctcccgccttcacagccctcgccaggggtctgccccaatcctggcctgcatcagggcaggacggggtctcagcccgcctccctctctacgtctctgtaccgagcctctggggccagatataagagtgcctctctgagtctcagtttccccatccatgaaatgagagctgactgcctagctcccagggctttgtgcagacggcctgagctcatgtaataaagaactgcccgtaatacacagaaaaaaaaaatc

SEQ ID NO: 10199 - DNA, 1625 bp, Homo sapiens
gagggctccactcaagtgaccacttgcagccctgagccattaccaatcgcgacccgcctggctggaagttggctgtcttgtttcctgtgaccttgggggtggaaaggacagagcccaggcgacctagggcactatctccctaccccacgccttctcccttcctcgttcctccctacccttatcgcttctaccccgcccacaccgccctaaacggcttcctggggcggaactgtttcgcttttccccgtcccagtggagggtggggtgggggggtcgcagccctaagcctctgggagacatggagcccaggagggcggcgcccggggtgcctggctgggggtctcgggaggccgcggggtcggcatcggccgcggagcttgtgtaccatctagccggggccctgggcactgagctgcaggatctggcgcgccgtttcgggccggaggcggcggccgggctggtgccgctagtggtgcgggcgctggagctcttggaacaggctgccgtggggcccgccccggactcgctgcaggtgtcggcgcagccggcggagcaggagctgcggcggctgcgggaggagaacgagcgcctccgcagggagctgcgcgcggggccacaggaggagcgcgcgctgctgcggcagctcaaggaggtcacggaccgacagcgggacgaactccgggcgcacaaccgcgacctgcggcagcgcggccaggagaccgaggcgttgcaggagcagctgcagcgcctcctgctggtgaacgctgagctgcggcacaagctggcggccatgcagacccagctgcgcgccgcgcaggaccgcgagagggagcgccagcagcctggcgaagccgcgactccgcaggctaaagagcgagcgcgggggcaggccgggcggcccgggcaccagcacggacaggagcccgaatgggcgaccgccggcgcaggcgccccagggaaccctgaggacccggcggaggccgcgcagcagctcgggcgcccctcggaggcagggcagtgccgcttcagtcgggaggagtttgagcagatccttcaggagcggaatgaactcaaagccaaagtgttcctgctcaaggaggaactggcctacttccagcgggagctgctcacagaccaccgggtccccggccttctgctcgaggccatgaaggtggctgtccggaagcagcggaagaagatcaaggccaagatgttagggacaccagaggaagcagagagcagtgaggatgaggctggcccatggatcctgctctccgatgacaagggagaccatcccccacccccggagtccaaaatacagagtttctttggcctatggtatcggggtaaagctgaatcctctgaggatgagaccagcagccctgcacccagcaagctagggggagaagaggaggcccaaccacagtctccagctcctgatccgccctgttctgccctccacgaacacctttcgagcctctggggccagatataagagtgcctctctgagtctcagtttccccatccatgaaatgagagctgactgcctagctcccagggctttgtgcagacggcctgagctcatgtaataaagaactgcccgtaatacacagaaaaaaaaaatc

SEQ ID NO: 10200 - DNA, 363 bp, Homo sapiens
aagaaaggtgtttgaatttattcactgttaaagtttctagtttcagagaaacaaaataaccaacacttacctgtagggcctggccaggtggctcactcacgcctgtaatctcagcactttgggaagtggaggcgagaggattgcttgagcgtaggagtttgatatcagtctgagcagcatagtgagactttgtcactgccaaaaaataaaagaaattagctgggcgtggtggtgtgcgtctgtagtcccagaagctgaggtaggaggtttgcctgagcccagagttcaaggttgcagtgaggcacagttgcgccactgtactccagcctgggcgacagagtaagaccctgtcttaaacaaaaa

SEQ ID NO: 10201 - DNA, 696 bp, Homo sapiens
tggcgtgctgtgttaagcacaagtggatgtacatacaagagggacaggtgcacacgtccacacacacatcaggggacatgcaggtggaatgcaacactcgtgtgcacaccagctatatacgcaaatgctttctctcaggggcaggtagggcttacacacacgtgtacacacaggcacatgtgcacagatgaacacgtgtgtcagtgaaatagggcatttgccaacgcatgccagtctgtcccgtttgtcctgcacgttccctcaaacacgcagggatgtgcacacacgtagataggatgcggcacctctgaccgagttaagtcatgcctaccacctttatgggtgcaggtgagaagcgggcaggtacacaacttaaaatctcacaccccagaagtgtgcatatatgaacagacatgtacaccaactgcacacatgctcacaatcttgtaggccaggggtgggcaaactatggcccacaggctgagtcctgccctctgtttgattgtataaataaagctttattgagctgggcacagtggctcatgcctgtaatcccagcactttgggaggctgaggcgggtggatcacttgaggtcaggaattcgaggccagcctggccaacatggtgaaacccggtttctactaaaaatacaaaaattagctgggcgtggtggtgtatgcctctaatcccagcta

SEQ ID NO: 10202 - DNA, 960 bp, Homo sapiens
attggatagttccagtggagaaagattagactcctcagaagctaattgactagggaaggatcaggaagacaagacacatcaaaaaggggagggaatctacaatggaaggacacaagaaagatcagctggattaagtagtcatgattatgcaaagccatatccagagaccaaggtgtaaagcaggtcggagaaaatggaaatctcaagattggctcagtcaaaaagaaacattatcagtttgaacatggaccttgaaagggatacgcagagaatagatgaagcaaatcagaaacttcttctcaaaatccaagagagggaagataagattcagaggctggaaagtgagatcattcagacgcggggcctggtggaagatgaagagtgggagaaggagaaccgcaccacgatggaaagggaaagagccttgcaggagctggaggaagaaacagccagacttgaaaggaagaataagacgttggtccacagtataacagaacttcaacaaaagcttacaaggaaatcacaaaagataaccaattgtgaacaaagcagtccagatggagccctagaagagacaaaggttaagttacaacagctggaagcttcctatgcatgccaagagaaggagctgctcaaggtaatgaaggagtatgcatttgtgacccagctctgtgaagatcaagccctctacataaagaagtaccaggaaacgttgaagaaaatagaagaagaactagaggctctgttccttgagagagaagtatcaaaactcgtgagcatgaaccctgtggaaaaagagcataccagccaaaataatgagggtactcctacccaaaagacagcaagattattcagtaaaaaatgggcctcctccttttagtggcaagatggctgccaacaatccagatctcgtactaccagattggcaacctttgcagaataaaagtcttttccaacagg

SEQ ID NO: 10203 - DNA, 1174 bp, Homo sapiens
aggaagcatcacaggaaaagctttgggttttcatgccttcccttcatgctcctagatctgctggactctgtgtccatctcagcacaactggagggcttctcttgtccaccaagcttcttaccacatctacaccccacttaacgggtctgagaatgctcagtcgcttcttctgcgccaccctaattatacttgcaacaacctcctcactcttacctccttcacctgtttatgtttcctcatggcagtgttaccaagcaaaagagtgtcactgcccaatgtgctggaagccaatactatgacacaagggaatctacaatggaaggacacaagaaagatcagctggattaagtagtcatgattatgcaaagccatatccagagaccaaggtgtaaagcaggtcggagaaaatggaaatctcaagattggctcagtcaaaaagaaacattatcagtttgaacatggaccttgaaagggatacgcagagaatagatgaagcaaatcagaaacttcttctcaaaatccaagagagggaagataagattcagaggctggaaagtgagatcattcagacgcggggcctggtggaagatgaagagtgggagaaggagaaccgcaccacgatggaaagggaaagagccttgcaggagctggaggaagaaacagccagacttgaaaggaagaataagacgttggtccacagtataacagaacttcaacaaaagcttacaaggaaatcacaaaagataaccaattgtgaacaaagcagtccagatggagccctagaagagacaaaggttaagttacaacagctggaagcttcctatgcatgccaagagaaggagctgctcaaggtaatgaaggagtatgcatttgtgacccagctctgtgaagatcaagccctctacataaagaagtaccaggaaacgttgaagaaaatagaagaagaactagaggctctgttccttgagagagaagtatcaaaactcgtgagcatgaaccctgtggaaaaagagcataccagccaaaataatgagggtactcctacccaaaagacagcaagattattcagtaaaaaatgggcctcctccttttagtggcaagatggctgccaacaatccagatctcgtactaccagattggcaacctttgcagaataaaagtcttttccaacagg

SEQ ID NO: 10204 - DNA, 500 bp, Homo sapiens
gaagagaagtgctgggtagaaaagggcatggtctgtggctagagttccatccccggacctgtgcctatggatctaagtgtggacaggaatttttgttttcctgccctatggttgcattacccaagaccaacctggcctaccatgcccctatcctgtgtctataaaaacccctgagaccctagctacttccactcaataaaacctggcactcattctccaagaccctagcagatagacacacaggtgctggacataaggaagagcaccaccagtgaagaaagacatgcacacgggtatcgggacattgagaggcgcacaccgacaggcaccagcgtgctggcaggccaccaaccagcggaacaatgcggagtttggctggggcagttggaggagagctagggccaccaactggcccaactccagggaaaaatcatctcccttctggctcccccatctgctgagagctacttccacttaataaaaccttgcactccttctcc

SEQ ID NO: 10205 - DNA, 214 bp, Homo sapiens
catcctcttatcttcttcctcttcctgaccacccctaccctcattttagatcttaatctattcagttttacagatgctgagatcgctcccaatccgcccacacatctggttagattcgtatttccctggctggcttgtattttaccagcatctgtcaaccctatttacttcttaattgttctttgggcatttggaggaaaagcctgcctgggga

SEQ ID NO: 10206 - DNA, 373 bp, Homo sapiens
ctcctctttacagacgcagcaactgaagttcagaccagttgggtggccaaggtcacagctagtaattggcggaagagagattaaaatccagtttcggctgggcgcggtggctcacgcttgtaatcccagcactttgggaggctgaggcggagggaacacctgaggtcaagaatttgagaccagcttggccaacatggcgaaaccccaactctactaaaaatacaaaaatgagccgggtgtggtggcgcgtgcctgtagtccccgctactcaggaggctgaggcgtgagaatcgcttacacccaggaggcagaggttgcagtgggccgagatcgcattgctgcactccagcctgggcaacagagcgagactcca

SEQ ID NO: 10207 - DNA, 642 bp, Homo sapiens
acacacatctgtcagtaggaactagagaagaagattccttctagtaaccttctggcaactcagtttacatgtttctcacaaccctcaaatgcccagtcctgccccctaaaatgtaatgtggcttattcattggtgtctctccatgttgttcttcaggaacaggtgttgttgcaaaaataatggcataatggctcaggcaatatttgtgatgatggtaggcctcagctctacccatgtctcctgtagtcccacttagcttctgtaactagattaggaattttactccttacaatctcaagaaaatttcccttggctctcttgaatgttcgactcagaattataaattgaaaggtatagggccaggcacactggctcacacctgtaattccagtactttgggaggctgaggtgggaggatcacttgagcccaggaattcaagaccagcctggccaacatagtgagaccccatctctgcaaaaaatacaaacattagccgggcattgtggtgcacacctgtaattcccaggtactcaggaagctgagttgggaggatcacctgagcctgagaagtcaaggctgcagtgagctctgattatgccactgcactctagcctgggtgacagagtgagaccctgtctcaa

SEQ ID NO: 10208 - DNA, 508 bp, Homo sapiens
taaatgaaatgatgacaggcctgatctggtagaccctaaataagaatagcatttacatagacttcctgtgtcccacactggtctaagagtttagggtttttgttgtttgtttttagctcattttatcttcccagcgcccctgtgcagtggttatcatttcccttgttttatagaggagacaactgaggctcaacaagattaaataactagcccaaagtctatcccaggacttgaagcagagtccctgttcttaaccactgccccagctgctcagtgagtacccccacccctgcttattctacctacctcctgatgcccatctcctgccattaacagtcagatgtgcttatgctctgtgtagggccatatttctggaaacagagcccctgcttccaaagagcagcttacttaggaagtgaaagtggcagctcactcctcctgtcgcctcctcccacttccagataacattaaacctcatccattgcttaggctggttaatatcaactgg

SEQ ID NO: 10209 - DNA, 438 bp, Homo sapiens
cctctgcctccctggttcaagcgattctcctgcctcagcctcccaagtaggtgggactacaggtgtgtgccatcacgcctagctaatttttgtattttcagtagagatgggtttcaccatgttggccaggctagtctcaaactcctgacctcaggcaatccgcctgcctctgcctcccaaagtgctgggattacaggcatgagccacagtgcccggccagagaagaattttaaataggcttccagccaatgagattatgagacaaaatctttaggaggtaaagaatattagtcatttttacacattcgtataactatactcccaagggaaaaagaaaaaggcactagcagcgttgaggggaagcatctatggcaatatttttagagactgttcatattttacttataattagcccaaagtggcaacctattaaaaaaa

SEQ ID NO: 10210 - DNA, 455 bp, Homo sapiens
aagtcgacccccacgtggcctgctgccacctgagccaggtgtgcaaaagtttgcattgcttcagatggtggtgtctgaacacaaagcacttttcagaagcgtctaaatacaatgcagcctggaataacaatggtaaatttaaaatctcacttaacccagaagtgcgctttgtggtcattctacctgattacttgtggggggcctaaaagtgggcttttctgatagagaagagagcctgctgatgtggtaatttgctgggttaaaaactttaaaagtgtagcagaagcatagcaagtgctcttttccttttcacagtgcagtcagtggagaaaggggaatgcacaccaatatgtgaatatccaattccttctattcaaaacatgttgccttacatagcacacacagcttaataccttccaaagatattaaattcctgaatggtaaaactagatgga

SEQ ID NO: 10211 - DNA, 935 bp, Homo sapiens
gggttccttaacaaacgtaatccagcaccagattagtattggtgttaggctgtctggagcctaattgctcacacgcttccaacagaatctgagccttgaatttttcttctttaaaaacacaactttgtccttttttttttttttccttccttttctcagtctttaaatatggctttttacaaatatttaaaagatgatttgttttgtggaaatgtcacttgtttttctccaaattaattttcatcttgtataattctgaatagtccatttccagcatttcccttttgtatatgaggaagtaagtttttgcaagaaattctgtgaagttagcactgctgtcaatgttcacactcttttcatgtagcagtgtacccgcatttgaatctttctgttacattattttggaattttaggtttcaaacagtgtatctttctaaaatccgtttttttgacattgtaattttctgtggcaagacactataaactctcaccaggttcttggattgggtatgattcacaggaattgaatgttagtaatctggggctgtcctctttatcattaaaaatgagtttttacaactggtgacaagctgattgctgacctttctttagaaatcaagaaattgtatgtcagaattaaaaataggaaatctgatttaattgtagagggtctatcaactgcttagacagagatagtaagattcaatttaagtaaatgtttataaccatagttatgcgcatcagttttacttgcaaggagaaaaatgagaaatcacgactcattccagaatttactgtttttccttcctgcttaatggttggaggaggaggaatggagaatacgttgtgatcattcagtaagagcctgaaggaaagttgtatgaagtaacgtaaaccacatattagcaagattataatccattaattgacttttc

SEQ ID NO: 10212 - DNA, 657 bp, Homo sapiens
atttgtacattgaggataataatagcatttatatcttagagctgggatcaatatacataaaatgcttagagtagtgcttggcacataataagtatttatcattattatggctgttgctattatcttaggcacccggaggaattagaacaatctttgatcccaaggaacctaaaatcaattatattctttattataaaaatattctttatttgaaaaatctctctggggagaaaaaccatctcaacatttctgaagcaacctatcaatagtaaacaaaaataatacttaagagtatgtaaatttgtgacaagagtggagtatagtggaccaagaaagattgcttcagaaggtatgagttttgaatgtgatctcaagtttcgatgggtatgattggcaggaggggaagctttctgggtggtcagagtgacttgatcagagagatgcagaggaattgacagaaaataatgggcttgactacagtcaggagacacaggtggagctctaagtcatagtctgtgtgtttatacacagaatataactctgccaggggctgtggagaatgcaaggtgcaactaagcatttagctgggggtcactgggcacaaaggtgaggatgctggcagggaaggggaaggagtcagggtagcggtgaacctag

SEQ ID NO: 10213 - DNA, 564 bp, Homo sapiens
  misc_feature (430)..(430): n is a, c, g, or t
ctttagctttggccagctgcacagttgaggaggctctgctggcctgattttggaaaaccaagccctgtttggtgaagctcctcaggtgacactgtctgaaacggagttgtttggatttgttatttctaccactgtgccttcttgcgtcactgtgttttgatttgtggtcaacaaaacactttcaaatagccttaggtgagtaagcctgcaagtgacagcaagaaattctaccgaatgaaactcaagaggcagaaaatcactatcataccaatgggagctcatttgtcaattccttcctgtgcatccaaccatcacgatcttatttgacattcgcagtagccctaaggggaacggcacctgcattgctcccctttcataatgggaatatgttcagagggaaactaggcccctattcgacagggagaacttngatgggttaacagggatagtatatcctcataggccaaattcttttcaccaaggaagtttttatgggcaaacacttgttaggccagggccctgcatgtttgtggataatcctagctaagtatcagataaagaaag

SEQ ID NO: 10214 - DNA, 239 bp, Homo sapiens
gcttttaggtcagacagaactaggtttaaatcctggctcaggtcccttagataagatactaagaatttataggtcatacagctgttggaaggataagtaatatactgtatagaaagtgattaccacaacatctgcacaatgtcattatgtttataaaaggttcctttctgtttgtcagtgttatacttgattattcttatttgtcttctgcagcacatttggccagtgtttcgggaagt

SEQ ID NO: 10215 - DNA, 1254 bp, Homo sapiens
catcaatgagtttcttcagttcttcctccagctaaagtagtgtcactctggtcacggtgacactgctttactggaggaagaactgaagaaactcattgatgctctgatagagaattttcttcagcctagtaagaatggactgatctggcgttctgtttaggggtacaccaatacgtcatgacactgtgtgggcatatggaacagagcaaccgagaactgcatacattgaaccttgtgttagcattctctctctatctcatctggccgagtatctttttccttttattttctttctttttggtcaactggctagactaaacaaagtataagtttgaaatgaaatggtctagagggaaatgattcaaattttttcataattcaaacaaaagttattacactaaaagtattatagtaacgtattgtccttccgttaacagaaacatcacaattcaaaagtgagttttcttattatagtgtgattaagcctagttctgtatctcgtaattgtgtatagcatggtaaaagaaaaaaaaaaagacaggtaaatgttatataattgtagggttagttaaggaaattagtccataaaattggcaagaaaatggtactttccttgattgttatgaaaaagtgtcattgtgacatcacaggtattaatttacaaattagagtatttgaaataggatatttagcatttctgtagtttagaacagatgttacagtgtgtggttttggcatgtctgtttcaggtgcccttggtgcagtataaatttactgtatgtatttaaaattctgatgtttactgaacataaaacaatagtggcaacactcctattggctttgttcttatcaaatttctcagtgccttctcagggtctggtatgaacagaaaaaacagtgttcctgcatttaccataatttaatcagtcaatttgcagatagctaaggaaaatcttccaaaatctgtaggtgcttcctctatatcaagtgagtttgctgattttaaaatcttaggaatataaataaagatcttaataaaagcaagcttaatgtagttaaggatcttcatattagaattgtgtcatttatcaaaccttttattacagaaaaaaatctgaactgagaaaggagctctgaatttatttgacagtctaacttttgaattacatttttgtaagtagatttattcttttattttatgaagtaatgttaattttactaagaataaaacatccaaattttaagtattatgaa

SEQ ID NO: 10216 - DNA, 1283 bp, Homo sapiens
aatggctgtgttgctaccctccggacaagtggaacagaaccaaagataaagtattatgcagagatgtgtgcgtcacctgaccagagtgacactgctttactggaggaagaactgaagaaactcattgatgctctgatagagaattttcttcagcctagtaagaatggactgatctggcgttctgtttaggggtacaccaatacgtcatgacactgtgtgggcatatggaacagagcaaccgagaactgcatacattgaaccttgtgttagcattctctctctatctcatctggccgagtatctttttccttttattttctttctttttggtcaactggctagactaaacaaagtataagtttgaaatgaaatggtctagagggaaatgattcaaattttttcataattcaaacaaaagttattacactaaaagtattatagtaacgtattgtccttccgttaacagaaacatcacaattcaaaagtgagttttcttattatagtgtgattaagcctagttctgtatctcgtaattgtgtatagcatggtaaaagaaaaaaaaaaagacaggtaaatgttatataattgtagggttagttaaggaaattagtccataaaattggcaagaaaatggtactttccttgattgttatgaaaaagtgtcattgtgacatcacaggtattaatttacaaattagagtatttgaaataggatatttagcatttctgtagtttagaacagatgttacagtgtgtggttttggcatgtctgtttcaggtgcccttggtgcagtataaatttactgtatgtatttaaaattctgatgtttactgaacataaaacaatagtggcaacactcctattggctttgttcttatcaaatttctcagtgccttctcagggtctggtatgaacagaaaaaacagtgttcctgcatttaccataatttaatcagtcaatttgcagatagctaaggaaaatcttccaaaatctgtaggtgcttcctctatatcaagtgagtttgctgattttaaaatcttaggaatataaataaagatcttaataaaagcaagcttaatgtagttaaggatcttcatattagaattgtgtcatttatcaaaccttttattacagaaaaaaatctgaactgagaaaggagctctgaatttatttgacagtctaacttttgaattacatttttgtaagtagatttattcttttattttatgaagtaatgttaattttactaagaataaaacatccaaattttaagtattatgaa

SEQ ID NO: 10217 - DNA, 682 bp, Homo sapiens
  misc_feature (604)..(604): n is a, c, g, or t
aatggctgtgttgctaccctccggacaagtggaacagaaccaaagataaagtattatgcagagatgtgtgcgtcacctgaccagagtgacactgctttactggaggaagaactgaagaaactcattgatgctctgatagagaattttcttcagcctagtaagaatggactgatctggcgttctgtttaggggtacaccaatacgtcatgacactgtgtgggcatatggaacagagcaaccgagaactgcatacattgaaccttgtgttagcattctctctctatctcatctggccgagtatctttttccttttattttctttctttttggtcaactggctagactaaacaaagtataagtttgaaatgaaatggtctagagggaaatgattcaaattttttcataattcaaacaaaagttattacactaaaagtattatagtaacgtattgtccttccgttaacagaaacatcacaattcaaaagtgagttttcttattatagtgtgattaagcctagttctgtatctcgtaattgtgaaaaaatttgaatcatttccctctagaccatttcatttcaaacttatactttgtttagtctagccngttgaccaaaaagaaagaaaataaaaggaaaaagatactcggccagatgtcgacgcggccgcgaatttagtagtagta

SEQ ID NO: 10218 - DNA, 465 bp, Homo sapiens
tactactaaaatcgcggccgcgtcgacagtttatatcagatgttatgttaaagtgttgcaaagaccactgaagaaggtgaatggggactctggtctcctacctaccactggttcttcatctagaacatctctaattgtatctgttttgtataatctttcatttgaacaaagggttctaaggttaaaaacagaagattacggctgggcgcagtggctcatgcctacagaccgaggcgggtggatcatgatgaggtcaggagttcgagaccagcctggccagcatggtgaagccccatctctcctaggaatacaaaaattggctgagcgtggtggcaggtgcctgtagtcccagctactcaggaggctggggcggagaattgcttgaacccgggaggtggagattgcattgagccgagatcacgccactgcactccagcctgggtgacagagcaagactcagtctca

SEQ ID NO: 10219 - DNA, 738 bp, Homo sapiens
aagaatgatgagaaggattccatcagtatttgtttttatattactactggtattttaatccctttgtcctactttcagatactttatcaccaaaacacaacatatatacatcactctctcatgccaaatttaaggctttgaaggagtaaaaagttactgtttaccacagggatttggaaatgaatgagtttctggtggctgctctaataaactgctacaagcttagtggttttaaataatacagatttattattttacggttctggatgtcaggagtccaaaatgagtcttaaaggactaagatcaaaatgtctacagggctggttcctgtggaagctccagggcagaatctgttgcttgtttctttcacttccagaggctgccagcattccttggcttctggctgcgtcactatgatctctgtttccatgatcacattaccttcccctctaatgtacttaaatctccttcagtttccatctttttttttagacggagtttcactcttgctgcccaggctagagtgcaatggcacgatctcagctcactgcactttctgcctcccgggttcaagtgattcttctgcctcagcactttgggaggctgaggtaggaggatcacttgagctcaggagttcgagaccagcctgggcaacatagtgagacctggtctctattaaataaataagtacatgaccaaataacatagcaagacctcgtctctattaaataaatacat

SEQ ID NO: 10220 - DNA, 704 bp, Homo sapiens
aagaatgatgagaaggattccatcagtatttgtttttatattactactggtattttaatccctttgtcctactttcagatactttatcaccaaaacacaacatatatacatcactctctcatgccaaatttaaggctttgaaggagtaaaaagttactgtttaccacagggatttggaaatgaatgagtttctggtggctgctctaataaactgctacaagcttagtggttttaaataatacagatttattattttacggttctggatgtcaggagtccaaaatgagtcttaaaggactaagatcaaaatgtctacagggctggttcctgtggaagctccagggcagaatctgttgcttgtttctttcacttccagaggctgccagcattccttggcttctggctgcgtcactatgatctctgtttccatgatcacattaccttcccctctaatgtacttaaatctccttcagtttccatctttttttttagacggagtttcactcttgctgcccaggctagagtgcaatggcacgatctcagctcactgcactttctgcctcccgggttcaagtgattcttctgcctcagctactcaggaggctggggcggagaattgcttgaacccgggaggtggagattgcattgagccgagatcacgccactgcactccagcctgggtgacagagcaagactcagtctca

SEQ ID NO: 10221 - DNA, 312 bp, Homo sapiens
gggtctgtgaacttgtttgggggaaaaatattatatcttttcattaacctataactaaaacttggaatttcattcaaatatgagtgtaggcaacaaaccatagttgtattagcagtacctgtgactttgtcaccagtagaaatcatgtacttcataccataatgcagctgttatagctatcttgaaattgtttaagcttatcactacctcaaaattagtgtgattattagacccactgctggatcttattttattttttaaaagcacattgttaattgcaattaaagtattttgacagttctatctttgcat

SEQ ID NO: 10222 - DNA, 348 bp, Homo sapiens
cacattctcctggctcttctcctttccagtcaccttttctgctcctcttccttttctggataaatccaggtgttctctaggactcttctctcagtgcttctttggtcttgctgctctaccctcttgacctgggctttctaaggtacccatggcctcaaccaccaccacagtctaacaagtccaaatctcctgtattattatttcagagtagcagcatcatagcatcactgtctacatggtctgatccatcctcctcctttatcccctgtgtccaattagtgaccaaatccctaattaagtcttgccccctgtcttagtctgttttatgataccataactgaataccac

SEQ ID NO: 10223 - DNA, 573 bp, Homo sapiens
aaatcttcattctcagcatcttggctatttcatttgactagggcattaccaaaaacaacagtaatctgctggcaacatctcagctacctaagcatgtgattaaaggtggaggaaacaagatcctgatcaaaatataagaggaattcttagaaaactggaaaacatacgcagctttgaaaagctacaacatatttttggggatctagaagactttgcaaattcctagaaaggaaaacacctcattcaaataatcagctcccttctgcttcaccatgaagccctgcgtaagcaggaaatgaaaactaaggctgtcattttctgaactttgaaggcatgccttcacacacaaatcactttgacaaagggtgggagatgtacaggcaagagatttagggaaatcttacaacaaatcactggctgaccactaaataatactgacccaggtatgccaagtaggaagccagatgtagaataaaaactttaaaaataaaaattaaaaagaccctggggcaactgctgcagggaatacagaatccacagaattcactacatgaaaaaaaaaaaaaagtcact

SEQ ID NO: 10224 - DNA, 500 bp, Homo sapiens
caaccccagacatgccatctcctgtgctcggcctgtgcccactctcatcgatgcacactgctgccatattgtttgttagatgtcgtgaacactagccctgctcacaggtaaaacttggaaggggactcaccatatgagcttctttgtctagtgtcactcccacagggtgcctttaggcctttatgtccaggagcacataactgtctctcactgatttttcctctgcttgaaaggtacccaggaaatgaagtttatgaactgggcgtcctgttttctttccatccatatgtccctgggaaagttattaaactctctgagacttagtttcctccactcacaaggatggtaatttctgcctcactgagatcttatgatgaataaatgaaattgtaagtagaaggtgccaggcacagtacttgacacataacaggccctcagtgcaactaaggcccactgttgtgaaccagtgttttcttaaatgtctaaaagagttacatact

SEQ ID NO: 10225 - DNA, 370 bp, Homo sapiens
ttctaaatccaatccaatcctatgcccctcctgcctgcaattactggggctctcctccccaccaccaccttcccatttggtgaaagggtgtggcctttggtctctggtggctcccatggttactgatgcacttcctgttagggagcaatggttggtgcaatgccatctgtcaaacactgctcttgtgatgggccacacagatgtccctcaaggtgtttctctcaccaactgcaggcttagccacacgctgctgctttcaaggccacagggcttaatgatcagtcaccagagatagctgcatgcaagttctctgccagccccaggtggaaggttttctaagaaaggtggagtggctgtatttttatattca

SEQ ID NO: 10226 - DNA, 5885 bp, Homo sapiens
ctctgcctttcctctcgcagccacccttcctctcagaccagtacggtggccgacgggagtcagacgctggggatgaatgaaggatcaacaaacagtaataatgactgaatgtacaagtcttcagtttgtcagcccttttgcttttgaggcaatgcagaaggtggatgttgtttgcctggcatctttaagtgatccagaattaagacttcttctgccctgtttggtacggatggcactttgtgcacctgctgaccagagccaaagctgggctcaggataagaaactcatccttcgccttctttctggagtggaagctgtcaactccattgttgcattgttgtccgtggactttcatgctttagaacaagatgccagcaaagaacagcagcttaggcataaacttggaggaggcagtggagagagcatcctggtatcacagcttcagcatggactgacgttagagtttgaacacagtgattcacctcgtcgattgcgtcttgtgcttagtgaactgttggcaattatgaacaaggtgtctgagtccaacggagaattttttttcaagtcttctgaactttttgagagtccagtatatttggaggaagctgcagatgtactttgtattttacaagcagagctcccttccttgctccctatagttgatgtagctgaagctttgctacatgttagaaatggtgcctggttcttgtgtctcttggtggccaatgttcctgatagttttaatgaagtttgtaggggcctgataaaaaatggagaacgacaagatgaagaaagtcttggaggaaggcgcaggacagatgccttacgcttcttgtgtaaaatgaatccttctcaggccctcaaggtccgaggcatggtggtggaagaatgtcacttgccaggccttggtgtggctttgacattggatcatactaaaaatgaagcttgtgaggatggagtgagtgacttggtttgttttgtaagtggtttgcttcttggaacaaatgcgaaagtccggacttggtttggaacttttatccgaaatggacagcagagaaaaagagagaccagcagttctgtcctttggcagatgagaaggcagcttcttctggagttgatgggcattcttcccacagtaagaagcacccgaattgtggaagaagctgatgtggatatggagcccaatgtgtctgtgtattcggggctgaaagaagagcatgttgtgaaagccagtgcactcttacgtctgtactgtgctttgatggggatcgctggactcaaaccaactgaagaagaagctgagcaattactgcagttgatgacgagccgtcctcctgctacgccagctggggttcgctttgtttcactttccttttgtatgctactggccttttctacacttgtcagtacacctgaacaggagcagctgatggtggtgtggctaagttggatgataaaagaagaagcgtattttgagagtacttcaggcgtctctgcttcttttggggagatgttattattggtggctatgtactttcacagcaaccagcttagtgctatcattgacttggtctgttccactttggggatgaagattgtaattaagccaagctccttgagcaggatgaagacaatcttcacacaggaaatttttactgagcaggttgtcacagctcatgcagttcgggtccctgtcaccagcaacctgagtgccaacattactggatttttgcctattcattgtatttaccagcttctcaggagccgttcctttaccaagcacaaagtgtcaataaaagattggatttatagacagctgtgtgaaacctctactccacttcatcctcaattacttcctttgattgatgtgtacataaattctatacttactcctgcgtcgaaatctaatccagaagccacaaatcagccagtcacagaacaggagatactcaatattttccaaggagtcattgggggtgacaacatccgccttaatcagcgtttcagtatcacagcacagcttttggtgctctactatatactgtcttatgaagaggctcttctagcaaacacgaagactttagctgccatgcaaagaaagcccaaatcatattcttcttctttaatggatcagattcctatcaaattccttattcgacaggctcaagggctgcagcaggagttgggagggttgcattcagctttactacgtctccttgctactaactacccacatttatgtattgtggatgactggatttgtgaagaagaaatcacagggactgatgccctgctacggcgaatgctcctgactaataatgctaaaaatcattctcccaaacaactccaagaagcattttcagctgtcccagtaaatcacacacaagtgatgcagattatagaacacttgactctactctctgccagtgaacttataccatatgcggaagtgttaacatccaatatgagccagctattgaattcaggggttccacggagaattctgcaaacagtcaataaactatggatggttcttaatactgtgatgcctagaaggctatgggtaatgacggttaatgcacttcagccttcaataaagtttgtacgacaacaaaagtatactcagaatgacctgatgatagatcctctcattgtcctaaggtgtgatcagagggttcacagatgccccccactgatggatattaccctacacatgttgaatggatatcttcttgcatctaaagcctaccttagtgctcatctgaaggaaacagagcaagataggccttcccagaataatacaattggtttagttggacaaactgatgctccggaagttaccagggaagaattgaaaaatgcattactggccgctcaggatagtgcagctgtccagattctcttagagatttgcctacctactgaagaggagaaagcaaatggtgtcaatccagatagcttgttaagaaatgttcaaagtgttattaccaccagcgctccaaataagggaatggaggaaggagaagacaatttgctctgtaaccttcgagaagttcagtgccttatctgttgtctcttgcaccaaatgtacattgcagatcccaacattgctaagcttgttcactttcagggttatccatgtgaacttttgcctctgacggtcgcaggtattccatctatgcacatctgtctagatttcatacctgagcttattgcacagccagaacttgagaaacagatatttgctatccagttgctttctcacttgtgtatacaatatgcattaccaaagtcacttagtgtggctcgtttagctgtcaatgtcatgggaactttgttaacagttttaacacaggctaagcggtatgctttttttatgccaactctgccaagtttggtctctttttgtcgagcatttcctccattgtatgaggatattatgtctttgctgatccaaatagggcaagtttgtgcctctgatgttgccactcagacaagagacattgatccaattattacacgtcttcaacaaataaaggagaaaccaagtggatggtctcaaatctgtaaagattcatcttataaaaatggatccagggacactggaagcatggatcctgatgtacagctctgtcactgtattgaaagaacagtaattgaaataataaatatgagtgttagtggaatttaaaacaaaatttaaaacaacaaaaagttgtttgctgcatatacccaacatgaatctgcatattagtaacaactctaaactgaatgggaacagtaaagtattgtcttggaatcactaaaacaattcaattcaacatgagtatagtttagaactttatgagaattatgcttgcttgtttctgattggcacatctttggatctactttgctgatatgtttctattgtagcagctgagctttttttttttccactgggaacacatgtaagaaactcattattggaaagggaatttggccttgtatttagcttttgaagtgaagactgccatgcctttaatttcttataaaaatgagtctgtgggtagccctagtgtttattttaactgtgagcttgtaacagaatgtgacaaagatgcaaagatgggagaggaaaaaagggtaaagggaaaggagaattaaggaaataataggagttaaaaacacaagtagaaatctcaaagatttgcagtgcaagtaatagtaatgcaagttggaattctagttctcaagaaagagtattgagaagacttttaaaaaggcaagtagcttttgtaaatgatttctgtggaaatacagatgaggatttaaagatttcacatatttgcttcaatttttattaatatatgaagccatatgtttaaagagatacttgaataatttggaattttaagatactggtgtaaaagtgtttacagaaacatctttgttcaaagaagaacctgagagatctcatttagttttatgttttaaatttatttttataatgctttattaacttacctaatgctcagaggggggaaatatgtatcaaattaaatgaaggtagagcaataaaacccactggattaaagagctcttggtttgtcatcaggattataattcatatcttactttgagaagatctttgagtaagaaaatgcagtgtttgaacctgaggaaaagttaaagtgtagaaaatattgtcttgccgaaggattttgcagtcctctgtcagtaacttccattgattaggcagacatattcaggtaaaccctaatcattaaaaaaaaattatcaatgtagaaagtaattcccttttttctctctgagatatacctcaatcacacacttccccacccccacttgaaacagacctcttcacttgtgttttttttttttttttcctgaggtggagtcttcccctgttgcccaggctggagtgcagtgggatgatcttggctcactgcaacttctgccacctgggttcaagggattctcgtgcctcaacctcctgagtagctgggactgcaggcacgcgccacctgtatttttgtatttttagtagagacgggggtttgccatgttgcccagactggttttgaactcctggcctcaggtgatctgcccaccttggcctcccaaagtgctgggattacaggtgtgagccaccgcacctggccagaccgcttcacttgtaaaagaaattaggctaataagaaggtgtagtttttgagaaatgaaatttaactttagccttttcactagtaaatagtcacatctcattttcttcctttgtaaaatggggttactactggccctacctcatattctatgagaatgagtttgtagctgtttcaaatcatgaagtgcatagtatcacatgtgatagaatatttataactttttattagatgcttaatgttcaattaagtaattttgatgtgaaaaataaaagtaataaaagtatcttaaaaatagcataagaattttcatatttttaaacaaggcagttttgtagtcccttaagattaaatacaactgctccttttttttttaaactgaggccttgcgatattttgtgtgaatagatatgccctaggagttcagaaaaagttaaaagtatgttttctaattaaatgcagtgcacattcctggatcaatattcaaagactggtcataacctgctgtgttaaaataatcacatatgctctttttcatcagatttgttgatgatgtaaataaaatgtgtaaatatattagtaaatgttaatattcatgtattttaagttaaggttataaaatttgtcacaatgtgtttttttattcaagtgaaaacagatgtgtgcagctattttgaatattggtttataaacattcatattctttatcaaacgaaaaaa

SEQ ID NO: 10227 - DNA, 5959 bp, Homo sapiens
ctgctagtcggtcggccttgagaggggactgctttggctgccagctcactgcctttttgtttactttttgtgccttggatgattcctggagacagagaagtgcgctaatgagacgcgtctttctcacatagcacccacacatctgctttttacccggatcaacaaacagtaataatgactgaatgtacaagtcttcagtttgtcagcccttttgcttttgaggcaatgcagaaggtggatgttgtttgcctggcatctttaagtgatccagaattaagacttcttctgccctgtttggtacggatggcactttgtgcacctgctgaccagagccaaagctgggctcaggataagaaactcatccttcgccttctttctggagtggaagctgtcaactccattgttgcattgttgtccgtggactttcatgctttagaacaagatgccagcaaagaacagcagcttaggcataaacttggaggaggcagtggagagagcatcctggtatcacagcttcagcatggactgacgttagagtttgaacacagtgattcacctcgtcgattgcgtcttgtgcttagtgaactgttggcaattatgaacaaggtgtctgagtccaacggagaattttttttcaagtcttctgaactttttgagagtccagtatatttggaggaagctgcagatgtactttgtattttacaagcagagctcccttccttgctccctatagttgatgtagctgaagctttgctacatgttagaaatggtgcctggttcttgtgtctcttggtggccaatgttcctgatagttttaatgaagtttgtaggggcctgataaaaaatggagaacgacaagatgaagaaagtcttggaggaaggcgcaggacagatgccttacgcttcttgtgtaaaatgaatccttctcaggccctcaaggtccgaggcatggtggtggaagaatgtcacttgccaggccttggtgtggctttgacattggatcatactaaaaatgaagcttgtgaggatggagtgagtgacttggtttgttttgtaagtggtttgcttcttggaacaaatgcgaaagtccggacttggtttggaacttttatccgaaatggacagcagagaaaaagagagaccagcagttctgtcctttggcagatgagaaggcagcttcttctggagttgatgggcattcttcccacagtaagaagcacccgaattgtggaagaagctgatgtggatatggagcccaatgtgtctgtgtattcggggctgaaagaagagcatgttgtgaaagccagtgcactcttacgtctgtactgtgctttgatggggatcgctggactcaaaccaactgaagaagaagctgagcaattactgcagttgatgacgagccgtcctcctgctacgccagctggggttcgctttgtttcactttccttttgtatgctactggccttttctacacttgtcagtacacctgaacaggagcagctgatggtggtgtggctaagttggatgataaaagaagaagcgtattttgagagtacttcaggcgtctctgcttcttttggggagatgttattattggtggctatgtactttcacagcaaccagcttagtgctatcattgacttggtctgttccactttggggatgaagattgtaattaagccaagctccttgagcaggatgaagacaatcttcacacaggaaatttttactgagcaggttgtcacagctcatgcagttcgggtccctgtcaccagcaacctgagtgccaacattactggatttttgcctattcattgtatttaccagcttctcaggagccgttcctttaccaagcacaaagtgtcaataaaagattggatttatagacagctgtgtgaaacctctactccacttcatcctcaattacttcctttgattgatgtgtacataaattctatacttactcctgcgtcgaaatctaatccagaagccacaaatcagccagtcacagaacaggagatactcaatattttccaaggagtcattgggggtgacaacatccgccttaatcagcgtttcagtatcacagcacagcttttggtgctctactatatactgtcttatgaagaggctcttctagcaaacacgaagactttagctgccatgcaaagaaagcccaaatcatattcttcttctttaatggatcagattcctatcaaattccttattcgacaggctcaagggctgcagcaggagttgggagggttgcattcagctttactacgtctccttgctactaactacccacatttatgtattgtggatgactggatttgtgaagaagaaatcacagggactgatgccctgctacggcgaatgctcctgactaataatgctaaaaatcattctcccaaacaactccaagaagcattttcagctgtcccagtaaatcacacacaagtgatgcagattatagaacacttgactctactctctgccagtgaacttataccatatgcggaagtgttaacatccaatatgagccagctattgaattcaggggttccacggagaattctgcaaacagtcaataaactatggatggttcttaatactgtgatgcctagaaggctatgggtaatgacggttaatgcacttcagccttcaataaagtttgtacgacaacaaaagtatactcagaatgacctgatgatagatcctctcattgtcctaaggtgtgatcagagggttcacagatgccccccactgatggatattaccctacacatgttgaatggatatcttcttgcatctaaagcctaccttagtgctcatctgaaggaaacagagcaagataggccttcccagaataatacaattggtttagttggacaaactgatgctccggaagttaccagggaagaattgaaaaatgcattactggccgctcaggatagtgcagctgtccagattctcttagagatttgcctacctactgaagaggagaaagcaaatggtgtcaatccagatagcttgttaagaaatgttcaaagtgttattaccaccagcgctccaaataagggaatggaggaaggagaagacaatttgctctgtaaccttcgagaagttcagtgccttatctgttgtctcttgcaccaaatgtacattgcagatcccaacattgctaagcttgttcactttcagggttatccatgtgaacttttgcctctgacggtcgcaggtattccatctatgcacatctgtctagatttcatacctgagcttattgcacagccagaacttgagaaacagatatttgctatccagttgctttctcacttgtgtatacaatatgcattaccaaagtcacttagtgtggctcgtttagctgtcaatgtcatgggaactttgttaacagttttaacacaggctaagcggtatgctttttttatgccaactctgccaagtttggtctctttttgtcgagcatttcctccattgtatgaggatattatgtctttgctgatccaaatagggcaagtttgtgcctctgatgttgccactcagacaagagacattgatccaattattacacgtcttcaacaaataaaggagaaaccaagtggatggtctcaaatctgtaaagattcatcttataaaaatggatccagggacactggaagcatggatcctgatgtacagctctgtcactgtattgaaagaacagtaattgaaataataaatatgagtgttagtggaatttaaaacaaaatttaaaacaacaaaaagttgtttgctgcatatacccaacatgaatctgcatattagtaacaactctaaactgaatgggaacagtaaagtattgtcttggaatcactaaaacaattcaattcaacatgagtatagtttagaactttatgagaattatgcttgcttgtttctgattggcacatctttggatctactttgctgatatgtttctattgtagcagctgagctttttttttttccactgggaacacatgtaagaaactcattattggaaagggaatttggccttgtatttagcttttgaagtgaagactgccatgcctttaatttcttataaaaatgagtctgtgggtagccctagtgtttattttaactgtgagcttgtaacagaatgtgacaaagatgcaaagatgggagaggaaaaaagggtaaagggaaaggagaattaaggaaataataggagttaaaaacacaagtagaaatctcaaagatttgcagtgcaagtaatagtaatgcaagttggaattctagttctcaagaaagagtattgagaagacttttaaaaaggcaagtagcttttgtaaatgatttctgtggaaatacagatgaggatttaaagatttcacatatttgcttcaatttttattaatatatgaagccatatgtttaaagagatacttgaataatttggaattttaagatactggtgtaaaagtgtttacagaaacatctttgttcaaagaagaacctgagagatctcatttagttttatgttttaaatttatttttataatgctttattaacttacctaatgctcagaggggggaaatatgtatcaaattaaatgaaggtagagcaataaaacccactggattaaagagctcttggtttgtcatcaggattataattcatatcttactttgagaagatctttgagtaagaaaatgcagtgtttgaacctgaggaaaagttaaagtgtagaaaatattgtcttgccgaaggattttgcagtcctctgtcagtaacttccattgattaggcagacatattcaggtaaaccctaatcattaaaaaaaaattatcaatgtagaaagtaattcccttttttctctctgagatatacctcaatcacacacttccccacccccacttgaaacagacctcttcacttgtgttttttttttttttttcctgaggtggagtcttcccctgttgcccaggctggagtgcagtgggatgatcttggctcactgcaacttctgccacctgggttcaagggattctcgtgcctcaacctcctgagtagctgggactgcaggcacgcgccacctgtatttttgtatttttagtagagacgggggtttgccatgttgcccagactggttttgaactcctggcctcaggtgatctgcccaccttggcctcccaaagtgctgggattacaggtgtgagccaccgcacctggccagaccgcttcacttgtaaaagaaattaggctaataagaaggtgtagtttttgagaaatgaaatttaactttagccttttcactagtaaatagtcacatctcattttcttcctttgtaaaatggggttactactggccctacctcatattctatgagaatgagtttgtagctgtttcaaatcatgaagtgcatagtatcacatgtgatagaatatttataactttttattagatgcttaatgttcaattaagtaattttgatgtgaaaaataaaagtaataaaagtatcttaaaaatagcataagaattttcatatttttaaacaaggcagttttgtagtcccttaagattaaatacaactgctccttttttttttaaactgaggccttgcgatattttgtgtgaatagatatgccctaggagttcagaaaaagttaaaagtatgttttctaattaaatgcagtgcacattcctggatcaatattcaaagactggtcataacctgctgtgttaaaataatcacatatgctctttttcatcagatttgttgatgatgtaaataaaatgtgtaaatatattagtaaatgttaatattcatgtattttaagttaaggttataaaatttgtcacaatgtgtttttttattcaagtgaaaacagatgtgtgcagctattttgaatattggtttataaacattcatattctttatcaaacgaaaaaa

SEQ ID NO: 10228 - DNA, 506 bp, Homo sapiens
aagatgcattggaatcatgaagctctaggccgtatgttcatgatcacatttgatcttgtcattaggttttggaaaatcttgactcacttgttggttcttttagtgtagggcacttttgcacatggcttctctcaacctgttatgaattttcttctgtctagttttaaatttcaggacattttccagatcttgctccaggtatgttcttgttcttcctgtgtagccacttgttttcgtaatgattcttcatcttttatatgctatattcgcaggttaattgcattaaaagtaatttgactttgtttttgtttccatttgggttgaaggttaagatttctgttgtttctggacattttatttattttacactttttatctttgatagctgccatgcaaagaaagcccaaatcatattcttcttctttaatggatcagattcctatcaaattccttattcgacaggctcaagggctgcagcaggagttgggaggtatgttttattttgc

SEQ ID NO: 10229 - DNA, 6166 bp, Homo sapiens
ctctgcctttcctctcgcagccacccttcctctcagaccagtacggtggccgacgggagtcagacgctggggatgaatgaaggtgctgggtgcaggttgaaaaagtctcccgcttttccgttcctacagtcccggttctgcctttgtgtggtgcccccatccttcccactttgtatcgacaacccggttggtcccggcgtctgagttcttggtgtccgagtcgactcgaggcacaactagggtttggggttccggatatcgcctaggcccaacatcggaccgcgctctcgatttctgccgcgtcccgcctctaggacgcggagtccgtgtgcggttccgtgaggctggagggtagatcttaaggatcaacaaacagtaataatgactgaatgtacaagtcttcagtttgtcagcccttttgcttttgaggcaatgcagaaggtggatgttgtttgcctggcatctttaagtgatccagaattaagacttcttctgccctgtttggtacggatggcactttgtgcacctgctgaccagagccaaagctgggctcaggataagaaactcatccttcgccttctttctggagtggaagctgtcaactccattgttgcattgttgtccgtggactttcatgctttagaacaagatgccagcaaagaacagcagcttaggcataaacttggaggaggcagtggagagagcatcctggtatcacagcttcagcatggactgacgttagagtttgaacacagtgattcacctcgtcgattgcgtcttgtgcttagtgaactgttggcaattatgaacaaggtgtctgagtccaacggagaattttttttcaagtcttctgaactttttgagagtccagtatatttggaggaagctgcagatgtactttgtattttacaagcagagctcccttccttgctccctatagttgatgtagctgaagctttgctacatgttagaaatggtgcctggttcttgtgtctcttggtggccaatgttcctgatagttttaatgaagtttgtaggggcctgataaaaaatggagaacgacaagatgaagaaagtcttggaggaaggcgcaggacagatgccttacgcttcttgtgtaaaatgaatccttctcaggccctcaaggtccgaggcatggtggtggaagaatgtcacttgccaggccttggtgtggctttgacattggatcatactaaaaatgaagcttgtgaggatggagtgagtgacttggtttgttttgtaagtggtttgcttcttggaacaaatgcgaaagtccggacttggtttggaacttttatccgaaatggacagcagagaaaaagagagaccagcagttctgtcctttggcagatgagaaggcagcttcttctggagttgatgggcattcttcccacagtaagaagcacccgaattgtggaagaagctgatgtggatatggagcccaatgtgtctgtgtattcggggctgaaagaagagcatgttgtgaaagccagtgcactcttacgtctgtactgtgctttgatggggatcgctggactcaaaccaactgaagaagaagctgagcaattactgcagttgatgacgagccgtcctcctgctacgccagctggggttcgctttgtttcactttccttttgtatgctactggccttttctacacttgtcagtacacctgaacaggagcagctgatggtggtgtggctaagttggatgataaaagaagaagcgtattttgagagtacttcaggcgtctctgcttcttttggggagatgttattattggtggctatgtactttcacagcaaccagcttagtgctatcattgacttggtctgttccactttggggatgaagattgtaattaagccaagctccttgagcaggatgaagacaatcttcacacaggaaatttttactgagcaggttgtcacagctcatgcagttcgggtccctgtcaccagcaacctgagtgccaacattactggatttttgcctattcattgtatttaccagcttctcaggagccgttcctttaccaagcacaaagtgtcaataaaagattggatttatagacagctgtgtgaaacctctactccacttcatcctcaattacttcctttgattgatgtgtacataaattctatacttactcctgcgtcgaaatctaatccagaagccacaaatcagccagtcacagaacaggagatactcaatattttccaaggagtcattgggggtgacaacatccgccttaatcagcgtttcagtatcacagcacagcttttggtgctctactatatactgtcttatgaagaggctcttctagcaaacacgaagactttagctgccatgcaaagaaagcccaaatcatattcttcttctttaatggatcagattcctatcaaattccttattcgacaggctcaagggctgcagcaggagttgggagggttgcattcagctttactacgtctccttgctactaactacccacatttatgtattgtggatgactggatttgtgaagaagaaatcacagggactgatgccctgctacggcgaatgctcctgactaataatgctaaaaatcattctcccaaacaactccaagaagcattttcagctgtcccagtaaatcacacacaagtgatgcagattatagaacacttgactctactctctgccagtgaacttataccatatgcggaagtgttaacatccaatatgagccagctattgaattcaggggttccacggagaattctgcaaacagtcaataaactatggatggttcttaatactgtgatgcctagaaggctatgggtaatgacggttaatgcacttcagccttcaataaagtttgtacgacaacaaaagtatactcagaatgacctgatgatagatcctctcattgtcctaaggtgtgatcagagggttcacagatgccccccactgatggatattaccctacacatgttgaatggatatcttcttgcatctaaagcctaccttagtgctcatctgaaggaaacagagcaagataggccttcccagaataatacaattggtttagttggacaaactgatgctccggaagttaccagggaagaattgaaaaatgcattactggccgctcaggatagtgcagctgtccagattctcttagagatttgcctacctactgaagaggagaaagcaaatggtgtcaatccagatagcttgttaagaaatgttcaaagtgttattaccaccagcgctccaaataagggaatggaggaaggagaagacaatttgctctgtaaccttcgagaagttcagtgccttatctgttgtctcttgcaccaaatgtacattgcagatcccaacattgctaagcttgttcactttcagggttatccatgtgaacttttgcctctgacggtcgcaggtattccatctatgcacatctgtctagatttcatacctgagcttattgcacagccagaacttgagaaacagatatttgctatccagttgctttctcacttgtgtatacaatatgcattaccaaagtcacttagtgtggctcgtttagctgtcaatgtcatgggaactttgttaacagttttaacacaggctaagcggtatgctttttttatgccaactctgccaagtttggtctctttttgtcgagcatttcctccattgtatgaggatattatgtctttgctgatccaaatagggcaagtttgtgcctctgatgttgccactcagacaagagacattgatccaattattacacgtcttcaacaaataaaggagaaaccaagtggatggtctcaaatctgtaaagattcatcttataaaaatggatccagggacactggaagcatggatcctgatgtacagctctgtcactgtattgaaagaacagtaattgaaataataaatatgagtgttagtggaatttaaaacaaaatttaaaacaacaaaaagttgtttgctgcatatacccaacatgaatctgcatattagtaacaactctaaactgaatgggaacagtaaagtattgtcttggaatcactaaaacaattcaattcaacatgagtatagtttagaactttatgagaattatgcttgcttgtttctgattggcacatctttggatctactttgctgatatgtttctattgtagcagctgagctttttttttttccactgggaacacatgtaagaaactcattattggaaagggaatttggccttgtatttagcttttgaagtgaagactgccatgcctttaatttcttataaaaatgagtctgtgggtagccctagtgtttattttaactgtgagcttgtaacagaatgtgacaaagatgcaaagatgggagaggaaaaaagggtaaagggaaaggagaattaaggaaataataggagttaaaaacacaagtagaaatctcaaagatttgcagtgcaagtaatagtaatgcaagttggaattctagttctcaagaaagagtattgagaagacttttaaaaaggcaagtagcttttgtaaatgatttctgtggaaatacagatgaggatttaaagatttcacatatttgcttcaatttttattaatatatgaagccatatgtttaaagagatacttgaataatttggaattttaagatactggtgtaaaagtgtttacagaaacatctttgttcaaagaagaacctgagagatctcatttagttttatgttttaaatttatttttataatgctttattaacttacctaatgctcagaggggggaaatatgtatcaaattaaatgaaggtagagcaataaaacccactggattaaagagctcttggtttgtcatcaggattataattcatatcttactttgagaagatctttgagtaagaaaatgcagtgtttgaacctgaggaaaagttaaagtgtagaaaatattgtcttgccgaaggattttgcagtcctctgtcagtaacttccattgattaggcagacatattcaggtaaaccctaatcattaaaaaaaaattatcaatgtagaaagtaattcccttttttctctctgagatatacctcaatcacacacttccccacccccacttgaaacagacctcttcacttgtgttttttttttttttttcctgaggtggagtcttcccctgttgcccaggctggagtgcagtgggatgatcttggctcactgcaacttctgccacctgggttcaagggattctcgtgcctcaacctcctgagtagctgggactgcaggcacgcgccacctgtatttttgtatttttagtagagacgggggtttgccatgttgcccagactggttttgaactcctggcctcaggtgatctgcccaccttggcctcccaaagtgctgggattacaggtgtgagccaccgcacctggccagaccgcttcacttgtaaaagaaattaggctaataagaaggtgtagtttttgagaaatgaaatttaactttagccttttcactagtaaatagtcacatctcattttcttcctttgtaaaatggggttactactggccctacctcatattctatgagaatgagtttgtagctgtttcaaatcatgaagtgcatagtatcacatgtgatagaatatttataactttttattagatgcttaatgttcaattaagtaattttgatgtgaaaaataaaagtaataaaagtatcttaaaaatagcataagaattttcatatttttaaacaaggcagttttgtagtcccttaagattaaatacaactgctccttttttttttaaactgaggccttgcgatattttgtgtgaatagatatgccctaggagttcagaaaaagttaaaagtatgttttctaattaaatgcagtgcacattcctggatcaatattcaaagactggtcataacctgctgtgttaaaataatcacatatgctctttttcatcagatttgttgatgatgtaaataaaatgtgtaaatatattagtaaatgttaatattcatgtattttaagttaaggttataaaatttgtcacaatgtgtttttttattcaagtgaaaacagatgtgtgcagctattttgaatattggtttataaacattcatattctttatcaaacgaaaaaa

SEQ ID NO: 10230 - DNA, 4193 bp, Homo sapiens
tttttataagatgcattggaatcatgaagctctaggccgtatgttcatgatcacatttgatcttgtcattaggttttggaaaatcttgactcacttgttggttcttttagtgtagggcacttttgcacatggcttctctcaacctgttatgaattttcttctgtctagttttaaatttcaggacattttccagatcttgctccaggtatgttcttgttcttcctgtgtagccacttgttttcgtaatgattcttcatcttttatatgctatattcgcaggttaattgcattaaaagtaatttgactttgtttttgtttccatttgggttgaaggttaagatttctgttgtttctggacattttatttattttacactttttatctttgatagctgccatgcaaagaaagcccaaatcatattcttcttctttaatggatcagattcctatcaaattccttattcgacaggctcaagggctgcagcaggagttgggagggttgcattcagctttactacgtctccttgctactaactacccacatttatgtattgtggatgactggatttgtgaagaagaaatcacagggactgatgccctgctacggcgaatgctcctgactaataatgctaaaaatcattctcccaaacaactccaagaagcattttcagctgtcccagtaaatcacacacaagtgatgcagattatagaacacttgactctactctctgccagtgaacttataccatatgcggaagtgttaacatccaatatgagccagctattgaattcaggggttccacggagaattctgcaaacagtcaataaactatggatggttcttaatactgtgatgcctagaaggctatgggtaatgacggttaatgcacttcagccttcaataaagtttgtacgacaacaaaagtatactcagaatgacctgatgatagatcctctcattgtcctaaggtgtgatcagagggttcacagatgccccccactgatggatattaccctacacatgttgaatggatatcttcttgcatctaaagcctaccttagtgctcatctgaaggaaacagagcaagataggccttcccagaataatacaattggtttagttggacaaactgatgctccggaagttaccagggaagaattgaaaaatgcattactggccgctcaggatagtgcagctgtccagattctcttagagatttgcctacctactgaagaggagaaagcaaatggtgtcaatccagatagcttgttaagaaatgttcaaagtgttattaccaccagcgctccaaataagggaatggaggaaggagaagacaatttgctctgtaaccttcgagaagttcagtgccttatctgttgtctcttgcaccaaatgtacattgcagatcccaacattgctaagcttgttcactttcagggttatccatgtgaacttttgcctctgacggtcgcaggtattccatctatgcacatctgtctagatttcatacctgagcttattgcacagccagaacttgagaaacagatatttgctatccagttgctttctcacttgtgtatacaatatgcattaccaaagtcacttagtgtggctcgtttagctgtcaatgtcatgggaactttgttaacagttttaacacaggctaagcggtatgctttttttatgccaactctgccaagtttggtctctttttgtcgagcatttcctccattgtatgaggatattatgtctttgctgatccaaatagggcaagtttgtgcctctgatgttgccactcagacaagagacattgatccaattattacacgtcttcaacaaataaaggagaaaccaagtggatggtctcaaatctgtaaagattcatcttataaaaatggatccagggacactggaagcatggatcctgatgtacagctctgtcactgtattgaaagaacagtaattgaaataataaatatgagtgttagtggaatttaaaacaaaatttaaaacaacaaaaagttgtttgctgcatatacccaacatgaatctgcatattagtaacaactctaaactgaatgggaacagtaaagtattgtcttggaatcactaaaacaattcaattcaacatgagtatagtttagaactttatgagaattatgcttgcttgtttctgattggcacatctttggatctactttgctgatatgtttctattgtagcagctgagctttttttttttccactgggaacacatgtaagaaactcattattggaaagggaatttggccttgtatttagcttttgaagtgaagactgccatgcctttaatttcttataaaaatgagtctgtgggtagccctagtgtttattttaactgtgagcttgtaacagaatgtgacaaagatgcaaagatgggagaggaaaaaagggtaaagggaaaggagaattaaggaaataataggagttaaaaacacaagtagaaatctcaaagatttgcagtgcaagtaatagtaatgcaagttggaattctagttctcaagaaagagtattgagaagacttttaaaaaggcaagtagcttttgtaaatgatttctgtggaaatacagatgaggatttaaagatttcacatatttgcttcaatttttattaatatatgaagccatatgtttaaagagatacttgaataatttggaattttaagatactggtgtaaaagtgtttacagaaacatctttgttcaaagaagaacctgagagatctcatttagttttatgttttaaatttatttttataatgctttattaacttacctaatgctcagaggggggaaatatgtatcaaattaaatgaaggtagagcaataaaacccactggattaaagagctcttggtttgtcatcaggattataattcatatcttactttgagaagatctttgagtaagaaaatgcagtgtttgaacctgaggaaaagttaaagtgtagaaaatattgtcttgccgaaggattttgcagtcctctgtcagtaacttccattgattaggcagacatattcaggtaaaccctaatcattaaaaaaaaattatcaatgtagaaagtaattcccttttttctctctgagatatacctcaatcacacacttccccacccccacttgaaacagacctcttcacttgtgttttttttttttttttcctgaggtggagtcttcccctgttgcccaggctggagtgcagtgggatgatcttggctcactgcaacttctgccacctgggttcaagggattctcgtgcctcaacctcctgagtagctgggactgcaggcacgcgccacctgtatttttgtatttttagtagagacgggggtttgccatgttgcccagactggttttgaactcctggcctcaggtgatctgcccaccttggcctcccaaagtgctgggattacaggtgtgagccaccgcacctggccagaccgcttcacttgtaaaagaaattaggctaataagaaggtgtagtttttgagaaatgaaatttaactttagccttttcactagtaaatagtcacatctcattttcttcctttgtaaaatggggttactactggccctacctcatattctatgagaatgagtttgtagctgtttcaaatcatgaagtgcatagtatcacatgtgatagaatatttataactttttattagatgcttaatgttcaattaagtaattttgatgtgaaaaataaaagtaataaaagtatcttaaaaatagcataagaattttcatatttttaaacaaggcagttttgtagtcccttaagattaaatacaactgctccttttttttttaaactgaggccttgcgatattttgtgtgaatagatatgccctaggagttcagaaaaagttaaaagtatgttttctaattaaatgcagtgcacattcctggatcaatattcaaagactggtcataacctgctgtgttaaaataatcacatatgctctttttcatcagatttgttgatgatgtaaataaaatgtgtaaatatattagtaaatgttaatattcatgtattttaagttaaggttataaaatttgtcacaatgtgtttttttattcaagtgaaaacagatgtgtgcagctattttgaatattggtttataaacattcatattctttatcaaacgaaaaaa

SEQ ID NO: 10231 - DNA, 903 bp, Homo sapiens
gtaatgatgaaagagtgcaagctctcacttccccttcctgtacagggcaggttgtgcagctggaggcagagcagtcctctctggggagcctgaagcaaacatggatcaagaaactgtaggcaatgttgtcctgttggccatcgtcaccctcatcagcgtggtccagaatggattctttgcccataaagtggagcacgaaagcaggacccagaatgggaggagcttccagaggaccggaacacttgcctttgagcgggtctacactgccaaccagaactgtgtagatgcgtaccccactttcctcgctgtgctctggtctgcggggctactttgcagccaagttcctgctgcgtttgctggactgatgtacttgtttgtgaggcaaaagtactttgtcggttacctaggagagagaacgcagagcacccctggctacatatttgggaaacgcatcatactcttcctgttcctcatgtccgttgctggcatattcaactattacctcatcttctttttcggaagtgactttgaaaactacataaagacgatctccaccaccatctcccctctacttctcattccctaactctctgctgaatatggggttggtgttctcatctaatcaatacctacaagtcatcataattcagctcttgagagcattctgctcttctttagatggctgtaaatctattggccatctgggcttcacagcttgagttaaccttgcttttccgggaacaaaatgatgtcatgtcagctccgccccttgaacatgaccgtggccccaaatttgctattcccatgcattttgtttgtttcttcacttatcctgttctctgaagatgttttgtgaccaggtttgtgttttcttaaaataaaatgcagagacatgttttaagc

SEQ ID NO: 10232 - DNA, 866 bp, Homo sapiens
gtaatgatgaaagagtgcaagctctcacttccccttcctgtacagggcaggttgtgcagctggaggcagagcagtcctctctggggagcctgaagcaaacatggatcaagaaactgtaggcaatgttgtcctgttggccatcgtcaccctcatcagcgtggtccagaatggattctttgcccataaagtggagcacgaaagcaggacccagaatgggaggagcttccagaggaccggaacacttgcctttgagcgggtctacactgccaaccagaactgtgtagatgcgtaccccactttcctcgctgtgctctggtctgcggggctactttgcagccaagttcctgctgcgtttgctggactgatgtacttgtttgtgaggcaaaagtactttgtcggttacctaggagagagaacgcagagcacccctggctacatatttgggaaacgcatcatactcttcctgttcctcatgtccgttgctggcatattcaactattacctcatcttctttttcggaagtgactttgaaaactacataaagacgatctccaccaccatctcccctctacttctcattccctaactctctgctgaatatggggttggtgttctcatctaatcaatacctacaagtcatcataattcagctcttgagagcattctgctcttctttagatggctgtaaatctattggccatctgggcttcacagcttgagttaaccttgcttttccgggaacaaatgatgtatgtcggtcggcccttacatgacggggccaattggatccatgattggtggtctacctaccggctcgaatgtgggccggtggttcctaacaaggggccttatggttaaacaaaaac

SEQ ID NO: 10233 - DNA, 694 bp, Homo sapiens
gtaatgatgaaagagtgcaagctctcacttccccttcctgtacagggcaggttgtgcagctggaggcagagcagtcctctctggggagcctgaagcaaacatggatcaagaaactgtaggcaatgttgtcctgttggccatcgtcaccctcatcagcgtggtccagaatggattctttgcccataaagtggagcacgaaagcaggacccagaatgggaggagcttccagaggaccggaacacttgcctttgagcgggtctacactgccaaccagaactgtgtagatgcgtaccccactttcctcgctgtgctctggtctgcggggctactttgcagccaagttcctgctgcgtttgctggactgatgtacttgtttgtgaggcaaaagtactttgtcggttacctaggagagagaacgcagagcacccctggctacatatttgggaaacgcatcatactcttcctgttcctcatgtccgttgctggcatattcaactattacctcatcttctttttcggaagtgactttgaacctaaccttttttggtgaatattggggtttgggtgttcttcatcttaatcaattcccttacaatgccatccataatttcacgctttcgagaagcctttctggctcttctccaggtcggcttggaaactctattgggccatcttgggcctcaccagattagag

SEQ ID NO: 10234 - DNA, 638 bp, Homo sapiens
ctgtggagctgatgaaatcctgcagggagcttcacggtgacagcaagaggagaaacacatccccatatgccccgcagagtttgaagtcccggctgcacctctccccagcagcaggttgactctggaaagttgcagcgttcttacctacagagtgggaacagtactacccattgcacagagtgggtgcaaagctctgtgacggaatacatggattctttgcccataaagtggagcacgaaagcaggacccagaatgggaggagcttccagaggaccggaacacttgcctttgagcgggtctacactgccaagtgagtcctaaccctgatgttgctaataagtgggggcatgggcaggggggcctccttctaggagtgatgaccacccttaataccacatgtctgtctgagccaagtttctgagcgccagggaggtgaggaaggttggacttcaccagagaggctttgtggacaccctttatcatcttagtgagtgctagtgtcaaaacaaagggagtggggatatggggcacattggtggagggaggtgtgatctctgcagcttcagaaagatctgaaagagtcatttggttagagaagttgacctatttcctgtggggttagaccagggttgctactg

SEQ ID NO: 10235 - DNA, 847 bp, Homo sapiens
gtaatgatgaaagagtgcaagctctcacttccccttcctgtacagggcaggttgtgcagctggaggcagagcagtcctctctggggagcctgaagcaaacatggatcaagaaactgtaggcaatgttgtcctgttggccatcgtcaccctcatcagcgtggtccagaatggattctttgcccataaagtggagcacgaaagcaggacccagaatgggaggagcttccagaggaccggaacacttgcctttgagcgggtctacactgccaaccagaactgtgtagatgcgtaccccactttcctcgctgtgctctggtctgcggggctactttgcagccaagttcctgctgcgtttgctggactgatgtacttgtttgtgaggcaaaagtactttgtcggttacctaggagagagaacgcagagcacccctggctacatatttgggaaacgcatcatactcttcctgttcctcatgtccgttgctggcatattcaactattacctcatcttctttttcggaagtgactttgaaaactacataaagacgatctccaccaccatctcccctctacttctcattccctaactctctgctgaatatggggttggtgttctcatctaatcaatacctacaagtcatcataattcagctcttgagagcattctgctcttctttagatggctgtaaatctattggccatctgggcttcacagcttgagttaaccttgcttttccgggaacattcccatgcattttgtttgtttcttcacttatcctgttctctgaagatgttttgtgaccaggtttgtgttttcttaaaataaaatgcagagacatgttttaagc

SEQ ID NO: 10236 - DNA, 848 bp, Homo sapiens
gtaatgatgaaagagtgcaagctctcacttccccttcctgtacagggcaggttgtgcagctggaggcagagcagtcctctctggggagcctgaagcaaacatggatcaagaaactgtaggcaatgttgtcctgttggccatcgtcaccctcatcagcgtggtccagaatggattctttgcccataaagtggagcacgaaagcaggacccagaatgggaggagcttccagaggaccggaacacttgcctttgagcgggtctacactgccaaccagaactgtgtagatgcgtaccccactttcctcgctgtgctctggtctgcggggctactttgcagccaagttcctgctgcgtttgctggactgatgtacttgtttgtgaggcaaaagtactttgtcggttacctaggagagagaacgcagagcacccctggctacatatttgggaaacgcatcatactcttcctgttcctcatgtccgttgctggcatattcaactattacctcatcttctttttcggaagtgactttgaatctctgctgaatatggggttggtgttctcatctaatcaatacctacaagtcatcataattcagctcttgagagcattctgctcttctttagatggctgtaaatctattggccatctgggcttcacagcttgagttaaccttgcttttccgggaacaaaatgatgtcatgtcagctccgccccttgaacatgaccgtggccccaaatttgctattcccatgcattttgtttgtttcttcacttatcctgttctctgaagatgttttgtgaccaggtttgtgttttcttaaaataaaatgcagagacatgttttaagc

SEQ ID NO: 10237 - DNA, 863 bp, Homo sapiens
gtaatgatgaaagagtgcaagctctcacttccccttcctgtacagggcaggttgtgcagctggaggcagagcagtcctctctggggagcctgaagcaaacatggatcaagaaactgtaggcaatgttgtcctgttggccatcgtcaccctcatcagcgtggtccagaatggattctttgcccataaagtggagcacgaaagcaggacccagaatgggaggagcttccagaggaccggaacacttgcctttgagcgggtctacactgccaaccagaactgtgtagatgcgtaccccactttcctcgctgtgctctggtctgcggggctactttgcagccaagttcctgctgcgtttgctggactgatgtacttgtttgtgaggccacccctggctacatatttgggaaacgcatcatactcttcctgttcctcatgtccgttgctggcatattcaactattacctcatcttctttttcggaagtgactttgaaaactacataaagacgatctccaccaccatctcccctctacttctcattccctaactctctgctgaatatggggttggtgttctcatctaatcaatacctacaagtcatcataattcagctcttgagagcattctgctcttctttagatggctgtaaatctattggccatctgggcttcacagcttgagttaaccttgcttttccgggaacaaaatgatgtcatgtcagctccgccccttgaacatgaccgtggccccaaatttgctattcccatgcattttgtttgtttcttcacttatcctgttctctgaagatgttttgtgaccaggtttgtgttttcttaaaataaaatgcagagacatgttttaagc

SEQ ID NO: 10238 - DNA, 2349 bp, Homo sapiens
agtgggctctgcccgccgtcccccgggggctgcttcccgccccaggcctccgcggaggacacgtgtcagcacgttcccgcggttgtcattccattgtcatagcccttcccctaggccgggaacccctcccccccaccagccccagttcttttatccctgggcccaacctccccgccgacccgcggtccaggcctcggtctctctcttcggcggcgagccgcggcccagaccccggcagaggacacttgtcggcacgttctcacccctgtcatctcagccccctgcctagctccaccccaggcttgggaacccggcccctgacggcccattgtccgcgggcccagcccccgcgctgaacgcacgctcgcccttgcccctaaccagcgcgtctaccccggcaacgcgcagtgacctgggatgcagccctcaggctgggcggccgccagggaggcggcgggccgcgacatgctggccgccgacctccggtgcagcctcttcgcctcggccctgcagagctacaagcgcgactcggtgctgcggcccttccccgcgtcctacgcccgcggcgactgtaaggactttgaagccctgacatccttgttcggagaggggacctacctcaccagtgacttgagcctggccctcatatacagcccccatggccatgggtggcagcacagcctcctcggccccatccttagctgtgtggccgtgtgtgaggtcattgaccatccggacgtcaagtgccaaaccaagaagaaggattccaaggagatagatcgcagacgagcgagaatcaaacatagtgaagggggagacatccctcccaagtacttcgtggtcaccaataaccagctgctgcgagtgaagtacctcctggtgtattcacagaagccacccaagagggcttcgagccagctctcctggttttccagccattggtttaccgtcatgatatccctgtatctgctgctgctgctcatagtgagtgtcatcaactcctctgctttccaacacttttggaatcgtgcgaaaagataatctttctgggcctggtgtgggggctacctcaactatgtgccttatggtaacttgttctgtacctcctatgcctcatgtccagccaggttgagcctaggggccagttgggggaccacaggacaattttcatatggcctaaatgtatccattgcctttgatgatgttcccagccatactccagtcaacggggactactagtccctcactcttaggttttaggggagtccttccatctgctccttcttaaactgtcctagggagttggcttttcagccagggccaaaggaaaaagccctgctgcatttaaaaacaaagtgtccaagctgtcagtggtgtgtttacaatctctcctggcagaggttggccctttctctaatgccttctggaaggcggaaaatgtgggaactataaatcactaggcggttgccttgttttgacttgagacacccaagaggaacagtcatgtttctcataaaaatcagtgggatcatttttgaattccatcagcctttgtatgtgagtgcaaaacattttaacagttttctcaaatcaacaaacagccttctcctatagctgtacttgcccccctccccaaaaaaccatggatgagaaagaaaggagtcaggggcctgataaaaaatacagacttaatgagcaactcaagatgagaaaactgctctttttccaaaaattaccaactgctgattacagctgaaatggaaccaaatgtttgttttctgatttttttttaatagctgtttaacaaattagtctttgctgagtaaaaggggaaatttctaaacctagtgcactgtttggccagtgtccacagcctcttttctggctgtgttttagagaaagggatttgagctataggctcgcctcctgttctcattctcacaaagctgccttgactgtggcctgcaaccacgagtgccatgctttcaggtcttctgtggcctactggccttcaagacagaggcctgccccagtgtgccacagatccatgtggatggagcctccttcagaggggtcacaggtctttgagactcagcctgggctttaatgtgtaggaaaagccttctggccacccagagagccggagccctgcttgctgtattctctgctcccttcttcctgctgggttttagccataatagggcccggtacgatttgggagtgacatttctgtaaagaagaggaaaaatcatttttctataatttgtaaagttgtgaaagagccactaccacagtttttacattgattattggaacatttcagaataaataaagatattttcttaatga

SEQ ID NO: 10239 - DNA, 2694 bp, Homo sapiens
agtgggctctgcccgccgtcccccgggggctgcttcccgccccaggcctccgcggaggacacgtgtcagcacgttcccgcggttgtcattccattgtcatagcccttcccctaggccgggaacccctcccccccaccagccccagttcttttatccctgggcccaacctccccgccgacccgcggtccaggcctcggtctctctcttcggcggcgagccgcggcccagaccccggcagaggacacttgtcggcacgttctcacccctgtcatctcagccccctgcctagctccaccccaggcttgggaacccggcccctgacggcccattgtccgcgggcccagcccccgcgctgaacgcacgctcgcccttgcccctaaccagcgcgtctaccccggcaacgcgcagtgacctgggatgcagccctcaggctgggcggccgccagggaggcggcgggccgcgacatgctggccgccgacctccggtgcagcctcttcgcctcggccctgcagagctacaagcgcgactcggtgctgcggcccttccccgcgtcctacgcccgcggcgactgtaaggactttgaagccctgcttgcagatgccagcaagttacctaacctgaaagaacttctccagtcctccggagacaaccacaaacgggcctgggacctggtgagctggattttatcctcaaaggtcctgacaatccacagtgcagggaaggcagagtttgaaaagatccaaaagctgactggggctcctcacacgcctgttcctgcaccggacttcctgtttgaaattgagtactttgacccagccaacgccaaattttatgagaccaaaggagaacgagacctaatctatgcatttcatggtagccgcctagaaaacttccattccattatccacaatggcctgcactgccatctgaacaagacatccttgttcggagaggggacctacctcaccagtgacttgagcctggccctcatatacagcccccatggccatgggtggcagcacagcctcctcggccccatccttagctgtgtggccgtgtgtgaggtcattgaccatccggacgtcaagtgccaaaccaagaagaaggattccaaggagatagatcgcagacgagcgagaatcaaacatagtgaagggggagacatccctcccaagtacttcgtggtcaccaataaccagctgctgcgagtgaagtacctcctggtgtattcacagaagccacccaagagggcttcgagccagctctcctggttttccagccattggtttaccgtcatgatatccctgtatctgctgctgctgctcatagtgagtgtcatcaactcctctgctttccaacacttttggaatcgtgcgaaaagataatctttctgggcctggtgtgggggctacctcaactatgtgccttatggtaacttgttctgtacctcctatgcctcatgtccagccaggttgagcctaggggccagttgggggaccacaggacaattttcatatggcctaaatgtatccattgcctttgatgatgttcccagccatactccagtcaacggggactactagtccctcactcttaggttttaggggagtccttccatctgctccttcttaaactgtcctagggagttggcttttcagccagggccaaaggaaaaagccctgctgcatttaaaaacaaagtgtccaagctgtcagtggtgtgtttacaatctctcctggcagaggttggccctttctctaatgccttctggaaggcggaaaatgtgggaactataaatcactaggcggttgccttgttttgacttgagacacccaagaggaacagtcatgtttctcataaaaatcagtgggatcatttttgaattccatcagcctttgtatgtgagtgcaaaacattttaacagttttctcaaatcaacaaacagccttctcctatagctgtacttgcccccctccccaaaaaaccatggatgagaaagaaaggagtcaggggcctgataaaaaatacagacttaatgagcaactcaagatgagaaaactgctctttttccaaaaattaccaactgctgattacagctgaaatggaaccaaatgtttgttttctgatttttttttaatagctgtttaacaaattagtctttgctgagtaaaaggggaaatttctaaacctagtgcactgtttggccagtgtccacagcctcttttctggctgtgttttagagaaagggatttgagctataggctcgcctcctgttctcattctcacaaagctgccttgactgtggcctgcaaccacgagtgccatgctttcaggtcttctgtggcctactggccttcaagacagaggcctgccccagtgtgccacagatccatgtggatggagcctccttcagaggggtcacaggtctttgagactcagcctgggctttaatgtgtaggaaaagccttctggccacccagagagccggagccctgcttgctgtattctctgctcccttcttcctgctgggttttagccataatagggcccggtacgatttgggagtgacatttctgtaaagaagaggaaaaatcatttttctataatttgtaaagttgtgaaagagccactaccacagtttttacattgattattggaacatttcagaataaataaagatattttcttaatga

SEQ ID NO: 10240 - DNA, 2737 bp, Homo sapiens
agtgggctctgcccgccgtcccccgggggctgcttcccgccccaggcctccgcggaggacacgtgtcagcacgttcccgcggttgtcattccattgtcatagcccttcccctaggccgggaacccctcccccccaccagccccagttcttttatccctgggcccaacctccccgccgacccgcggtccaggcctcggtctctctcttcggcggcgagccgcggcccagaccccggcagaggacacttgtcggcacgttctcacccctgtcatctcagccccctgcctagctccaccccaggcttgggaacccggcccctgacggcccattgtccgcgggcccagcccccgcgctgaacgcacgctcgcccttgcccctaaccagcgcgtctaccccggcaacgcgcagtgacctgggatgcagccctcaggctgggcggccgccagggaggcggcgggccgcgacatgctggccgccgacctccggtgcagcctcttcgcctcggccctgcagagctacaagcgcgactcggtgctgcggcccttccccgcgtcctacgcccgcggcgactgtaaggactttgaagccctgcttgcagatgccagcaagttacctaacctgaaagaacttctccagtcctccggagacaaccacaaacgggcctgggacctggtgagctggattttatcctcaaaggtcctgacaatccacagtgcagggaaggcagagtttgaaaagatccaaaagctgactggggctcctcacacgcctgttcctgcaccggacttcctgtttgaaattgagtactttgacccagccaacgccaaattttatgagaccaaaggagaacgagacctaatctatgcatttcatggtagccgcctagaaaacttccattccattatccacaatggcctgcactgccatctgaacaagacatccttgttcggagaggggacctacctcaccagtgacttgagcctggccctcatatacagcccccatggccatgggtggcagcacagcctcctcggccccatccttagctgtgtggccgtgtgtgaggtcattgaccatccggacgtcaagtgccaaaccaagaagaaggattccaaggagatagatcgcagacgagcgagaatcaaacatagtgaagggggagacatccctcccaagtacttcgtggtcaccaataaccagctgctgcgagtgaagtacctcctggtgtattcacagaagccacccaagagggcttcgagccagctctcctggttttccagccattggtttaccgtcatgatatccctgtatctgctgctgctgctcatagtgagtgtcatcaactcctctgctttccaacacttttggaatcgtgcgaaaagataatctttctgggcctggtgtgggggctacctcaactatgtgccttatggtaacttgttctgtacctcctatgcctcatgtccagccaggttgagcctaggggccagttgggggaccacaggacaattttcatatggcctaaatgtatccattgcctttgatgatgttcccagccatactccagtcaacggggactactagtccctcactcttaggttttaggggagtccttccatctgctccttcttaaactgtcctagggagttggcttttcagccagggccaaaggaaaaagccctgctgcatttaaaaacaaagtgtccaagctgtcagtggtgtgtttacaatctctcctggcagaggttggccctttctctaatgccttctggaaggcggaaaatgtgggaactataaatcactaggcggttgccttgttttgacttgagacacccaagaggaacagtcatgtttctcataaaaatcagtgggatcatttttgaattccatcagcctttgtatgtgagtgcaaaacattttaacagttttctcaaatcaacaaacagccttctcctatagctgtacttgcccccctccccaaaaaaccatggatgagaaagaaaggagtcaggggcctgataaaaaatacagacttaatgagcaactcaagatgagaaaactgctctttttccaaaaattaccaactgctgattacagctgaaatggaaccaaatgtttgttttctgatttttttttaatagctgtttaacaaattagtctttgctgagtaaaaggggaaatttctaaacctagtgcactgtttggccagtgtccacagcctcttttctggctgtgttttagagaaagggatttgagctataggctcgcctcctgttctcattctcacaaagctgccttgactgtggcctgcaaccacgagtgccatgctttcaggtcttctgtggcctactggccttcaagacagaggcctgccccagtgtgccacagatccatgtggatggagcctccttcagaggggtcacaggtctttgagactcagcctgggctttaatgtgtaggaaaagccttctggccacccagagagccggagccctgcttgctgtattctctgctcccttcttcctgctgggttttagccataatagggcccggtacgatttgggagtgacatttctgtaaagaagaggaaaaatcatttttctataatttgtaaagttgtgaaagagccactaccacagtttttacattgattattggaacatttcagaataaataaagatattttcttaatgaacaacaacacagaaaaacaacaagacagaaaacccattaaaag

SEQ ID NO: 10241 - DNA, 2160 bp, Homo sapiens
agtgggctctgcccgccgtcccccgggggctgcttcccgccccaggcctccgcggaggacacgtgtcagcacgttcccgcggttgtcattccattgtcatagcccttcccctaggccgggaacccctcccccccaccagccccagttcttttatccctgggcccaacctccccgccgacccgcggtccaggcctcggtctctctcttcggcggcgagccgcggcccagaccccggcagaggacacttgtcggcacgttctcacccctgtcatctcagccccctgcctagctccaccccaggcttgggaacccggcccctgacggcccattgtccgcgggcccagcccccgcgctgaacgcacgctcgcccttgcccctaaccagcgcgtctaccccggcaacgcgcagtgacctgggatgcagccctcaggctgggcggccgccagggaggcggcgggccgcgacatgctggccgccgacctccggtgcagcctcttcgcctcggccctgcagagctacaagcgcgactcggtgctgcggcccttccccgcgtcctacgcccgcggcgactgtaaggactttgaagccctgcttgcagatgccagcaagttacctaacctgaaagaacttctccagtcctccggagacaaccacaaacgggcctgggacctggtgagctggattttatcctcaaaggtcctgacaatccacagtgcagggaaggcagagtttgaaaagatccaaaagctgactggggctcctcacacgcctgttcctgcaccggacttcctgtttgaaattgagtactttgacccagccaacgccaaattttatgagaccaaaggagaacgagacctaatctatgcatttcatggtagccgcctagaaaacttccattccattatccacaatggcctgcactgccatctgaacaagacatccttgttcggagaggggacctacctcaccagtgacttgagcctggccctcatatacagcccccatggccatgggtggcagcacagcctcctcggccccatccttagctgtgtggccgtgtgtgaggtcattgaccatccggacgtcaagtgccaaaccaagaagaaggattccaaggagatagatcgcagacgagcgagaatcaaacatagtgaagggggagacatccctcccaagtacttcgtggtcaccaataaccagctgctgcgagtgaagtacctcctggtgtattcacagaagccacccaagagggcttcgagccagctctcctggttttccagccattggtttaccgtcatgatatccctgtatctgctgctgctgctcatagtgagtgtcatcaactcctctgctttccaacacttttggaatcgtgcgaaaagataatctttctgggcctggtgtgggggctacctcaactatgtgccttatggtaacttgttctgtacctcctatgcctcatgtccagccaggttgagcctaggggccagttgggggaccacaggacaattttcatatggcctaaatgtatccattgcctttgatgatgttcccagccatactccagtcaacggggactactagtccctcactcttaggttttaggggagtccttccatctgctccttcttaaactgtcctagggagttggcttttcagccagggccaaaggaaaaagccctgctgcatttaaaaacaaagtgtccaagctgtcagtggtgtgtttacaatctctcctggcagaggttggccctttctctaatgccttctggaaggcggaaaatgtgggaactataaatcactaggcggttgccttgttttgacttgagacacccaagaggaacagtcatgtttctcataaaaatcagtgggatcatttttgaattccatcagcctttgtatgtgagtgcaaaacattttaacagttttctcaaatcaacaaacagccccaggtttcttgagcaaggaagcacgaagcttcatttcatggctcaggcaaaggatgaaattcatcattttgtcttcttagagccagacttgttgtacacacttagaaaaatcatttttctataatttgtaaagttgtgaaagagccactaccacagtttttacattgattattggaacatttcagaataaataaagatattttcttaatga

SEQ ID NO: 10242 - DNA, 1448 bp, Homo sapiens
agtgggctctgcccgccgtcccccgggggctgcttcccgccccaggcctccgcggaggacacgtgtcagcacgttcccgcggttgtcattccattgtcatagcccttcccctaggccgggaacccctcccccccaccagccccagttcttttatccctgggcccaacctccccgccgacccgcggtccaggcctcggtctctctcttcggcggcgagccgcggcccagaccccggcagaggacacttgtcggcacgttctcacccctgtcatctcagccccctgcctagctccaccccaggcttgggaacccggcccctgacggcccattgtccgcgggcccagcccccgcgctgaacgcacgctcgcccttgcccctaaccagcgcgtctaccccggcaacgcgcagtgacctgggatgcagccctcaggctgggcggccgccagggaggcggcgggccgcgacatgctggccgccgacctccggtgcagcctcttcgcctcggccctgcagagctacaagcgcgactcggtgctgcggcccttccccgcgtcctacgcccgcggcgactgtaaggactttgaagccctgcttgcagatgccagcaagttacctaacctgaaagaacttctccagtcctccggagacaaccacaaacgggcctgggacctggtgagctggattttatcctcaaaggtcctgacaatccacagtgcagggaaggcagagtttgaaaagatccaaaagctgactggggctcctcacacgcctgttcctgcaccggacttcctgtttgaaattgagtactttgacccagccaacgccaaattttatgagaccaaaggagaacgagacctaatctatgcatttcatggtagccgcctagaaaacttccattccattatccacaatggcctgcactgccatctgaacaagacatccttgttcggagaggggacctacctcaccagtgacttgagcctggccctcatatacagcccccatggccatgggtggcagcacagcctcctcggccccatccttagctgtgtggccgtgtgtgaggtcattgaccatccggacgtcaagtgccaaaccaagaagaaggattccaaggagatagatcgcagacgagcgagaatcaaacatagtgaagggggagacatccctcccaagtacttcgtggtcaccaataaccagctgctgcgagtgaagtacctcctggtgtattcacagaagccacccaagagggcttcgagccagctctcctggttttccagccattggtttaccgtcatgatatccctgtatctgctgctgctgctcatagacccacctgccatgctgtgaggacacccaggccacatagagagagtgaggccacatgtaggttttacagccagaagccccactgaaaaccaaacctgcaaccagcatcaactgccaaa

SEQ ID NO: 10243 - DNA, 465 bp, Homo sapiens
agcttggatttatatctgcatgtgtctaaaagtgaaaagacttcagctaaattacctgccacctgccaccatctgggcagacaccctgagctaggtcattgttatagataccaagatgggttgtaaatggtaaaagaggagctacaaaagggaagatcaggatgagctcattgcatagctgtctttgcgcatttagaaaatatcctgttgaaaggcgtgtcagtgcctgggcaaacagccccaggtttcttgagcaaggaagcacgaagcttcatttcatggctcaggcaaaggatgaaattcatcattttgtcttcttagagccagacttgttgtacacacttaaaaaaaatgtttttctctttttgccaacaccactcttttttccctcttaagcagggcttcgagccagctctcctggttttccagccattggtttaccgtcatgatatccctgtatctgct

SEQ ID NO: 10244 - DNA, 449 bp, Homo sapiens
cggccgccagggaggcggcgggccgcgacatgctggccgccgacctccggtgcagcctcttcgcctcggccctgcagagctacaagcgcgactcggtgctgcggcccttccccgcgtcctacgcccgcggcgactgtaaggactttgaagccctggtgagtgtgctttgtcctggcgctgcccactgcgtcctggaccaagtgccctgtggaaccacaggtagaggcagttccatccgcattagtaaacatgacagccgccagactttccattcccagcttggtcttgccttgccttggggaaggtttccatgagctaagaacactgctaacaccctcatgtcaacgctcactcccaaggcacttggtggctgcttctctcctgtcaatgacaaatgactccgaggactgaagtgaggaatagttgcatagtcctccacagattttcta

SEQ ID NO: 10245 - DNA, 345 bp, Homo sapiens
ctggccttcaagacagaggcctgccccagtgtgccacagatccatgtggatggagcctccttcagaggggtcacaggtctttgagactcagcctgggctttaatgtgtaggaaaagccttctggccacccagagagccggagccctgcttgctgtattctctgctcccttcttcctgctgggttttagccataatagggcccggtacgatttgggagtgacatttctgtaaagaagaggaaaaatcatttttctataatttgtaaagttgtgaaagagccactaccacagtttttacattgattattggaacatttcagaataaataaagatattttcttaatga

SEQ ID NO: 10246 - DNA, 391 bp, Homo sapiens
agacattagatctagtatttcaatgaagacaaatcttttgattctaacataaaccagatacattgtttttaggtgattccaattttgatgtttccaaaacatgagctaaatcatggcagtcactagtgctatttaccaaatatttctagtttctccatttccagaaacatgtcaagatttgtgcttctctgcccttttaggtgaaaccatgtggcattctgtggccaacagaaggcgatcatcagtaatacgtggagctaccaggtggaagcttcaaagccagtgtacattttgccataacatttatcaaagatgcttaacaagtttcttagctatgacacctaaaacataagcaaccaaattaaaaatacattggacttcataaaaatta

SEQ ID NO: 10247 - DNA, 501 bp, Homo sapiens
aactgtgcctgaacctgaggtgcccaaccccaaataaacccaagatgctgtgtattttcagaggacctggtctggctgtgtgagcctcgggagggactgggggagcaagggggccgtctgggaggcaggctgctgccgccaccccaggaggccccaggcctgtcctgaattgacatcagtgcttccctgaactgcctcccccacccctggcattatcccaggaaacttatgttttctagaagctaagcagctgctgggactcagggactggtgcaggtaggctgagtggcagctcagtcctagaaggtctctgaagatctggactgaggaccctgctactccccaagccagagcccatcagccaggcctgctgtgagccacctgcctgtggagtgctgagctcaaccaaaggctggcaagctctgggcctcatttaagggattctgatgagccgatgggccctggaggcagcccattaaagcatctggctcgtttttggaa

SEQ ID NO: 10248 - DNA, 4481 bp, Homo sapiens
ccgcagacggcgcccagcggcggcgcgaacggcagctaggagggttgctccgggcttggtgctcactgcgacttcccgcgcagggcccggtcggactaggacccgcggcctgagagacgctggaggatgcggacgcggaggccgcctggggtagcggcggcgggagtcctggcgctctgcaggtcagaagttgagtagcaggggcctaggagggctcgaagccttcacagcgatggcagagaagcgacccctgagaaccctggggcctgtgatgtatggcaagctgccccgcttagagacagactccgggctcgagcacagcctgccccactctgttggtaaccaggatccctgcacctacaaggggtcctacttctcctgccccatggcgggtactcctaaggccgagtctgagcagttggcgtcctggaccccatacccacccttgtactctaccggtatggcaggacccccacttcaggcagacaacctgctgaccaactgcctgttctaccgctcgccagcagaaggccctgagaagatgcaggactccagccctgttgagctcctgcccttcagtccccaggctcactcctacccaggcccaccactggcagcacccaaacctgtctaccgcaaccctctgtgctatgggctctcaacttgtctgggggaaggagcagtgaagaggccactggatgttgactggactctggcgactgggcccctgttgccctcagctgacccaccctgctctctggccccagctcctagcaagggccagactctggatggcaccttcttgcggggggtgccagctgaggggtccagtaaagactcctcagggagcttctccccatgccagcccttcctggagaaatatcagaccatccacagcacgggcttcctggcctccaggtacacaggtccttaccctaggaactccaagcaagcaatgtctgaggggccctcaagtccttggacccagctggcccagcccctggggccaccctgtcaggacaccgggcccacccactacccaccaccccaccacccaccaccccaccctccacaggccctgccttgccctccagcctgtcgccacccagagaagcagggcagctacagcccagcactcccactgcagcctctggggggccacaaggggaccgggtaccaggctggtgggctgggcagcccctacctgaggcagcaggcagcccaggcaccttacattcccccactggggctggacgcttacccctacccctctgcccctctcccagcaccctctccaggcctcaagctggagccgcctctcactccacggtgcccattggactttgccccccagacactgagttttccttatgcccgggatgacctctctctctatggagcatcccctgggcttggagggacaccaccttcccagaacaatgtgagggctgtgccacagcccggtgccttccagagggcatgccagcctttgccagcgagccagccctgctcagagcctgtgaggcctgcacaggaagccgaagagaagacctggctgcccagctgcaggaaagagaagctccagccccggctcagtgagcactctgggccgcccatcgtcatccgagacagtccagttccctgtacccccccagcactgcccccctgtgcccgggagtgccagtctcttccacagaaggaggacgcaaggccacccagctctccaccaatgcctgtcattgacaatgtcttcagcctggccccctaccgtgactatctggatgtgccggcacccgaggccacaactgagcctgactctgccacagctgagcctgactcagccccagccaccagtgaaggtcaggacaaaggctgcagggggaccctgcctgcccaggagggcccctcagggagtaaacccctaaggggctcacttaaggaggaggtagccctggatttgagtgtgaggaagcccacagcagaggcctcccctgtcaaggcttcccgttctgtggagcatgccaagcctactgcagccatggatgtgccagatgtgggcaacatggtgtcagatctgccaggcctgaaaaagatagacacagaagcaccaggcttgcctggggtgccagtgaccacagatgccatgccaaggaccaacttccacagctctgtggccttcatgttccgaaagttcaagatcctccgtccggcacctttgcctgcagccgtggtcccgtccacgcccacctcagctcctgctcccacacagcctgcacccacccccacatctgggcccattggactgcggattctcgctcaacagcccttgtctgtgacctgcttcagcctggcactgcccagccctccagccgtagctgtggcctcccctgcccctgctccagctccatcccctgctccggctcgagctcaggctccagcttcagcccgggatccagctccagctccagctccagttgcaggccctgctccagcatctacttcagccccaggggactccctggagcagcattttacaggactacatgcgtccctgtgtgatgctatttctggctccgtcgcccactctcctccagagaagcttcgcgagtggctagagacggctgggccctggggccaggctgcgtggcaggactgccagggtgtgcaggggctgctggccaagctgctgtctcagctgcagcgcttcgatcgcacccaccggtgccccttcccccatgtggtgcgagctggcgccatcttcgtgcccattcacctggtgaaggagcggctcttccctcggctgccacccgcttctgtggaccatgtgctgcaggagcatcgtgtggagctgcggcccaccacgctgtcggaggagcgggcactgcgggagctcgccctgccaggctgcacctcacgcatgctgaagttactggcgctgcgccagctgccggacatttaccccgaccttctcggcctgcagtggcgcgactgtgtacgccgccagctgggtgagcatggggcagccccagtggccaccggagctgtgtgagcaagtgacaggtgactttgacactgaggctggagctgtgtcctcctcagagcccactgtggccagagatgagccagagagcctagccctggctcagaagtcaccggcccccaaggtcaggaagccaggcaggaagccaccaacccctggcccggagaaagcagaggcagctgctggggaagagtcctgtggtgcctcccctacccctgctaccagtgccagcccacctggccccacactgaaggcccgcttccgcagtctgctggagaccgcctggctcaatggcctggctctgcccacctggggccacaagtcctcaagaccagaccagccctcaccctgcccacagctgctggacagccagagccatcacctgtagcactggttgccagtgctgtgtgtatagcagtcactctccacccttcccttctgcctgcccagctgccccggggccacgagtggatgctggggctgtggctgctcccctggaggggttccatctctgaccctgtggcccattcagggtgggctgaagagcccctgagcttttaacgtgagggtctttattggataggactactccctatttcttgcctagagaacacacatgggctttggagcccgacagacctgggcttgaatcccggctcgtgttcttgctgcaggacctgggcaagaaacttcacctctgctgagccctcattccccatgtgtaaaatgggacaacgcaacctacctcacagggttgttgtggggatgctgcctgatacataccctgtcaccatttggtctctgcttcctctctgggacagggcctagaattggaggcagagaaccttcctatagaaagtcttcgtgtgtcctaggacttggctatcgtagagtggtaccttaggcagtggatgtgactcacactttcaggagtcaccccccagcatttggggttgggttggccctactccagcctggagctccctgagggagcctgcactccctgctcccaatccccgctactggtgcagggatgcagcctggagctggcgtccttgttctgggcctgctgctgccgccaccccaggaggccccaggcctgtcctgaattgacatcagtgcttccctgaactgcctcccccacccctggcattatcccaggaaacttatgttttctagaagctaagcagctgctgggactcagggactggtgcaggtaggctgagtggcagctcagtcctagaaggtctctgaagatctggactgaggaccctgctactccccaagccagagcccatcagccaggcctgctgtgagccacctgcctgtggagtgctgagctcaaccaaaggctggcaagctctgggcctcatttaagggattctgatgagccgatgggccctggaggcagcccattaaagcatctggctcgtttttggaa

SEQ ID NO: 10249 - DNA, 4685 bp, Homo sapiens
ttcactttccagctgccactcagcaactgccatacagcaaaaggagggattgcaactaccatgcagcaactgccaccttgaaagagaaggggttgaagagtagtctctaatatccagcaccagttggccttaggttccctgcctccagaccttattctcctgcaacatcaccactggttgaaaccttactacaaatcaagctgtgaagtcactggagccctgtagcaagtcatgtccctgtaacgatgagtgagctgacagctaaggggcttgcctaaaccacacagggcccggtcggactaggacccgcggcctgagagacgctggaggatgcggacgcggaggccgcctggggtagcggcggcgggagtcctggcgctctgcaggtcagaagttgagtagcaggggcctaggagggctcgaagccttcacagcgatggcagagaagcgacccctgagaaccctggggcctgtgatgtatggcaagctgccccgcttagagacagactccgggctcgagcacagcctgccccactctgttggtaaccaggatccctgcacctacaaggggtcctacttctcctgccccatggcgggtactcctaaggccgagtctgagcagttggcgtcctggaccccatacccacccttgtactctaccggtatggcaggacccccacttcaggcagacaacctgctgaccaactgcctgttctaccgctcgccagcagaaggccctgagaagatgcaggactccagccctgttgagctcctgcccttcagtccccaggctcactcctacccaggcccaccactggcagcacccaaacctgtctaccgcaaccctctgtgctatgggctctcaacttgtctgggggaaggagcagtgaagaggccactggatgttgactggactctggcgactgggcccctgttgccctcagctgacccaccctgctctctggccccagctcctagcaagggccagactctggatggcaccttcttgcggggggtgccagctgaggggtccagtaaagactcctcagggagcttctccccatgccagcccttcctggagaaatatcagaccatccacagcacgggcttcctggcctccaggtacacaggtccttaccctaggaactccaagcaagcaatgtctgaggggccctcaagtccttggacccagctggcccagcccctggggccaccctgtcaggacaccgggcccacccactacccaccaccccaccacccaccaccccaccctccacaggccctgccttgccctccagcctgtcgccacccagagaagcagggcagctacagcccagcactcccactgcagcctctggggggccacaaggggaccgggtaccaggctggtgggctgggcagcccctacctgaggcagcaggcagcccaggcaccttacattcccccactggggctggacgcttacccctacccctctgcccctctcccagcaccctctccaggcctcaagctggagccgcctctcactccacggtgcccattggactttgccccccagacactgagttttccttatgcccgggatgacctctctctctatggagcatcccctgggcttggagggacaccaccttcccagaacaatgtgagggctgtgccacagcccggtgccttccagagggcatgccagcctttgccagcgagccagccctgctcagagcctgtgaggcctgcacaggaagccgaagagaagacctggctgcccagctgcaggaaagagaagctccagccccggctcagtgagcactctgggccgcccatcgtcatccgagacagtccagttccctgtacccccccagcactgcccccctgtgcccgggagtgccagtctcttccacagaaggaggacgcaaggccacccagctctccaccaatgcctgtcattgacaatgtcttcagcctggccccctaccgtgactatctggatgtgccggcacccgaggccacaactgagcctgactctgccacagctgagcctgactcagccccagccaccagtgaaggtcaggacaaaggctgcagggggaccctgcctgcccaggagggcccctcagggagtaaacccctaaggggctcacttaaggaggaggtagccctggatttgagtgtgaggaagcccacagcagaggcctcccctgtcaaggcttcccgttctgtggagcatgccaagcctactgcagccatggatgtgccagatgtgggcaacatggtgtcagatctgccaggcctgaaaaagatagacacagaagcaccaggcttgcctggggtgccagtgaccacagatgccatgccaaggaccaacttccacagctctgtggccttcatgttccgaaagttcaagatcctccgtccggcacctttgcctgcagccgtggtcccgtccacgcccacctcagctcctgctcccacacagcctgcacccacccccacatctgggcccattggactgcggattctcgctcaacagcccttgtctgtgacctgcttcagcctggcactgcccagccctccagccgtagctgtggcctcccctgcccctgctccagctccatcccctgctccggctcgagctcaggctccagcttcagcccgggatccagctccagctccagctccagttgcaggccctgctccagcatctacttcagccccaggggactccctggagcagcattttacaggactacatgcgtccctgtgtgatgctatttctggctccgtcgcccactctcctccagagaagcttcgcgagtggctagagacggctgggccctggggccaggctgcgtggcaggactgccagggtgtgcaggggctgctggccaagctgctgtctcagctgcagcgcttcgatcgcacccaccggtgccccttcccccatgtggtgcgagctggcgccatcttcgtgcccattcacctggtgaaggagcggctcttccctcggctgccacccgcttctgtggaccatgtgctgcaggagcatcgtgtggagctgcggcccaccacgctgtcggaggagcgggcactgcgggagctcgccctgccaggctgcacctcacgcatgctgaagttactggcgctgcgccagctgccggacatttaccccgaccttctcggcctgcagtggcgcgactgtgtacgccgccagctgggtgagcatggggcagccccagtggccaccggagctgtgtgagcaagtgacaggtgactttgacactgaggctggagctgtgtcctcctcagagcccactgtggccagagatgagccagagagcctagccctggctcagaagtcaccggcccccaaggtcaggaagccaggcaggaagccaccaacccctggcccggagaaagcagaggcagctgctggggaagagtcctgtggtgcctcccctacccctgctaccagtgccagcccacctggccccacactgaaggcccgcttccgcagtctgctggagaccgcctggctcaatggcctggctctgcccacctggggccacaagtcctcaagaccagaccagccctcaccctgcccacagctgctggacagccagagccatcacctgtagcactggttgccagtgctgtgtgtatagcagtcactctccacccttcccttctgcctgcccagctgccccggggccacgagtggatgctggggctgtggctgctcccctggaggggttccatctctgaccctgtggcccattcagggtgggctgaagagcccctgagcttttaacgtgagggtctttattggataggactactccctatttcttgcctagagaacacacatgggctttggagcccgacagacctgggcttgaatcccggctcgtgttcttgctgcaggacctgggcaagaaacttcacctctgctgagccctcattccccatgtgtaaaatgggacaacgcaacctacctcacagggttgttgtggggatgctgcctgatacataccctgtcaccatttggtctctgcttcctctctgggacagggcctagaattggaggcagagaaccttcctatagaaagtcttcgtgtgtcctaggacttggctatcgtagagtggtaccttaggcagtggatgtgactcacactttcaggagtcaccccccagcatttggggttgggttggccctactccagcctggagctccctgagggagcctgcactccctgctcccaatccccgctactggtgcagggatgcagcctggagctggcgtccttgttctgggcctgctgctgccgccaccccaggaggccccaggcctgtcctgaattgacatcagtgcttccctgaactgcctcccccacccctggcattatcccaggaaacttatgttttctagaagctaagcagctgctgggactcagggactggtgcaggtaggctgagtggcagctcagtcctagaaggtctctgaagatctggactgaggaccctgctactccccaagccagagcccatcagccaggcctgctgtgagccacctgcctgtggagtgctgagctcaaccaaaggctggcaagctctgggcctcatttaagggattctgatgagccgatgggccctggaggcagcccattaaagcatctggctcgtttttggaa

SEQ ID NO: 10250 - DNA, 4113 bp, Homo sapiens
ccgcagacggcgcccagcggcggcgcgaacggcagctaggagggttgctccgggcttggtgctcactgcgacttcccgcgcagggcccggtcggactaggacccgcggcctgagagacgctggaggatgcggacgcggaggccgcctggggtagcggcggcgggagtcctggcgctctgcaggtcagaagttgagtagcaggggcctaggagggctcgaagccttcacagcgatggcagagaagcgacccctgagaaccctggggcctgtgatgtatggcaagctgccccgcttagagacagactccgggctcgagcacagcctgccccactctgttggtaaccaggatccctgcacctacaaggggtcctacttctcctgccccatggcgggtactcctaaggccgagtctgagcagttggcgtcctggaccccatacccacccttgtactctaccggtatggcaggacccccacttcaggcagacaacctgctgaccaactgcctgttctaccgctcgccagcagaaggccctgagaagatgcaggactccagccctgttgagctcctgcccttcagtccccaggctcactcctacccaggcccaccactggcagcacccaaacctgtctaccgcaaccctctgtgctatgggctctcaacttgtctgggggaaggagcagtgaagaggccactggatgttgactggactctggcgactgggcccctgttgccctcagctgacccaccctgctctctggccccagctcctagcaagggccagactctggatggcaccttcttgcggggggtgccagctgaggggtccagtaaagactcctcagggagcttctccccatgccagcccttcctggagaaatatcagaccatccacagcacgggcttcctggcctccagcaccctctccaggcctcaagctggagccgcctctcactccacggtgcccattggactttgccccccagacactgagttttccttatgcccgggatgacctctctctctatggagcatcccctgggcttggagggacaccaccttcccagaacaatgtgagggctgtgccacagcccggtgccttccagagggcatgccagcctttgccagcgagccagccctgctcagagcctgtgaggcctgcacaggaagccgaagagaagacctggctgcccagctgcaggaaagagaagctccagccccggctcagtgagcactctgggccgcccatcgtcatccgagacagtccagttccctgtacccccccagcactgcccccctgtgcccgggagtgccagtctcttccacagaaggaggacgcaaggccacccagctctccaccaatgcctgtcattgacaatgtcttcagcctggccccctaccgtgactatctggatgtgccggcacccgaggccacaactgagcctgactctgccacagctgagcctgactcagccccagccaccagtgaaggtcaggacaaaggctgcagggggaccctgcctgcccaggagggcccctcagggagtaaacccctaaggggctcacttaaggaggaggtagccctggatttgagtgtgaggaagcccacagcagaggcctcccctgtcaaggcttcccgttctgtggagcatgccaagcctactgcagccatggatgtgccagatgtgggcaacatggtgtcagatctgccaggcctgaaaaagatagacacagaagcaccaggcttgcctggggtgccagtgaccacagatgccatgccaaggaccaacttccacagctctgtggccttcatgttccgaaagttcaagatcctccgtccggcacctttgcctgcagccgtggtcccgtccacgcccacctcagctcctgctcccacacagcctgcacccacccccacatctgggcccattggactgcggattctcgctcaacagcccttgtctgtgacctgcttcagcctggcactgcccagccctccagccgtagctgtggcctcccctgcccctgctccagctccatcccctgctccggctcgagctcaggctccagcttcagcccgggatccagctccagctccagctccagttgcaggccctgctccagcatctacttcagccccaggggactccctggagcagcattttacaggactacatgcgtccctgtgtgatgctatttctggctccgtcgcccactctcctccagagaagcttcgcgagtggctagagacggctgggccctggggccaggctgcgtggcaggactgccagggtgtgcaggggctgctggccaagctgctgtctcagctgcagcgcttcgatcgcacccaccggtgccccttcccccatgtggtgcgagctggcgccatcttcgtgcccattcacctggtgaaggagcggctcttccctcggctgccacccgcttctgtggaccatgtgctgcaggagcatcgtgtggagctgcggcccaccacgctgtcggaggagcgggcactgcgggagctcgccctgccaggctgcacctcacgcatgctgaagttactggcgctgcgccagctgccggacatttaccccgaccttctcggcctgcagtggcgcgactgtgtacgccgccagctgggtgagcatggggcagccccagtggccaccggagctgtgtgagcaagtgacaggtgactttgacactgaggctggagctgtgtcctcctcagagcccactgtggccagagatgagccagagagcctagccctggctcagaagtcaccggcccccaaggtcaggaagccaggcaggaagccaccaacccctggcccggagaaagcagaggcagctgctggggaagagtcctgtggtgcctcccctacccctgctaccagtgccagcccacctggccccacactgaaggcccgcttccgcagtctgctggagaccgcctggctcaatggcctggctctgcccacctggggccacaagtcctcaagaccagaccagccctcaccctgcccacagctgctggacagccagagccatcacctgtagcactggttgccagtgctgtgtgtatagcagtcactctccacccttcccttctgcctgcccagctgccccggggccacgagtggatgctggggctgtggctgctcccctggaggggttccatctctgaccctgtggcccattcagggtgggctgaagagcccctgagcttttaacgtgagggtctttattggataggactactccctatttcttgcctagagaacacacatgggctttggagcccgacagacctgggcttgaatcccggctcgtgttcttgctgcaggacctgggcaagaaacttcacctctgctgagccctcattccccatgtgtaaaatgggacaacgcaacctacctcacagggttgttgtggggatgctgcctgatacataccctgtcaccatttggtctctgcttcctctctgggacagggcctagaattggaggcagagaaccttcctatagaaagtcttcgtgtgtcctaggacttggctatcgtagagtggtaccttaggcagtggatgtgactcacactttcaggagtcaccccccagcatttggggttgggttggccctactccagcctggagctccctgagggagcctgcactccctgctcccaatccccgctactggtgcagggatgcagcctggagctggcgtccttgttctgggcctgctgctgccgccaccccaggaggccccaggcctgtcctgaattgacatcagtgcttccctgaactgcctcccccacccctggcattatcccaggaaacttatgttttctagaagctaagcagctgctgggactcagggactggtgcaggtaggctgagtggcagctcagtcctagaaggtctctgaagatctggactgaggaccctgctactccccaagccagagcccatcagccaggcctgctgtgagccacctgcctgtggagtgctgagctcaaccaaaggctggcaagctctgggcctcatttaagggattctgatgagccgatgggccctggaggcagcccattaaagcatctggctcgtttttggaa

SEQ ID NO: 10251 - DNA, 4183 bp, Homo sapiens
ccgcagacggcgcccagcggcggcgcgaacggcagctaggagggttgctccgggcttggtgctcactgcgacttcccgcgcagggcccggtcggactaggacccgcggcctgagagacgctggaggatgcggacgcggaggccgcctggggtagcggcggcgggagtcctggcgctctgcaggtcagaagttgagtagcaggggcctaggagggctcgaagccttcacagcgatggcagagaagcgacccctgagaaccctggggcctgtgatgtatggcaagctgccccgcttagagacagactccgggctcgagcacagcctgccccactctgttggtaaccaggatccctgcacctacaaggggtcctacttctcctgccccatggcgggtactcctaaggccgagtctgagcagttggcgtcctggaccccatacccacccttgtactctaccggtatggcaggacccccacttcaggcagacaacctgctgaccaactgcctgttctaccgctcgccagcagaaggccctgagaagatgcaggactccagccctgttgagctcctgcccttcagtccccaggctcactcctacccaggcccaccactggcagcacccaaacctgtctaccgcaaccctctgtgctatgggctctcaacttgtctgggggaaggagcagtgaagaggccactggatgttgactggactctggcgactgggcccctgttgccctcagctgacccaccctgctctctggccccagctcctagcaagggccagactctggatggcaccttcttgcggggggtgccagctgaggggtccagtaaagactcctcagggagcttctccccatgccagcccttcctggagaaatatcagaccatccacagcacgggcttcctggcctccaggtacacaggtccttaccctaggaactccaagcaagcaatgtctgaggggccctcaagtccttggacccagctggcccagcccctggggccaccctgtcaggacaccgggcccacccactacccaccaccccaccacccaccaccccaccctccacaggccctgccttgccctccagcctgtcgccacccagagaagcagggcagctacagcccagcactcccactgcagcctctggggggccacaaggggaccgggtaccaggctggtgggctgggcagcccctacctgaggcagcaggcagcccaggcaccttacattcccccactggggctggacgcttacccctacccctctgcccctctcccagcaccctctccaggcctcaagctggagccgcctctcactccacggtgcccattggactttgccccccagacactgagttttccttatgcccgggatgacctctctctctatggagcatcccctgggcttggagggacaccaccttcccagaacaatgtgagggctgtgccacagcccggtgccttccagagggcatgccagcctttgccagcgagccagccctgctcagagcctgtgaggcctgcacaggaagccgaagagaagacctggctgcccagctgcaggaaagagaagctccagccccggctcagtgagcactctgggccgcccatcgtcatccgagacagtccagttccctgtacccccccagcactgcccccctgtgcccgggagtgccagtctcttccacagaaggaggacgcaaggccacccagctctccaccaatgcctgtcattgacaatgtcttcagcctggccccctaccgtgactatctggatgtgccggcacccgaggccacaactgagcctgactctgccacagctgagcctgactcagccccagccaccagtgaaggtcaggacaaaggctgcagggggaccctgcctgcccaggagggcccctcagggagtaaacccctaaggggctcacttaaggaggaggtagccctggatttgagtgtgaggaagcccacagcagaggcctcccctgtcaaggcttcccgttctgtggagcatgccaagcctactgcagccatggatgtgccagatgtgggcaacatggtgtcagatctgccaggcctgaaaaagatagacacagaagcaccaggcttgcctggggtgccagtgaccacagatgccatgccaaggaccaacttccacagctctgtggccttcatgttccgaaagttcaagatcctccgtccggcacctttgcctgcagccgtggtcccgtccacgcccacctcagctcctgctcccacacagcctgcacccacccccacatctgggcccattggactgcggattctcgctcaacagcccttgtctgtgaccaggctgcgtggcaggactgccagggtgtgcaggggctgctggccaagctgctgtctcagctgcagcgcttcgatcgcacccaccggtgccccttcccccatgtggtgcgagctggcgccatcttcgtgcccattcacctggtgaaggagcggctcttccctcggctgccacccgcttctgtggaccatgtgctgcaggagcatcgtgtggagctgcggcccaccacgctgtcggaggagcgggcactgcgggagctcgccctgccaggctgcacctcacgcatgctgaagttactggcgctgcgccagctgccggacatttaccccgaccttctcggcctgcagtggcgcgactgtgtacgccgccagctgggtgagcatggggcagccccagtggccaccggagctgtgtgagcaagtgacaggtgactttgacactgaggctggagctgtgtcctcctcagagcccactgtggccagagatgagccagagagcctagccctggctcagaagtcaccggcccccaaggtcaggaagccaggcaggaagccaccaacccctggcccggagaaagcagaggcagctgctggggaagagtcctgtggtgcctcccctacccctgctaccagtgccagcccacctggccccacactgaaggcccgcttccgcagtctgctggagaccgcctggctcaatggcctggctctgcccacctggggccacaagtcctcaagaccagaccagccctcaccctgcccacagctgctggacagccagagccatcacctgtagcactggttgccagtgctgtgtgtatagcagtcactctccacccttcccttctgcctgcccagctgccccggggccacgagtggatgctggggctgtggctgctcccctggaggggttccatctctgaccctgtggcccattcagggtgggctgaagagcccctgagcttttaacgtgagggtctttattggataggactactccctatttcttgcctagagaacacacatgggctttggagcccgacagacctgggcttgaatcccggctcgtgttcttgctgcaggacctgggcaagaaacttcacctctgctgagccctcattccccatgtgtaaaatgggacaacgcaacctacctcacagggttgttgtggggatgctgcctgatacataccctgtcaccatttggtctctgcttcctctctgggacagggcctagaattggaggcagagaaccttcctatagaaagtcttcgtgtgtcctaggacttggctatcgtagagtggtaccttaggcagtggatgtgactcacactttcaggagtcaccccccagcatttggggttgggttggccctactccagcctggagctccctgagggagcctgcactccctgctcccaatccccgctactggtgcagggatgcagcctggagctggcgtccttgttctgggcctgctgctgccgccaccccaggaggccccaggcctgtcctgaattgacatcagtgcttccctgaactgcctcccccacccctggcattatcccaggaaacttatgttttctagaagctaagcagctgctgggactcagggactggtgcaggtaggctgagtggcagctcagtcctagaaggtctctgaagatctggactgaggaccctgctactccccaagccagagcccatcagccaggcctgctgtgagccacctgcctgtggagtgctgagctcaaccaaaggctggcaagctctgggcctcatttaagggattctgatgagccgatgggccctggaggcagcccattaaagcatctggctcgtttttggaa

SEQ ID NO: 10252 - DNA, 4429 bp, Homo sapiens
ccgcagacggcgcccagcggcggcgcgaacggcagctaggagggttgctccgggcttggtgctcactgcgacttcccgcgcagggcccggtcggactaggacccgcggcctgagagacgctggaggatgcggacgcggaggccgcctggggtagcggcggcgggagtcctggcgctctgcaggtcagaagttgagtagcaggggcctaggagggctcgaagccttcacagcgatggcagagaagcgacccctgagaaccctggggcctgtgatgtatggcaagctgccccgcttagagacagactccgggctcgagcacagcctgccccactctgttggtaaccaggatccctgcacctacaaggggtcctacttctcctgccccatggcgggtactcctaaggccgagtctgagcagttggcgtcctggaccccatacccacccttgtactctaccggtatggcaggacccccacttcaggcagacaacctgctgaccaactgcctgttctaccgctcgccagcagaaggccctgagaagatgcaggactccagccctgttgagctcctgcccttcagtccccaggctcactcctacccaggcccaccactggcagcacccaaacctgtctaccgcaaccctctgtgctatgggctctcaacttgtctgggggaaggagcagtgaagaggccactggatgttgactggactctggcgactgggcccctgttgccctcagctgacccaccctgctctctggccccagctcctagcaagggccagactctggatggcaccttcttgcggggggtgccagctgaggggtccagtaaagactcctcagggagcttctccccatgccagcccttcctggagaaatatcagaccatccacagcacgggcttcctggcctccaggtacacaggtccttaccctaggaactccaagcaagcaatgtctgaggggccctcaagtccttggacccagctggcccagcccctggggccaccctgtcaggacaccgggcccacccactacccaccaccccaccacccaccaccccaccctccacaggccctgccttgccctccagcctgtcgccacccagagaagcagggcagctacagcccagcactcccactgcagcctctggggggccacaaggggaccgggtaccaggctggtgggctgggcagcccctacctgaggcagcaggcagcccaggcaccttacattcccccactggggctggacgcttacccctacccctctgcccctctcccagcaccctctccaggcctcaagctggagccgcctctcactccacggtgcccattggactttgccccccagacactgagttttccttatgcccgggatgacctctctctctatggagcatcccctgggcttggagggacaccaccttcccagaacaatgtgagggctgtgccacagcccggtgccttccagagggcatgccagcctttgccagcgagccagccctgctcagagcctgtgaggcctgcacaggaagccgaagagaagacctggctgcccagctgcaggaaagagaagctccagccccggctcagtgagcactctgggccgcccatcgtcatccgagacagtccagttccctgtacccccccagcactgcccccctgtgcccgggagtgccagtctcttccacagaaggaggacgcaaggccacccagctctccaccaatgcctgtcattgacaatgtcttcagcctggccccctaccgtgactatctggatgtgccggcacccgaggccacaactgagcctgactctgccacagctgagcctgactcagccccagccaccagtgaaggtcaggacaaaggctgcagggggaccctgcctgcccaggagggcccctcagggagtaaacccctaaggggctcacttaaggaggaggtagccctggatttgagtgtgaggaagcccacagcagaggcctcccctgtcaaggcttcccgttctgtggagcatgccaagcctactgcagccatggatgtgccagatgtgggcaacatggtgtcagatctgccaggcctgaaaaagatagacacagaagcaccaggcttgcctggggtgccagtgaccacagatgccatgccaaggaccaacttccacagctctgtggccttcatgttccgaaagttcaagatcctccgtccggcacctttgcctgcagccgtggtcccgtccacgcccacctcagctcctgctcccacacagcctgcacccacccccacatctgggcccattggactgcggattctcgctcaacagcccttgtctgtgacctgcttcagcctggcactgcccagccctccagccgtagctgtggcctcccctgcccctgctccagctccatcccctgctccggctcgagctcaggctccagcttcagcccgggatccagctccagctccagctccagttgcaggccctgctccagcatctacttcagccccaggggactccctggagcagcattttacaggactacatgcgtccctgtgtgatgctatttctggctccgtcgcccactctcctccagagaagcttcgcgagtggctagagacggctgggccctggggccaggctgcgtggcaggactgccagggtgtgcaggggctgctggccaagctgctgtctcagctgcagcgcttcgatcgcacccaccggtgccccttcccccatgtggtgcgagctggcgccatcttcgtgcccattcacctggtgaaggagcggctcttccctcggctgccacccgcttctgtggaccatgtgctgcaggagcatcgtgtggagctgcggcccaccacgctgtcggaggagcgggcactgcgggagctcgccctgccaggctgcacctcacgcatgctgaagttactggcgctgcgccagctgccggacatttaccccgaccttctcggcctgcagtggcgcgactgtgtacgccgccagctgggtgactttgacactgaggctggagctgtgtcctcctcagagcccactgtggccagagatgagccagagagcctagccctggctcagaagtcaccggcccccaaggtcaggaagccaggcaggaagccaccaacccctggcccggagaaagcagaggcagctgctggggaagagtcctgtggtgcctcccctacccctgctaccagtgccagcccacctggccccacactgaaggcccgcttccgcagtctgctggagaccgcctggctcaatggcctggctctgcccacctggggccacaagtcctcaagaccagaccagccctcaccctgcccacagctgctggacagccagagccatcacctgtagcactggttgccagtgctgtgtgtatagcagtcactctccacccttcccttctgcctgcccagctgccccggggccacgagtggatgctggggctgtggctgctcccctggaggggttccatctctgaccctgtggcccattcagggtgggctgaagagcccctgagcttttaacgtgagggtctttattggataggactactccctatttcttgcctagagaacacacatgggctttggagcccgacagacctgggcttgaatcccggctcgtgttcttgctgcaggacctgggcaagaaacttcacctctgctgagccctcattccccatgtgtaaaatgggacaacgcaacctacctcacagggttgttgtggggatgctgcctgatacataccctgtcaccatttggtctctgcttcctctctgggacagggcctagaattggaggcagagaaccttcctatagaaagtcttcgtgtgtcctaggacttggctatcgtagagtggtaccttaggcagtggatgtgactcacactttcaggagtcaccccccagcatttggggttgggttggccctactccagcctggagctccctgagggagcctgcactccctgctcccaatccccgctactggtgcagggatgcagcctggagctggcgtccttgttctgggcctgctgctgccgccaccccaggaggccccaggcctgtcctgaattgacatcagtgcttccctgaactgcctcccccacccctggcattatcccaggaaacttatgttttctagaagctaagcagctgctgggactcagggactggtgcaggtaggctgagtggcagctcagtcctagaaggtctctgaagatctggactgaggaccctgctactccccaagccagagcccatcagccaggcctgctgtgagccacctgcctgtggagtgctgagctcaaccaaaggctggcaagctctgggcctcatttaagggattctgatgagccgatgggccctggaggcagcccattaaagcatctggctcgtttttggaa

SEQ ID NO: 10253 - DNA, 1870 bp, Homo sapiens
ccagctgttaccgccccggagttacaggctgcgtggcaggactgccagggtgtgcaggggctgctggccaagctgctgtctcagctgcagcgcttcgatcgcacccaccggtgccccttcccccatgtggtgcgagctggcgccatcttcgtgcccattcacctggtgaaggagcggctcttccctcggctgccacccgcttctgtggaccatgtgctgcaggagcatcgtgtggagctgcggcccaccacgctgtcggaggagcgggcactgcgggagctcgccctgccaggctgcacctcacgcatgctgaagttactggcgctgcgccagctgccggacatttaccccgaccttctcggcctgcagtggcgcgactgtgtacgccgccagctgggtgagcatggggcagccccagtggccaccggagctgtgtgagcaagtgacaggtgactttgacactgaggctggagctgtgtcctcctcagagcccactgtggccagagatgagccagagagcctagccctggctcagaagtcaccggcccccaaggtcaggaagccaggcaggaagccaccaacccctggcccggagaaagcagaggcagctgctggggaagagtcctgtggtgcctcccctacccctgctaccagtgccagcccacctggccccacactgaaggcccgcttccgcagtctgctggagaccgcctggctcaatggcctggctctgcccacctggggccacaagtcctcaagaccagaccagccctcaccctgcccacagctgctggacagccagagccatcacctgtagcactggttgccagtgctgtgtgtatagcagtcactctccacccttcccttctgcctgcccagctgccccggggccacgagtggatgctggggctgtggctgctcccctggaggggttccatctctgaccctgtggcccattcagggtgggctgaagagcccctgagcttttaacgtgagggtctttattggataggactactccctatttcttgcctagagaacacacatgggctttggagcccgacagacctgggcttgaatcccggctcgtgttcttgctgcaggacctgggcaagaaacttcacctctgctgagccctcattccccatgtgtaaaatgggacaacgcaacctacctcacagggttgttgtggggatgctgcctgatacataccctgtcaccatttggtctctgcttcctctctgggacagggcctagaattggaggcagagaaccttcctatagaaagtcttcgtgtgtcctaggacttggctatcgtagagtggtaccttaggcagtggatgtgactcacactttcaggagtcaccccccagcatttggggttgggttggccctactccagcctggagctccctgagggagcctgcactccctgctcccaatccccgctactggtgcagggatgcagcctggagctggcgtccttgttctgggcctgctgctgccgccaccccaggaggccccaggcctgtcctgaattgacatcagtgcttccctgaactgcctcccccacccctggcattatcccaggaaacttatgttttctagaagctaagcagctgctgggactcagggactggtgcaggtaggctgagtggcagctcagtcctagaaggtctctgaagatctggactgaggaccctgctactccccaagccagagcccatcagccaggcctgctgtgagccacctgcctgtggagtgctgagctcaaccaaaggctggcaagctctgggcctcatttaagggattctgatgagccgatgggccctggaggcagcccattaaagcatctggctcgtttttggaa

SEQ ID NO: 10254 - DNA, 3861 bp, Homo sapiens
ccgcagacggcgcccagcggcggcgcgaacggcagctaggagggttgctccgggcttggtgctcactgcgacttcccgcgcagggcccggtcggactaggacccgcggcctgagagacgctggaggatgcggacgcggaggccgcctggggtagcggcggcgggagtcctggcgctctgcaggtcagaagttgagtagcaggggcctaggagggctcgaagccttcacagcgatggcagagaagcgacccctgagaaccctggggcctgtgatgtatggcaagctgccccgcttagagacagactccgggctcgagcacagcctgccccactctgttggtaaccaggatccctgcacctacaaggggtcctacttctcctgccccatggcgggtactcctaaggccgagtctgagcagttggcgtcctggaccccatacccacccttgtactctaccggtatggcaggacccccacttcaggcagacaacctgctgaccaactgcctgttctaccgctcgccagcagaaggccctgagaagatgcaggactccagccctgttgagctcctgcccttcagtccccaggctcactcctacccaggcccaccactggcagcacccaaacctgtctaccgcaaccctctgtgctatgggctctcaacttgtctgggggaaggagcagtgaagaggccactggatgttgactggactctggcgactgggcccctgttgccctcagctgacccaccctgctctctggccccagctcctagcaagggccagactctggatggcaccttcttgcggggggtgccagctgaggggtccagtaaagactcctcagggagcttctccccatgccagcccttcctggagaaatatcagaccatccacagcacgggcttcctggcctccaggtacacaggtccttaccctaggaactccaagcaagcaatgtctgaggggccctcaagtccttggacccagctggcccagcccctggggccaccctgtcaggacaccgggcccacccactacccaccaccccaccacccaccaccccaccctccacaggccctgccttgccctccagcctgtcgccacccagagaagcagggcagctacagcccagcactcccactgcagcctctggggggccacaaggggaccgggtaccaggctggtgggctgggcagcccctacctgaggcagcaggcagcccaggcaccttacattcccccactggggctggacgcttacccctacccctctgcccctctcccagcaccctctccaggcctcaagctggagccgcctctcactccacggtgcccattggactttgccccccagacactgagttttccttatgcccgggatgacctctctctctatggagcatcccctgggcttggagggacaccaccttcccagaacaatgtgagggctgtgccacagcccggtgccttccagagggcatgccagcctttgccagcgagccagccctgctcagagcctgtgaggcctgcacaggaagccgaagagaagacctggctgcccagctgcaggaaagagaagctccagccccggctcagtgagcactctgggccgcccatcgtcatccgagacagtccagttccctgtacccccccagcactgcccccctgtgcccgggagtgccagtctcttccacagaaggaggacgcaaggccacccagctctccaccaatgcctgtcattgacaatgtcttcagcctggccccctaccgtgactatctggatgtgccggcacccgaggccacaactgagcctgactctgccacagctgagcctgactcagccccagccaccagtgaaggtcaggacaaaggctgcagggggaccctgcctgcccaggagggcccctcagggagtaaacccctaaggggctcacttaaggaggaggtagccctggatttgagtgtgaggaagcccacagcagaggcctcccctgtcaaggcttcccgttctgtggagcatgccaagcctactgcagccatggatgtgccagatgtgggcaacatggtgtcagatctgccaggcctgaaaaagatagacacagaagcaccaggcttgcctggggtgccagtgaccacagatgccatgccaaggaccaacttccacagctctgtggccttcatgttccgaaagttcaagatcctccgtccggcacctttgcctgcagccgtggtcccgtccacgcccacctcagctcctgctcccacacagcctgcacccacccccacatctgggcccattggactgcggattctcgctcaacagcccttgtctgtgacctgcttcagcctggcactgcccagccctccagccgtagctgtggcctcccctgcccctgctccagctccatcccctgctccggctcgagctcaggctccagcttcagcccgggatccagctccagctccagctccagttgcaggccctgctccagcatctacttcagccccaggggactccctggagcagcattttacaggactacatgcgtccctgtgtgatgctatttctggctccgtcgcccactctcctccagagaagcttcgcgagtggctagagacggctgggccctggggccaggctgcgtggcaggactgccagggtgtgcaggggctgctggccaagctgctgtctcagctgcagcgcttcgatcgcacccaccggtgccccttcccccatgtggtgcgagctggcgccatcttcgtgcccattcacctggtgaaggagcggctcttccctcggctgccacccgcttctgtggaccatgtgctgcaggagcatcgtgtggagctgcggcccaccacgctgtcggaggagcgggcactgcgggagctcgccctgccaggctgcacctcacgcatgctgaagttactggcgctgcgccagctgccggacatttaccccgaccttctcggcctgcagtggcgcgactgtgtacgccgccagctgggtgagcatggggcagccccagtggccaccggagctgtgtgagcaagtgacaggtgactttgacactgaggctggagctgtgtcctcctcagagcccactgtggccagagatgagccagagagcctagccctggctcagaagtcaccggcccccaaggtcaggaagccaggcaggaagccaccaacccctggcccggagaaagcagaggcagctgctggggaagagtcctgtggtgcctcccctacccctgctaccagtgccagcccacctggccccacactgaaggcccgcttccgcagtctgctggagaccgcctggctcaatggcctggctctgcccacctggggccacaagtcctcaagaccagaccagccctcaccctgcccacagctgctggacagccagagccatcacctgtagcactggttgccagtgctgtgtgtatagcagtcactctccacccttcccttctgcctgcccagctgccccggggccacgagtggatgctggggctgtggctgctcccctggaggggttccatctctgaccctgtggcccattcagggtgggctgaagagcccctgagcttttaacgtgagggtctttattggataggactactccctatttcttgcctagagaacacacatgggctttggagcccgacagacctgggcttgaatcccggctcgtgttcttgctgcaggacctgggcaagaaacttcacctctgctgagccctcattccccatgtgtaaaatgggacaacgcaacctacctcacagggttgttgtggggatgctgcctgatacataccctgtcaccatcacaataaagtccccatttgattttta

SEQ ID NO: 10255 - DNA, 1777 bp, Homo sapiens
tgatggctgtcttatatatggcagggtcctctgttcccatgcctcagttttccatctgagcaatgggtattggaccaggccaatggttcctgacctgctgagcccctttgctctcatccttgtacccaaacagcctctcctgagtggtgccctcatcagatagagttctggtgtcacctggggagaagcacatcttttttgcttggatggtctggccagtgggcatgtgtggggaagagttgtgatgccagcctgacttggggcagagcagaagcactgtttggatggctttggaagccaggaggtgggacctgagggtatggggtctgcaggctgactatgtgttcgttttccaggtgactttgacactgaggctggagctgtgtcctcctcagagcccactgtggccagagatgagccagagagcctagccctggctcagaagtcaccggcccccaaggtcaggaagccaggcaggaagccaccaacccctggcccggagaaagcagaggcagctgctggggaagagtcctgtggtgcctcccctacccctgctaccagtgccagcccacctggccccacactgaaggcccgcttccgcagtctgctggagaccgcctggctcaatggcctggctctgcccacctggggccacaagtcctcaagaccagaccagccctcaccctgcccacagctgctggacagccagagccatcacctgtagcactggttgccagtgctgtgtgtatagcagtcactctccacccttcccttctgcctgcccagctgccccggggccacgagtggatgctggggctgtggctgctcccctggaggggttccatctctgaccctgtggcccattcagggtgggctgaagagcccctgagcttttaacgtgagggtctttattggataggactactccctatttcttgcctagagaacacacatgggctttggagcccgacagacctgggcttgaatcccggctcgtgttcttgctgcaggacctgggcaagaaacttcacctctgctgagccctcattccccatgtgtaaaatgggacaacgcaacctacctcacagggttgttgtggggatgctgcctgatacataccctgtcaccatttggtctctgcttcctctctgggacagggcctagaattggaggcagagaaccttcctatagaaagtcttcgtgtgtcctaggacttggctatcgtagagtggtaccttaggcagtggatgtgactcacactttcaggagtcaccccccagcatttggggttgggttggccctactccagcctggagctccctgagggagcctgcactccctgctcccaatccccgctactggtgcagggatgcagcctggagctggcgtccttgttctgggcctgctgctgccgccaccccaggaggccccaggcctgtcctgaattgacatcagtgcttccctgaactgcctcccccacccctggcattatcccaggaaacttatgttttctagaagctaagcagctgctgggactcagggactggtgcaggtaggctgagtggcagctcagtcctagaaggtctctgaagatctggactgaggaccctgctactccccaagccagagcccatcagccaggcctgctgtgagccacctgcctgtggagtgctgagctcaaccaaaggctggcaagctctgggcctcatttaagggattctgatgagccgatgggccctggaggcagcccattaaagcatctggctcgtttttggaa

SEQ ID NO: 10256 - DNA, 3862 bp, Homo sapiens
ccgcagacggcgcccagcggcggcgcgaacggcagctaggagggttgctccgggcttggtgctcactgcgacttcccgcgcagggcccggtcggactaggacccgcggcctgagagacgctggaggatgcggacgcggaggccgcctggggtagcggcggcgggagtcctggcgctctgcaggtcagaagttgagtagcaggggcctaggagggctcgaagccttcacagcgatggcagagaagcgacccctgagaaccctggggcctgtgatgtatggcaagctgccccgcttagagacagactccgggctcgagcacagcctgccccactctgttggtaaccaggatccctgcacctacaaggggtcctacttctcctgccccatggcgggtactcctaaggccgagtctgagcagttggcgtcctggaccccatacccacccttgtactctaccggtatggcaggacccccacttcaggcagacaacctgctgaccaactgcctgttctaccgctcgccagcagaaggccctgagaagatgcaggactccagccctgttgagctcctgcccttcagtccccaggctcactcctacccaggcccaccactggcagcacccaaacctgtctaccgcaaccctctgtgctatgggctctcaacttgtctgggggaaggagcagtgaagaggccactggatgttgactggactctggcgactgggcccctgttgccctcagctgacccaccctgctctctggccccagctcctagcaagggccagactctggatggcaccttcttgcggggggtgccagctgaggggtccagtaaagactcctcagggagcttctccccatgccagcccttcctggagaaatatcagaccatccacagcacgggcttcctggcctccaggtacacaggtccttaccctaggaactccaagcaagcaatgtctgaggggccctcaagtccttggacccagctggcccagcccctggggccaccctgtcaggacaccgggcccacccactacccaccaccccaccacccaccaccccaccctccacaggccctgccttgccctccagcctgtcgccacccagagaagcagggcagctacagcccagcactcccactgcagcctctggggggccacaaggggaccgggtaccaggctggtgggctgggcagcccctacctgaggcagcaggcagcccaggcaccttacattcccccactggggctggacgcttacccctacccctctgcccctctcccagcaccctctccaggcctcaagctggagccgcctctcactccacggtgcccattggactttgccccccagacactgagttttccttatgcccgggatgacctctctctctatggagcatcccctgggcttggagggacaccaccttcccagaacaatgtgagggctgtgccacagcccggtgccttccagagggcatgccagcctttgccagcgagccagccctgctcagagcctgtgaggcctgcacaggaagccgaagagaagacctggctgcccagctgcaggaaagagaagctccagccccggctcagtgagcactctgggccgcccatcgtcatccgagacagtccagttccctgtacccccccagcactgcccccctgtgcccgggagtgccagtctcttccacagaaggaggacgcaaggccacccagctctccaccaatgcctgtcattgacaatgtcttcagcctggccccctaccgtgactatctggatgtgccggcacccgaggccacaactgagcctgactctgccacagctgagcctgactcagccccagccaccagtgaaggtcaggacaaaggctgcagggggaccctgcctgcccaggagggcccctcagggagtaaacccctaaggggctcacttaaggaggaggtagccctggatttgagtgtgaggaagcccacagcagaggcctcccctgtcaaggcttcccgttctgtggagcatgccaagcctactgcagccatggatgtgccagatgtgggcaacatggtgtcagatctgccaggcctgaaaaagatagacacagaagcaccaggcttgcctggggtgccagtgaccacagatgccatgccaaggaccaacttccacagctctgtggccttcatgttccgaaagttcaagatcctccgtccggcacctttgcctgcagccgtggtcccgtccacgcccacctcagctcctgctcccacacagcctgcacccacccccacatctgggcccattggactgcggattctcgctcaacagcccttgtctgtgacctgcttcagcctggcactgcccagccctccagccgtagctgtggcctcccctgcccctgctccagctccatcccctgctccggctcgagctcaggctccagcttcagcccgggatccagctccagctccagctccagttgcaggccctgctccagcatctacttcagccccaggggactccctggagcagcattttacaggactacatgcgtccctgtgtgatgctatttctggctccgtcgcccactctcctccagagaagcttcgcgagtggctagagacggctgggccctggggccaggctgcgtggcaggactgccagggtgtgcaggggctgctggccaagctgctgtctcagctgcagcgcttcgatcgcacccaccggtgccccttcccccatgtggtgcgagctggcgccatcttcgtgcccattcacctggtgaaggagcggctcttccctcggctgccacccgcttctgtggaccatgtgctgcaggagcatcgtgtggagctgcggcccaccacgctgtcggaggagcgggcactgcgggagctcgccctgccaggctgcacctcacgcatgctgaagttactggcgctgcgccagctgccggacatttaccccgaccttctcggcctgcagtggcgcgactgtgtacgccgccagctgggtgagcatggggcagccccagtggccaccggagctgtgtgagcaagtgacaggtgtgtgtgctgtgtgagtgcgtcacagctggggctgagtgattccaaggactcctgcccgggtagggggctttaggatgagctctaggtacccccaccccttgaccctccagacaatcagtgagcaccttcatagcctcttttgtaggcttctgaacatgccagctgctctgtccccatggaaactcctcggcctcccctggtgctgcaccttcttggattccctcctcctctgcctgtgccttctccatctttggtgcagtgtttccggcactctggttaggccctgttttctagctgagataatttccctgatctccagcctagcatcccctttgtgagctctagccctaaataacccactgcatgctgggcctcagcccctgggtctctctcccacactgaactcatcccaaatcacactcccgagccttcccctcagctcacttcccacaaccagttcttttccatgtcagtgaagggcaccccctttcacaaagctcctcatgctctagacctggtgagggccacagctgcctttttgaacgtgtagttttgcagtcctccccggcccttgcatacacagaagtgtgcgcataagtcgcattgttttgtggtttgcttttcctctactaaatgatgtgcctgctgttctccagcttgttttcttttaatgtcctggaggaccacacaactgccgaagtgttgtgtggcgtgtatgatcacacttcttcagctagggatctggtgatgggaccaagtggattctgttattgcccctcctgcgtcagtacacctggca

SEQ ID NO: 10257 - DNA, 3616 bp, Homo sapiens
ccgcagacggcgcccagcggcggcgcgaacggcagctaggagggttgctccgggcttggtgctcactgcgacttcccgcgcagggcccggtcggactaggacccgcggcctgagagacgctggaggatgcggacgcggaggccgcctggggtagcggcggcgggagtcctggcgctctgcaggtcagaagttgagtagcaggggcctaggagggctcgaagccttcacagcgatggcagagaagcgacccctgagaaccctggggcctgtgatgtatggcaagctgccccgcttagagacagactccgggctcgagcacagcctgccccactctgttggtaaccaggatccctgcacctacaaggggtcctacttctcctgccccatggcgggtactcctaaggccgagtctgagcagttggcgtcctggaccccatacccacccttgtactctaccggtatggcaggacccccacttcaggcagacaacctgctgaccaactgcctgttctaccgctcgccagcagaaggccctgagaagatgcaggactccagccctgttgagctcctgcccttcagtccccaggctcactcctacccaggcccaccactggcagcacccaaacctgtctaccgcaaccctctgtgctatgggctctcaacttgtctgggggaaggagcagtgaagaggccactggatgttgactggactctggcgactgggcccctgttgccctcagctgacccaccctgctctctggccccagctcctagcaagggccagactctggatggcaccttcttgcggggggtgccagctgaggggtccagtaaagactcctcagggagcttctccccatgccagcccttcctggagaaatatcagaccatccacagcacgggcttcctggcctccaggtacacaggtccttaccctaggaactccaagcaagcaatgtctgaggggccctcaagtccttggacccagctggcccagcccctggggccaccctgtcaggacaccgggcccacccactacccaccaccccaccacccaccaccccaccctccacaggccctgccttgccctccagcctgtcgccacccagagaagcagggcagctacagcccagcactcccactgcagcctctggggggccacaaggggaccgggtaccaggctggtgggctgggcagcccctacctgaggcagcaggcagcccaggcaccttacattcccccactggggctggacgcttacccctacccctctgcccctctcccagcaccctctccaggcctcaagctggagccgcctctcactccacggtgcccattggactttgccccccagacactgagttttccttatgcccgggatgacctctctctctatggagcatcccctgggcttggagggacaccaccttcccagaacaatgtgagggctgtgccacagcccggtgccttccagagggcatgccagcctttgccagcgagccagccctgctcagagcctgtgaggcctgcacaggaagccgaagagaagacctggctgcccagctgcaggaaagagaagctccagccccggctcagtgagcactctgggccgcccatcgtcatccgagacagtccagttccctgtacccccccagcactgcccccctgtgcccgggagtgccagtctcttccacagaaggaggacgcaaggccacccagctctccaccaatgcctgtcattgacaatgtcttcagcctggccccctaccgtgactatctggatgtgccggcacccgaggccacaactgagcctgactctgccacagctgagcctgactcagccccagccaccagtgaaggtcaggacaaaggctgcagggggaccctgcctgcccaggagggcccctcagggagtaaacccctaaggggctcacttaaggaggaggtagccctggatttgagtgtgaggaagcccacagcagaggcctcccctgtcaaggcttcccgttctgtggagcatgccaagcctactgcagccatggatgtgccagatgtgggcaacatggtgtcagatctgccaggcctgaaaaagatagacacagaagcaccaggcttgcctggggtgccagtgaccacagatgccatgccaaggaccaacttccacagctctgtggccttcatgttccgaaagttcaagatcctccgtccggcacctttgcctgcagccgtggtcccgtccacgcccacctcagctcctgctcccacacagcctgcacccacccccacatctgggcccattggactgcggattctcgctcaacagcccttgtctgtgacctgcttcagcctggcactgcccagccctccagccgtagctgtggcctcccctgcccctgctccagctccatcccctgctccggctcgagctcaggctccagcttcagcccgggatccagctccagctccagctccagttgcaggccctgctccagcatctacttcagccccaggggactccctggagcagcattttacaggactacatgcgtccctgtgtgatgctatttctggctccgtcgcccactctcctccagagaagcttcgcgagtggctagagacggctgggccctggggccaggctgcgtggcaggactgccagggtgtgcaggggctgctggccaagctgctgtctcagctgcagcgcttcgatcgcacccaccggtgccccttcccccatgtggtgcgagctggcgccatcttcgtgcccattcacctggtgaaggagcggctcttccctcggctgccacccgcttctgtggaccatgtgctgcaggagcatcgtgtggagctgcggcccaccacgctgtcggaggagcgggcactgcgggagctcgccctgccaggctgcacctcacgcatgctgaagttactggcgctgcgccagctgccggacatttaccccgaccttctcggcctgcagtggcgcgactgtgtacgccgccagctgggtgagcatggggcagccccagtggccaccggagctgtgtgagcaagtgacaggtgactttgacactgaggctggagctgtgtcctcctcagagcccactgtggccagagatgagccagagagcctagccctggctcagaagtcaccggcccccaaggtcaggaagccaggcaggaagccaccaacccctggcccggagaaagcagaggcagctgctggggaagagtcctgtggtgcctcccctacccctgctaccagtgccagcccacctggccccacactgaaggcccgcttccgcagtctgctggagaccgcctggctcaatggcctggctctgcccacctggggccacaagtcctcaagaccagaccagccctcaccctgcccacagctgctggacagccagagccatcacctgtagcactggttgccagtgctgtgtgtatagcagtcactctccacccttcccttctgcctgtcatggctggctgagggtcagaggaagggccaggcggcctgagggtcacaggacatggacaggcggggtgagggtcacaggaagggccaggcgggctgagggtcagaggaagggacaggtgggcctctgct

SEQ ID NO: 10258 - DNA, 2436 bp, Homo sapiens
ccgcagacggcgcccagcggcggcgcgaacggcagctaggagggttgctccgggcttggtgctcactgcgacttcccgcgcagggcccggtcggactaggacccgcggcctgagagacgctggaggatgcggacgcggaggccgcctggggtagcggcggcgggagtcctggcgctctgcaggtcagaagttgagtagcaggggcctaggagggctcgaagccttcacagcgatggcagagaagcgacccctgagaaccctggggcctgtgatgtatggcaagctgccccgcttagagacagactccgggctcgagcacagcctgccccactctgttggtaaccaggatccctgcacctacaaggggtcctacttctcctgccccatggcgggtactcctaaggccgagtctgagcagttggcgtcctggaccccatacccacccttgtactctaccggtatggcaggacccccacttcaggcagacaacctgctgaccaactgcctgttctaccgctcgccagcagaaggccctgagaagatgcaggactccagccctgttgagctcctgcccttcagtccccaggctcactcctacccaggcccaccactggcagcacccaaacctgtctaccgcaaccctctgtgctatgggctctcaacttgtctgggggaaggagcagtgaagaggccactggatgttgactggactctggcgactgggcccctgttgccctcagctgacccaccctgctctctggccccagctcctagcaagggccagactctggatggcaccttcttgcggggggtgccagctgaggggtccagtaaagactcctcagggagcttctccccatgccagcccttcctggagaaatatcagaccatccacagcacgggcttcctggcctccaggtacacaggtccttaccctaggaactccaagcaagcaatgtctgaggggccctcaagtccttggacccagctggcccagcccctggggccaccctgtcaggacaccgggcccacccactacccaccaccccaccacccaccaccccaccctccacaggccctgccttgccctccagcctgtcgccacccagagaagcagggcagctacagcccagcactcccactgcagcctctggggggccacaaggggaccgggtaccaggctggtgggctgggcagcccctacctgaggcagcaggcagcccaggcaccttacattcccccactggggctggacgcttacccctacccctctgcccctctcccagcaccctctccaggcctcaagctggagccgcctctcactccacggtgcccattggactttgccccccagacactgagttttccttatgcccgggatgacctctctctctatggagcatcccctgggcttggagggacaccaccttcccagaacaatgtgagggctgtgccacagcccggtgccttccagagggcatgccagcctttgccagcgagccagccctgctcagagcctgtgaggcctgcacaggaagccgaagagaagacctggctgcccagctgcaggaaagagaagctccagccccggctcagtgagcactctgggccgcccatcgtcatccgagacagtccagttccctgtacccccccagcactgcccccctgtgcccgggagtgccagtctcttccacagaaggaggacgcaaggccacccagctctccaccaatgcctgtcattgacaatgtcttcagcctggccccctaccgtgactatctggatgtgccggcacccgaggccacaactgagcctgactctgccacagctgagcctgactcagccccagccaccagtgaaggtcaggacaaaggctgcagggggaccctgcctgcccaggagggcccctcagggagtaaacccctaaggggctcacttaaggaggaggtagccctggatttgagtgtgaggaagcccacagcagaggcctcccctgtcaaggcttcccgttctgtggagcatgccaagcctactgcagccatggatgtgccagatgtgggcaacatggtgtcagatctgccaggcctgaaaaagatagacacagaagcaccaggcttgcctggggtgccagtgaccacagatgccatgccaaggaccaacttccacagcttgcctttttgaacgtgtagttttgcagtcctccccggcccttgcatacacagaagtgtgcgcataagtcgcattgttttgtggtttgcttttcctctactaaatgatgtgcctgctgttctccagcttgttttcttttaatgtcctggaggaccacacaactgccgaagtgttgtgtggcgtgtatgatcacacttcttcagctagggatctggtgatgggaccaagtggattctgttattgcccctcctgcgtcagtacacctggca

SEQ ID NO: 10259 - DNA, 275 bp, Homo sapiens
ggtggtgcgtgcttgtaatcccagatactcaggaggctgaggcaggagaatcgtttgaacccagaaagtggaatttggagtgaatgaagatcacgccactgcactccagcctggacaacaagagcgaaactccatctcaaaaaaaaagagtagatttaactggggaacaatcaagtcatgtagctaagtaacccactacatgtggtaagaaggacataaaatagataatagtagattctttgagaatgaggctacaattcagttatttggttaaa

SEQ ID NO: 10260 - DNA, 421 bp, Homo sapiens
tgtcatgaagaagaccacattagcacatcatgccactcttactattttagggactccacccagtgaagtcagtgatgtgctgttcttgcttccctagcttgaagaagagtatcagacttaatattacattcatacagtggctctatgatttgggtgataaataattgaatctgctttgctaatgtgagaaatagattattcagggtcactcaagccagggttccacttttcaaagttctaggtggtaagctagatcattaggaacccacttatttgtttacaaaatggaaattttcagtctttgtgagaatttgtcagcataacaatttgccaacagagactgttgattcagaggtgtctgtggcatgatagaattcacagcagcacagttttaaataaagttacacctttcagaaagcgc

SEQ ID NO: 10261 - DNA, 368 bp, Homo sapiens
aattgaggacaagagatgtatggtctttgctcaatgtcacttagctaattggtataataaatgcaagagaagaaacattacaagacaaatgtgacttaactgccagaggatgataaaacctacacttgtgggccggaaaggactttaaacggatttcagctgacttatgaaccaacagacaatgtgaggaacattcactgaagagctgatttgttaaagtggtctcaagaatattaattgaggtggatggtaggcagatagttaagaacatttaaaatttccaaccaagaaatatatatttgattctgtggaacatgggagatatctaaagtttagagaacatttcttaagaatgccctgctacctca

SEQ ID NO: 10262 - DNA, 205 bp, Homo sapiens
tcctgaattcctttccctggacagaagtgaccctgtgtgaccttcagctgcagagcagccccctccacacatctgagttgaccctgaacgccccgtgggcagggctcggattcagccttgatgcccaaagcaacaatgccagtgcagcgcccctgcagccgggcacccccctcgtcttccctcgttcctgatcctgtctggctgg

SEQ ID NO: 10263 - DNA, 410 bp, Homo sapiens
gagactttgtctaaccttttgggaaagagaaactctactggggttcctaagctataaagatgacatacgtccaaagctgctgggagtagaatgtgaagaccaatgattcctaccatcatttgagctggattcaaccgaccttgaagttagcaccatacagattttcttgccatataaaccagcaatttaatttcagtcttcccccatccctggaaagggagtatcttaaaccagttcagtttggttttctgtcattactaatgtggttgctattggtggtaatgaaacctggtaggaacaaccacatatcaatgggaacataaaacgtctagcatcttaaagtgccattcaaccttgagattctattattttatgctttctctctagaaataagtaaatccaatattaac

SEQ ID NO: 10264 - DNA, 448 bp, Homo sapiens
tacatcattggaatctccattaagaaatattattctgacctagttctctgtgtcatgctgcagattgtccttctcttgactcatggaatgctttgtgagaaagaactacaaagccgggtccctcgatattagccatctcacccttcaaagttcagccaggagtgggacaaaaccctcgtcaccatgttgacatgtttacttctggcgcaggaaaatactgctgttgcccaatttggtttcccagtccattcacttgcctggagacatatattttatgctttcctttgatgatttacaaataaattaacgtgattcactaaggtctgccagcatatatgcgttactggagaaatctgagatgttgaaaaagtattttaatttattgtatcccaatactttcttaagaaagtttcttaagaaccaaataaatatcatcagctagtttata

SEQ ID NO: 10265 - DNA, 2191 bp, Homo sapiens
tgaaccagtgtggggactgggaagaaaagcactttgagcaaggactcttgggttcgagcaaaggcaattagttgacatgatacttcttaagttcctcagtatgtatatgttacaatcgtttatcagacatcttaatagaatcctaattgaaaaaccagttgccaaaattgcacaagttctgctcgctgatactagctttctccccttaactctaaaataccagggatgcttaaggacgtttgtaatagtttttttaatgctttgtttcacttttttaaaaaagaatctttgaagggaaggaagagcagaaagaagtattttaagaaaaatggagagaagtagatagtattgaaagtatatttcttgaagagagagtatctaagtgctataccaagattttatagggcttcctgttgccaaatgtgatgttgagataatgcacagctaagatggcaaatccatcaattattaactggctctgccacttctgtcatggaatgcaaggattgagaggtgactctggggagaccctgggtgtgtgagagagctccattcatctggccctggatatgtttttcaaacagagagggagaaagcgccagtccctgcaaggtgaactgacctggcactgtttcagtgggagcctcactgcctgccttttccatgctaggagacaaagcatcctctaccccatctgtgaatcggtgctgtggccactgcgagaagcatgattcatgaggtatgatgctcttgagctcccagacaatgtgctgagttaataggttcacttgagatgtatacaccaaggctgtttctttttttaaatctagtccccaatttggagtatttttgcatgtttttgtacagagtaatccattcctctcattgtgtatcttaatctcctctgacttttccattgtctttctcaatcccaccctttgctcttcggatctcaccaaccccccttaaaaaataaatcatgtttgagcaagaaggtagaacacgccctccctcatcttggttttaattgctttggaaacgtgttctaccctgtccagggtttgcataacgtgaattaagtgaatgagatgttctagtattatatcttaacctgataagactatctaagatttctagtatatggtgcatttgctttcctgtgcaaactttggttcagctgccctgcagagaatctcaccattttcctgccagtgccagtataaagaatgcaggagagctaaacctgggtacatgaaggtcagaggggtgaggacggtcgagaaatggggagaagacttgggcttgagacgacctgggcttttcatgtgtagctcactcagcagtatgaggatgactgacacaccagtgggtggtttccaagtgaggcaaatgcccatttcccctctcccctcacaccttgcctggcttcttccatgaagtccttgctgcttttctgcctccccaaaggtgaggggaaggggctggttggggatctgggaaagccagttctctgttctctcctgctggtgatggactaggccttttagaactagcaagatccctcacacagctgggagaacacacacctttcttactccagacccattggtgtgtctccagtaacaaaattattggactcagcctccatatttgacagcaaaagtggccagagggagttgaaatatcttgaagaaaaggaattttcactaagatatgtcctctccctctcccagagtttagctgtttattccttttttttgtttatattgttctcatctgcataaaaccagtctcttgcaataagcctgccgcagaatcaaagtctgtacttcaaaaggtaactgcaccaagggatgggacagtgtgcatcaccctgatctaatcattgtgacgttggtagcttcctaaatactgtatgtaccttgaacaagggttttatttttgttttgttctgttttgctttttgtttttattggtaggctaaggtaattaaattttttaatttgctgttactttggttgtattttctgtactataactgcctacagtatgtcttttgcataaaatgcataagggtttggggatgtaaatggaattttattcatattttgtccaaatacctcttgtaatttgtatcaaaattcttgtacaatttttatattaaagatttatcagtcactgaaaaatctta

SEQ ID NO: 10266 - DNA, 471 bp, Homo sapiens
agcggtagcagcggcagcggcagcttggtcctctgactctcttcggtgacgggtattcttgggtggataatacggattacgttgttattgcttaagaatacgcgtagtcgaggagagtaccagcggcaggggggcagcggccgccctccccagcccaccagctggccactaaacgcccgtggttgccaagcgaagaggaagccaccgccaccacacccctcaagcatgcctgggcactcctggggacaatcggacgtggcaggagttggcatgcccaagatgaagctgggaaggatgacccagagtggaaggcgtgggctggggctccaggtctcagctctcgccagcgtcggaccacacagctttgccagctttgcaccttgcctttccttcttgtgaggcatctgggaccgtcctatcaaggcgcttcaaaggtggaaggacagagtgctggggacaagaacgtaccag

SEQ ID NO: 10267 - DNA, 748 bp, Homo sapiens
gctgggattacaggcacgtgcaaccaagcccggctaatttttgtgtttttagtagagactaggtttcaacatgttaggctgatctcaaactcctgacctcgtgatctgcccgcctcggccttccaaagtgctggggttacagacttgagccactgcacctggccatggggttgtttcttaattagatatagctgaaaagaacgctagaccaaataggttctctgccttgccttttcgtttgttttgttttagctattatcagggaaccaaaaactttaaggagctagtactggtcttaatttttaataactagagatagcagagttagaaactaagttcaaagtgagagaacagctgcatttgtctttctgacctcatgcaattcctaggaaactctgtgttctgtgatttagtcaggcaataaaatgctctcactccttctctgtctctttatttcttccctaaatggaaaagaattgaccaggctgctttgagggataaagatcctgataacgcggctgggtgcggtggctcatgcctgtaatcccagcactttgggaggcgggcagatcacctgaggtcaggagttcaagaccagcctggccaatatggtgaaaccccatctctactaaaaaaaaaaaatgcaaaaattacctgggcgtggtggtgggtgcctgtaatcccagctactcaggaggctgaggcgagagaatcgcttgaacctgggaggtggaggttgcagtgaacc

SEQ ID NO: 10268 - DNA, 478 bp, Homo sapiens
atgactacagccagtgtaggtagaaggagacattctattcttgtattctgtgaaagtttgtttttcttttaaaattgttctaggtgtacctgcacggaatgttctaccaactcttcttccactcctttcccatgactaatgataggctgataattttttagcatcaccagggagcagaataagtgaagtctgttcagattttgaatcaggggatgaatggctcattaacagcctcagccaactctgttaacccccaggaactgatgtgctaagttcagccttacttttccatggcatctctgcttctggctttacatcagggtcctttcctactattctcttttaaccacacagaatccaaattcaatcccaaagttaattattaaatatgtccagtggcacaaatttcagaaaagtttgagtgcctgacaggatgcccaccctcttgcccctccctttctggcctggatgttatgca

SEQ ID NO: 10269 - DNA, 400 bp, Homo sapiens
attcctcattcagcaaacgtgccttaagatgtcagtgacatgccagatgctcataaggtccctgccttcttagagccgatgtttgttctagttggggaaacaaatggtgcacaagtcaacaaataagagaagcaccaattgcactgagtgttgtgaaggcaataagccagtgagccgagagaggccacttttgttttttatagggtggtcattagtgaagcaggaagtgcctggtacatggcagctctagtcagagtcatttccactgagcttcctactgggctgtctgtgaacttcaagcagaaggcttcattcctggtcaaccacagcccccgcagccccgtgtggctcagggagttagctgccatgctggatgttgttgaacgtgctgcacgatctt

SEQ ID NO: 10270 - DNA, 1370 bp, Homo sapiens
gcctcgtgccgggggctgctgaaccttgggaagagtgtgagtgtgaacgtgtgtaaatgtgcgtgtgaaagggagcaccccttcccgacttctagaaacaaaattccttttggggcgctttccctgtgtgtccccagagaggcctctagccaggagccttcagttgggatagtttcatttgtgactttaccaataccctcccagttcttgatagacagctgtaggttgctgggttcaagaatatgggtgggatatggaatgctctttcaatgtctagcttcagttttcattcatcctcctgctcagcactgtcagccaagagcttactcagcagacaccacatactgcagcagttcctagtgagaaaatctgtgccactagaaaatgcttcacttccatttcctcacctgggcagttctctgtttaaaattgtgggctgatttggtcttcctctcctcctcccactgttactgccctgcagcccttgttcaggtgtacagacccttattctggcctctagtgtccttgtctgtcatgacacacccttccgcccaaatacctctgaccccaaggctggaatggggctggtaggagataagtttgcttactcatagtcatgtcctttctcttggcacctgcttccctgcggtgtcctcaaatggatttctgtgtggcagtggagtgattgcatgaatttttctgtaacacattaactttgtattattattaagggagtttgagaaagctttgcttataatgtcaaggcaaggaggtaaaaactggagcccaaagaaattcccttagggcaagattatgttataatagaaaattgaatttcctgaggcagtggctgccaccccttttcagatgtttagtcctgcaaatagcatctttcttgtagtctgtgacatggatggggatgctagggcccttaggggcaaggggactaaactaaatcaagttgagtttttttccagcaggggttaggggaggtactcgctgttgatatttgacactagaaagtaatcttttttacaaaactgtttttctaggtgggtggaaagtgaaactgccacatccttgttggtttagtccaagagatcatttgcaacaacagtagatgtccgggttttgtttctgtctttttattatgaaaaactatgttaagggggaaaatgtggattatggtaaccagaggaatccctagccttgttttccttagaagacttgtttagtgttttatcagacgtctgttgtagttgtagacaggaaagcttgtgagaaaaacaccacatggagcctgtaaatgtttttgcacaacctgtaaagcattcttggaagtggccagtaaaaaggggttttaccattta

SEQ ID NO: 10271 - DNA, 1517 bp, Homo sapiens
gcctcgtgccgggggctgctgaaccttgggaagagtgtgagtgtgaacgtgtgtaaatgtgcgtgtgaaagggagcaccccttcccgacttctagaaacaaaattccttttggggcgctttccctgtgtgtccccagagaggcctctagccaggagccttcagttgggatagtttcatttgtgactttaccaataccctcccagttcttgatagacagctgtaggttgctgggttcaagaatatgggtgggatatggaatgctctttcaatgtctagcttcagttttcattcatcctcctgctcagcactgtcagccaagagcttactcagcagacaccacatactgcagcagttcctagtgagaaaatctgtgccactagaaaatgcttcacttccatttcctcacctgggcagttctctgtttaaaattgtgggctgatttggtcttcctctcctcctcccactgttactgccctgcagcccttgttcaggtgtacagacccttattctggcctctagtgtccttgtctgtcatgacacacccttccgcccaaatacctctgaccccaaggctggaatggggctggtaggagataagtttgcttactcatagtcatgtcctttctcttggcacctgcttccctgcggtgtcctcaaatggatttctgtgtggcagtggagtgattgcatgaatttttctgtaacacattaactttgtattattattaagggagtttgagaaagctttgcttataatgtcaaggcaaggaggtaaaaactggagcccaaagaaattcccttagggcaagattatgttataatagaaaattgaatttcctgaggcagtggctgccaccccttttcagatgtttagtcctgcaaatagcatctttcttgtagtctgtgacatggatggggatgctagggcccttaggggcaaggggactaaactaaatcaagttgagtttttttccagcaggggttaggggaggtactcgctgttgatatttgacactagaaagtaatcttttttacaaaactgtttttctaggtgggtggaaagtgaaactgccacatccttgttggtttagtccaagagatcatttgcaacaacagtagatgtccgggttttgtttctgtctttttattatgaaaaactatgttaagggggaaaatgtggattatggtaaccagaggaatccctagccttgttttccttagaagacttgtttagtgttttatcagacgtctgttgtagttgtagacaggaaagcttgtgagaaaaacaccacatggagcctgtaaatgtttttgcacaacctgtaaagcattcttggaagtggccagtaaaaaggggttttaccatttaaaaaaaaaatgtaactgtgtcattgtttacatctgtaactttttcctcccctgttctcattacaccattctggcgaaaatgtaggcaaagtagcttccagttttagaataaataaccatttggattgaattcaccctaaaaaaagtg

SEQ ID NO: 10272 - DNA, 577 bp, Homo sapiens
aaaagggccttcctagaaaaaaagacaaagactaccaaggatgtatgaagggaagaaagaagtgtgaggaactgtggcactaaggatggcctggtgagcaccaaatgatgtgtagctagaggaatgcaagaggagtgagagaactcagggccgcccacccctaatcagaccaccacccatggccacacaatgttcctttgttgtttcaattacagtgcatagaatttgttttaaaataacacttctgataccaaattttaaatatggtatcatctcaatggtgtaaataatgcattaaaaatgggctggcaggaaatatgccaacctggttactgcctctaggaagagcgggtaggaataatcatctttttgcttcttcattcttttccattttccagttttctgtaactatgtattatcaggggaaaaagcatacttttcaaaatgaatttcatattataggagaaataaagccagttatttcccccaaataatccctggccgaggaggaccctcgagtcaaataaacagatatataaaggattctctgttactgttaagactttctttgcccagc

SEQ ID NO: 10273 - DNA, 520 bp, Homo sapiens
ttttgagacaatctcactctgtcacccaggctggagtgcagtggtgcaatctcggctcactgcaacctccacctccccagttcaagcgattcttgggcctccgcctctggagtagctgggattactggcacacaccagcaccctcgactaaattttgtatgtatgtatgtatttatttattagatggggtttcgctcttgttgcccaggctgagggcaatggcttgatctctgctcacttcaacctccgcctcccaggtcaagcgattctcctgcctcagcctcccgagtagctgggattacagacacctgccaccatgccggcttattttttgtatttttagtagggatagggtttcatcatgttggccaagcaactctcaaactcctgacctcaggcaatccacccgcctcagcctcccaaagtgctgggattacaggtgtgagccactgcgcccagccacacaacctttttctaaatgtgacaatacagtgactgctttataaagctgcctttgaag

SEQ ID NO: 10274 - DNA, 257 bp, Homo sapiens
ttttctctttgtttttgccctgttcaggatttttgttttatttagacattttcagtgctttatatctcacattaccacttttctttcttagtttctttcaattattctttagtttttaattccagtactcagcattattactgaaaatatcttaacctcattcattttctttgtcacccatggtcctttagaagtttattactctcccaggcctctgctttcatcatagtgtataaaagagggctctttgtataatt

SEQ ID NO: 10275 - DNA, 601 bp, Homo sapiens
tgaactgtgcagctggaagcagtgttttccgagaggcagagtggcacgggtttctttggagttagtcagatcgaggtctgagtcttgactttttaactgactaccctgggttacctagggcaagttacctctctgagcctcagcttcctcctctttaaattcggttaaaatggaacctacctaactgcccaaaggaatcgcgattgtgatgcaggtaaaatgctaagcatagcatttggcatagtaagcataatgttaattgttgctgctgtcattatttcagaagacctggtgatcggatgcttccagatcaacaattgattgactccaggtaaatctctcagcctccctgagcctcagtatcctcatctgtaaaatagactactatggtgtggagtaatgagaagtaatctcattacatgtgagtttaattgtgtgttaagagtgctgctaatgcatgctgagcttaatacctaggtgatgggttgataggtgcaataaaccaccacggcatacatttacctacgtaacaaacctgcacattctgcacatgtaccccagaacttaaaataaaaataaaatttttttaaaaaaagagtga

SEQ ID NO: 10276 - DNA, 352 bp, Homo sapiens
tctgtgactctgggttgttgcatttaaagttatcctcattctctagccagagtttccctgtgtgagtccagaacatctcctgaatacaaagaagcagggtttgttactgtctattgcaaccgggagcctgtagtcatcacctcaaagttgcgagggctccatgcagtcccaatgctcttcaccagcgctccagcactgcccgttttcgtgaactatgcacatctaagcagtgtgcatattttatttggacacttgatatttttgtaacccctttttaaaaaaaaatcataaggagcccattagttttaaggcagtcacacaaaatgtattaaataccgaatgcaaagaaccc

SEQ ID NO: 10277 - DNA, 2528 bp, Homo sapiens
gccacgttggattagggcccaccctaatgactcattttaactagatgactctgtaaagactctccaggccatctccaaataagatgccattctgaggtactaagagttaagacctcaacgtgtctttctgggggatactattcaacccatagcacatcccctcatcccccatggaataaccgggtcagaggtggagcaggtaggactgaactagagaatgtgccccttggtgggtggccctttccctaattaaggcacctttctttgggctgagacttctctgcaaagaggggagggggaaaggatagttaaatttgtaagtttcatggcactccaagtcaggttctggggctttctgctcttcctttttctggttatcagatgcagatgctgttgctgcacagatcctgtcactgctgccattgaagttttttccaatcatcgtcattgggatcattgcattgatattagcactggccattggtctgggcatccacttcgactgctcagggaagtacagatgtcgctcatcctttaagtgtatcgagctgatagctcgatgtgacggagtctcggattgcaaagacggggaggacgagtaccgctgtgtccgggtgggtggtcagaatgccgtgctccaggtgttcacagctgcttcgtggaagaccatgtgctccgatgactggaagggtcactacgcaaatgttgcctgtgcccaactgggtttcccaagctatgtgagttcagataacctcagagtgagctcgctggaggggcagttccgggaggagtttgtgtccatcgatcacctcttgccagatgacaaggtgactgcattacaccactcagtatatgtgagggagggatgtgcctctggccacgtggttaccttgcagtgcacagcctgtggtcatagaaggggctacagctcacgcatcgtgggtggaaacatgtccttgctctcgcagtggccctggcaggccagccttcagttccagggctaccacctgtgcgggggctctgtcatcacgcccctgtggatcatcactgctgcacactgtgtttatgacttgtacctccccaagtcatggaccatccaggtgggtctagtttccctgttggacaatccagccccatcccacttggtggagaagattgtctaccacagcaagtacaagccaaagaggctgggcaatgacatcgcccttatgaagctggccgggccactcacgttcaatgaaatgatccagcctgtgtgcctgcccaactctgaagagaacttccccgatggaaaagtgtgctggacgtcaggatggggggccacagaggatggagcaggtgacgcctcccctgtcctgaaccacgcggccgtccctttgatttccaacaagatctgcaaccacagggacgtgtacggtggcatcatctccccctccatgctctgcgcgggctacctgacgggtggcgtggacagctgccagggggacagcggggggcccctggtgtgtcaagagaggaggctgtggaagttagtgggagcgaccagctttggcatcggctgcgcagaggtgaacaagcctggggtgtacacccgtgtcacctccttcctggactggatccacgagcagatggagagagacctaaaaacctgaagaggaaggggacaagtagccacctgagttcctgaggtgatgaagacagcccgatcctcccctggactcccgtgtaggaacctgcacacgagcagacacccttggagctctgagttccggcaccagtagcaggcccgaaagaggcacccttccatctgattccagcacaaccttcaagctgctttttgttttttgtttttttgaggtggagtctcgctctgttgcccaggctggagtgcagtggcgaaatccctgctcactgcagcctccgcttccctggttcaagcgattctcttgcctcagcttccccagtagctgggaccacaggtgcccgccaccacacccaactaatttttgtatttttagtagagacagggtttcaccatgttggccaggctgctctcaaacccctgacctcaaatgatgtgcctgcttcagcctcccacagtgctgggattacaggcatgggccaccacgcctagcctcacgctcctttctgatcttcactaagaacaaaagaagcagcaacttgcaagggcggcctttcccactggtccatctggttttctctccaggggtcttgcaaaattcctgacgagataagcagttatgtgacctcacgtgcaaagccaccaacagccactcagaaaagacgcaccagcccagaagtgcagaactgcagtcactgcacgttttcatctctagggaccagaaccaaacccaccctttctacttccaagacttattttcacatgtggggaggttaatctaggaatgactcgtttaaggcctattttcatgatttctttgtagcatttggtgcttgacgtattattgtcctttgattccaaataatatgtttccttccctcattgt

SEQ ID NO: 10278 - DNA, 2109 bp, Homo sapiens
gcagggggacagttgttagtgttgcactctgaaagagctgttggttaattcctgccttcctcccttttcccagtccacttcgactgctcagggaagtacagatgtcgctcatcctttaagtgtatcgagctgatagctcgatgtgacggagtctcggattgcaaagacggggaggacgagtaccgctgtgtccgggtgggtggtcagaatgccgtgctccaggtgttcacagctgcttcgtggaagaccatgtgctccgatgactggaagggtcactacgcaaatgttgcctgtgcccaactgggtttcccaagctatgtgagttcagataacctcagagtgagctcgctggaggggcagttccgggaggagtttgtgtccatcgatcacctcttgccagatgacaaggtgactgcattacaccactcagtatatgtgagggagggatgtgcctctggccacgtggttaccttgcagtgcacagcctgtggtcatagaaggggctacagctcacgcatcgtgggtggaaacatgtccttgctctcgcagtggccctggcaggccagccttcagttccagggctaccacctgtgcgggggctctgtcatcacgcccctgtggatcatcactgctgcacactgtgtttatgacttgtacctccccaagtcatggaccatccaggtgggtctagtttccctgttggacaatccagccccatcccacttggtggagaagattgtctaccacagcaagtacaagccaaagaggctgggcaatgacatcgcccttatgaagctggccgggccactcacgttcaatgaaatgatccagcctgtgtgcctgcccaactctgaagagaacttccccgatggaaaagtgtgctggacgtcaggatggggggccacagaggatggagcaggtgacgcctcccctgtcctgaaccacgcggccgtccctttgatttccaacaagatctgcaaccacagggacgtgtacggtggcatcatctccccctccatgctctgcgcgggctacctgacgggtggcgtggacagctgccagggggacagcggggggcccctggtgtgtcaagagaggaggctgtggaagttagtgggagcgaccagctttggcatcggctgcgcagaggtgaacaagcctggggtgtacacccgtgtcacctccttcctggactggatccacgagcagatggagagagacctaaaaacctgaagaggaaggggacaagtagccacctgagttcctgaggtgatgaagacagcccgatcctcccctggactcccgtgtaggaacctgcacacgagcagacacccttggagctctgagttccggcaccagtagcaggcccgaaagaggcacccttccatctgattccagcacaaccttcaagctgctttttgttttttgtttttttgaggtggagtctcgctctgttgcccaggctggagtgcagtggcgaaatccctgctcactgcagcctccgcttccctggttcaagcgattctcttgcctcagcttccccagtagctgggaccacaggtgcccgccaccacacccaactaatttttgtatttttagtagagacagggtttcaccatgttggccaggctgctctcaaacccctgacctcaaatgatgtgcctgcttcagcctcccacagtgctgggattacaggcatgggccaccacgcctagcctcacgctcctttctgatcttcactaagaacaaaagaagcagcaacttgcaagggcggcctttcccactggtccatctggttttctctccaggggtcttgcaaaattcctgacgagataagcagttatgtgacctcacgtgcaaagccaccaacagccactcagaaaagacgcaccagcccagaagtgcagaactgcagtcactgcacgttttcatctctagggaccagaaccaaacccaccctttctacttccaagacttattttcacatgtggggaggttaatctaggaatgactcgtttaaggcctattttcatgatttctttgtagcatttggtgcttgacgtattattgtcctttgattccaaataatatgtttccttccctcattgt

SEQ ID NO: 10279 - DNA, 1936 bp, Homo sapiens
gccactccccactttgctatgtgggggaaggaccgggcaccggacggctcgggtactttcgttcttaattaggtcatgcccgtgtgagccaggaaagggctgtgtttatgggaagccagtaacactgtggcctactatctcttccgtggtgccatctacatttttgggactcgggaattatgaggtagaggtggaggcggagccggatgtcagaggtcctgaaatagtcaccatgggggaaaatgatccgcctgctgttgaagcccccttctcattccgatcgctttttggccttgatgatttgaaaataagtcctgttgcaccagatgcagatgctgttgctgcacagatcctgtcactgctgccattgaagttttttccaatcatcgtcattgggatcattgcattgatattagcactggccattggtctgggcatccacttcgactgctcagggaagtacagatgtcgctcatcctttaagtgtatcgagctgatagctcgatgtgacggagtctcggattgcaaagacggggaggacgagtaccgctgtgtccgggtgggtggtcagaatgccgtgctccaggtgttcacagctgcttcgtggaagaccatgtgctccgatgactggaagggtcactacgcaaatgttgcctgtgcccaactgggtttcccaagctatgtgagttcagataacctcagagtgagctcgctggaggggcagttccgggaggagtttgtgtccatcgatcacctcttgccagatgacaaggtgactgcattacaccactcagtatatgtgagggagggatgtgcctctggccacgtggttaccttgcagtgcacagcctgtggtcatagaaggggctacagctcacgcatcgtgggtggaaacatgtccttgctctcgcagtggccctggcaggccagccttcagttccagggctaccacctgtgcgggggctctgtcatcacgcccctgtggatcatcactgctgcacactgtgtttatgacttgtacctccccaagtcatggaccatccaggtgggtctagtttccctgttggacaatccagccccatcccacttggtggagaagattgtctaccacagcaagtacaagccaaagaggctgggcaatgacatcgcccttatgaagctggccgggccactcacgttcaatgaaatgatccagcctgtgtgcctgcccaactctgaagagaacttccccgatggaaaagtgtgctggacgtcaggatggggggccacagaggatggagcaggtgacgcctcccctgtcctgaaccacgcggccgtccctttgatttccaacaagatctgcaaccacagggacgtgtacggtggcatcatctccccctccatgctctgcgcgggctacctgacgggtggcgtggacagctgccagggggacagcggggggcccctggtgtgtcaagagaggaggctgtggaagttagtgggagcgaccagctttggcatcggctgcgcagaggtgaacaagcctggggtgtacacccgtgtcacctccttcctttctgatcttcactaagaacaaaagaagcagcaacttgcaagggcggcctttcccactggtccatctggttttctctccaggggtcttgcaaaattcctgacgagataagcagttatgtgacctcacgtgcaaagccaccaacagccactcagaaaagacgcaccagcccagaagtgcagaactgcagtcactgcacgttttcatctctagggaccagaaccaaacccaccctttctacttccaagacttattttcacatgtggggaggttaatctaggaatgactcgtttaaggcctattttcatgatttctttgtagcatttggtgcttgacgtattattgtcctttgattccaaataatatgtttccttccctcattgt

SEQ ID NO: 10280 - DNA, 2473 bp, Homo sapiens
gccactccccactttgctatgtgggggaaggaccgggcaccggacggctcgggtactttcgttcttaattaggtcatgcccgtgtgagccaggaaagggctgtgtttatgggaagccagtaacactgtggcctactatctcttccgtggtgccatctacatttttgggactcgggaattatgaggtagaggtggaggcggagccggatgtcagaggtcctgaaatagtcaccatgggggaaaatgatccgcctgctgttgaagcccccttctcattccgatcgctttttggccttgatgatttgaaaataagtcctgttgcaccagatgcagatgctgttgctgcacagatcctgtcactgctgccattgaagttttttccaatcatcgtcattgggatcattgcattgatattagcactggccattggtctgggcatccacttcgactgctcagggaagtacagatgtcgctcatcctttaagtgtatcgagctgatagctcgatgtgacggagtctcggattgcaaagacggggaggacgagtaccgctgtgtccgggtgggtggtcagaatgccgtgctccaggtgttcacagctgcttcgtggaagaccatgtgctccgatgactggaagggtcactacgcaaatgttgcctgtgcccaactgggtttcccaagctatgtgagttcagataacctcagagtgagctcgctggaggggcagttccgggaggagtttgtgtccatcgatcacctcttgccagatgacaaggtgactgcattacaccactcagtatatgtgagggagggatgtgcctctggccacgtggttaccttgcagtgcacagcctgtggtcatagaaggggctacagctcacgcatcgtgggtggaaacatgtccttgctctcgcagtggccctggcaggccagccttcagttccagggctaccacctgtgcgggggctctgtcatcacgcccctgtggatcatcactgctgcacactgtgtttatgacttgtacctccccaagtcatggaccatccaggtgggtctagtttccctgttggacaatccagccccatcccacttggtggagaagattgtctaccacagcaagtacaagccaaagaggctgggcaatgacatcgcccttatgaagctggccgggccactcacgttcaatgaaatgatccagcctgtgtgcctgcccaactctgaagagaacttccccgatggaaaagtgtgctggacgtcaggatggggggccacagaggatggagcaggtgacgcctcccctgtcctgaaccacgcggccgtccctttgatttccaacaagatctgcaaccacagggacgtgtacggtggcatcatctccccctccatgctctgcgcgggctacctgacgggtggcgtggacagctgccagggggacagcggggggcccctggtgtgtcaagagaggaggctgtggaagttagtgggagcgaccagctttggcatcggctgcgcagaggtgaacaagcctggggtgtacacccgtgtcacctccttcctggactggatccacgagcagatggagagagacctaaaaacctgaagaggaaggggacaagtagccacctgagttcctgaggtgatgaagacagcccgatcctcccctggactcccgtgtaggaacctgcacacgagcagacacccttggagctctgagttccggcaccagtagcaggcccgaaagaggcacccttccatctgattccagcacaaccttcaagctgctttttgttttttgtttttttgaggtggagtctcgctctgttgcccaggctggagtgcagtggcgaaatccctgctcactgcagcctccgcttccctggttcaagcgattctcttgcctcagcttccccagtagctgggaccacaggtgcccgccaccacacccaactaatttttgtatttttagtagagacagggtttcaccatgttggccaggctgctctcaaacccctgacctcaaatgatgtgcctgcttcagcctcccacagtgctgggattacaggcatgggccaccacgcctagcctcacgctcctttctgatcttcactaagaacaaaagaagcagcaacttgcaagggcggcctttcccactggtccatctggttttctctccaggggtcttgcaaaattcctgacgagataagcagttatgtgacctcacgtgcaaagccaccaacagccactcagaaaagacgcaccagcccagaagtgcagaactgcagtcactgcacgttttcatctctagggaccagaaccaaacccaccctttctacttccaagacttattttcacatgtggggaggttaatctaggaatgactcgtttaaggcctattttcatgatttctttgtagcatttggtgcttgacgtattattgtcctttgattccaaataatatgtttccttccctcattgt

SEQ ID NO: 10281 - DNA, 1380 bp, Homo sapiens
gccactccccactttgctatgtgggggaaggaccgggcaccggacggctcgggtactttcgttcttaattaggtcatgcccgtgtgagccaggaaagggctgtgtttatgggaagccagtaacactgtggcctactatctcttccgtggtgccatctacatttttgggactcgggaattatgaggtagaggtggaggcggagccggatgtcagaggtcctgaaatagtcaccatgggggaaaatgatccgcctgctgttgaagcccccttctcattccgatcgctttttggccttgatgatttgaaaataagtcctgttgcaccagatgcagatgctgttgctgcacagatcctgtcactgctgccattgaagttttttccaatcatcgtcattgggatcattgcattgatattagcactggccattggtctgggcatccacttcgactgctcagggaagtacagatgtcgctcatcctttaagtgtatcgagctgatagctcgatgtgacggagtctcggattgcaaagacggggaggacgagtaccgctgtgtccgggtgggtggtcagaatgccgtgctccaggtgttcacagctgcttcgtggaagaccatgtgctccgatgactggaagggtcactacgcaaatgttgcctgtgcccaactgggtttcccaagctatgtgagttcagataacctcagagtgagctcgctggaggggcagttccgggaggagtttgtgtccatcgatcacctcttgccagatgacaaggtgactgcattacaccactcagtatatgtgagggagggatgtgcctctggccacgtggttaccttgcagtgcacagcctgtggtcatagaaggggctacagctcacgcatcgtgggtggaaacatgtccttgctctcgcagtggccctggcaggccagccttcagttccagggctaccacctgtgcgggggctctgtcatcacgcccctgtggatcatcactgctgcacactgtgtttatgacttgtacctccccaagtcatggaccatccaggtgggtctagtttccctgttggacaatccagccccatcccacttggtggagaagattgtctaccacagcaagtacaagccaaagaggctgggcaatgacatcgcccttatgaagctggccgggccactcacgttcaatggtacatctgggtctctatgtggttctgcagctcttcctttgtttcaagaggatttgcaattgctcattgaagcattcttatgatggctgctttataatccttgtcagatattaataattccaactcctgattcatgttggtgttggcatcagttgattatcttttctcattaaaattgtgatgctcctaaatcttg

SEQ ID NO: 10282 - DNA, 326 bp, Homo sapiens
gcctcggcctcccagagtgccgggattacaggcgtgagccaccgcgcccagcacctagtgtaagacttgacaccttctttatggtaacttttgattaatatgttatcttttctttttcttttagagacagaatctagttctgtcacccaggctagagtgcagtggtgatcagggctcactgcagcctctacctcccatgctcaagtgatcctcccatctcagcctcctgtgtggctgcgaccacaggcgtgcatcaccacacttggctatttttaaaattttttgtagagatgaggtctcactatgttgcccaggctggtcttgaa

SEQ ID NO: 10283 - DNA, 1633 bp, Homo sapiens
  misc_feature (18)..(18): n is a, c, g, or t
  misc_feature (97)..(97): n is a, c, g, or t
  misc_feature (113)..(113): n is a, c, g, or t
  misc_feature (120)..(120): n is a, c, g, or t
  misc_feature (377)..(377): n is a, c, g, or t
  misc_feature (432)..(432): n is a, c, g, or t
  misc_feature (477)..(477): n is a, c, g, or t
  misc_feature (487)..(487): n is a, c, g, or t
  misc_feature (750)..(750): n is a, c, g, or t
  misc_feature (855)..(855): n is a, c, g, or t
agcaagtcaaggggaccntcccctcccgctcctcccacactgcacagcgggttccagccagggcagtgaggcaagaacatggaactcaaatcaccgngattagcaaaaaagangtagaantacgcctcacgccgtaggtggaatcgcctaaggaatctacaaagataaaataaaatgaagtaaaacctgataagatgatcgaaggagtttaacaagatcatggggcgtaggatatttctgcactgacagtgaacaccccaagatgaaatgcagaaagcgtcctggtcaaatagcatcagaaagaataagctacttaggaataatttcgcaaaggaagtgtgagacttgtacgctgcaaactgcgaaacatggctggnaaaaagacccaaagaaaacctgaacagatggagagacttcccacatcgaggctgnaaggctgaaccctgcgcagacggcggggctcccgcggtgctccgngtggccttcntccccctctggccgtgttccctccccggctcagagccactcctcctagttaccaccctcggccctccctctgcaagcccaggatgcccgggccacaggccggtgagctggggatccagcctctcctggcgttttacccacgtaggtgacaactgacggcactggagcagagaggctgactgcccgaggagaccagggaggcttggaccccaggctggagggggccggggacccagacccactcacttgatttggaaggacacngggctgtcaaacctatgcagggtcatcacacccggcccttcgtttgtcccttttcggccaagctcaggaccctgtaacccaggaagacaagctcgtggttctganatgacccagggaattggccaatcccacccgaaacccttgttccttcctctggtcattgacgttcctcccagacggcttcgagagccccgcagatccttccactactccccagcctagaagatccagggacagaagccctcgaggttctggctgggcccacgtgctgagatgcctctgagaaagctgtctttccatggtggatcccgctggatgcccgtgaacacggggccagcttgcagagagctggaaggaggcctcctggcggcacccaggcctgacacagatttcatttctgattgcggaattttactctcaaaccaaaagatgttacatgccgctcctgacgccgtggcacggaatcacgccgcgtgtcccttgtttccggatttctcttctgtggcttattgatggcactcaagcaccacacagcaatgacgtctgtcctggcagggcacacgcactctgcgtctgaacgagtattgagctaattccaaagcccagcagagacgtgggcgcgcgtttatctggaggagaccaggcgcgccatggttggctctggccgcgggaccctgggctgagcaccgacccaggccaccccaagtcaccaaaagagggtagggaggggtggacaaaagtatttattttgcctattttcttgccagtgtccagattcaaatgtactgtttttaaactacattagcactttctgccctgtggcctgcaatgattgtgctgtgattattcaacaccataaataataatgcagcatttcaccatc

SEQ ID NO: 10284 - DNA, 1523 bp, Homo sapiens
  misc_feature (122)..(122): n is a, c, g, or t
cggccctctggcaagatggctgctgcggaggcgttggagcgcggaaatctggaaccgggatggcgacgtctacactgagtcggaggcgaagaatcctaacttagctcttcgtagctcttagnacacggtccgtgtggttgctgtctgatgggatgtcatgattcagcataaaatgggacagaagccctcgaggttctggctgggcccacgtgctgagatgcctctgagaaagctgtctttccatggtggatcccgctggatgcccgtgaacacggggccagcttgcagagagctggaaggaggcctcctggcggcacccaggcctgacacaggatggcacagcagatgcaaccgtgggcctggggcctggggttcctggttggtggccaggagaggcggccagaagactccatggctcccagggcccagtcgcagctgagaggctccccgtcacgatggccaatagccctttctccagggacaaggatggggtgatggcacaacatgtgtgggtcgagcacacctacccatgtgcacacatgggtgtgcatgtcctgctggtggctgacccgtgaccctgcatgcgtgtcctgctggtggctgacccgtgaccctgcatgcgtgtcctgctggtggctgacccgtgaccctgcatgcgtgtcctccgggtggctgacccgtgaccctgcatgcgtgtcctgctggtggctgacccgtgaccctgcatgcgtgtcctgcgggtggctgacccgtgaccctgcatgcgtgtcctgcgggtggctgacccgtgaccctgcatgcgtgtcctgcgggtggctgacccgtgaccctgcatgcgtgtcctgctggtggctgacccgtgaccttgcatgcgtgtcctgcgggtgggtgacctgtgaccctacaagcatgtcctgctcacgggcacaccgtctgcctgtgcacaggcctctgcctgcccacctggcggagtcctgcctggatgctttagcgtctccagcctctgtgcgctttgcttctttgctcggatttcatttctgattgcggaattttactctcaaaccaaaagatgttacatgccgctcctgacgccgtggcacggaatcacgccgcgtgtcccttgtttccggatttctcttctgtggcttattgatggcactcaagcaccacacagcaatgacgtctgtcctggcagggcacacgcactctgcgtctgaacgagtattgagctaattccaaagcccagcagagacgtgggcgcgcgtttatctggaggagaccaggcgcgccatggttggctctggccgcgggaccctgggctgagcaccgacccaggccaccccaagtcaccaaaagagggtagggaggggtggacaaaagtatttattttgcctattttcttgccagtgtccagattcaaatgtactgtttttaaactacattagcactttctgccctgtggcctgcaatgattgtgctgtgattattcaacaccataaataataatgcagcatttcaccatc

SEQ ID NO: 10285 - DNA, 488 bp, Homo sapiens
gggacatttcatttcaagagtgtgtcttgttgaggtggggcagaagggtttggtggttttatcagactgtttaaccataaaacgtttttcatccctgtgttcctgtgccccaccatttcaggcacttggtatttttactgcctcacccccatcaacagagaaaaggtggatttgatgtcatttattatatactttaaagtaattttattttgctgaatttgtaaatacatgcaaatgaaatattttagagctacaaaaacaaccatggccagatatgtatgaacgaggtctttcccagtccccctctgggttttgcacagatttattctgagggtcccttagtccaaactgggggatccgcagacaaagagatcaatatttttctcttctaaattcaaaaggcaaggtgcaggtatgagacattaaagtttgaaagaagacgctactgggaacatttttttccttctactccacccctatccagaata

SEQ ID NO: 10286 - DNA, 405 bp, Homo sapiens
tggccttcagtggagattttctttgaggcacagtgtcatgcagtggttaggggtggtgcgcaaagtaatacaccttgcaagttaggcccaggtcccccacttcctcagagagggaggagggataatcttgagacacatggtctttctgagtccatctcctctcaggcagaatggacctcccaggaaaactctcctcataggaggtatcccttaaccttaggcctgtaaagccgtatcttggtccttgcctcacggtgagcagcacatgtcagctcctgctgttgttccttcattgtgcgtcacagtggttgggcagtgagacccctgcaacctgactggcacttcctagccaagagcctcaggtggattgggagccaaatgctagcatcccaggtacagggtagc

SEQ ID NO: 10287 - DNA, 1009 bp, Homo sapiens
tctctgtcaaatttcccaacattgctgttgtagagtgtaagcagccatagacaattggcaaacaaatggatgtgactgtcttccagtcaaactttatttagtgaaacagacagcaggctagaatttgccaacctgtgcactcaaactatctgttgtgaggactcttccccccttttcccttaaaatttgtagatggacatttttgtaaaatacaataaaagtgaattattggatgagtaaaaaatacatggttaaaatttttagattacagacaacaagttacatttcaatctataatttaaatggtcatacatagggaaaaagaaaacaattagaagaaccataaatgttgttacttgaagatatcttctattaatatagagaatcgctgctatagtcataacttttttgtcattctgtaatactaactaaacacaaagccaagcaaaattgcagctctccatttattaaatgcccatactgtaaacaaacattgtatatatggatatttaacaattttaatatgacatagatttgctttttgctattagtttatctaatctaggttggattgacgacagtactactcacaagagataacgtatttgtatactactcctatattttgttttaacaacactcagtttagagaaaccagatttaaaaatatgttgctgggaactgaagacatttagatttaaaagaaattttagcaagctcaggatattcatgtctaacttttttccaaggtgaagcaagtgatttttttcagaattcattttctatctttcattagtagtcaattccaataatttatcctgtggaattacagttaaatttaaattatctctcaatgaataggttgtagatccacacatttcttttgtatgaatcttcttttggtggaaaaaatttgaaaatgtttttatcaaatttgtaaggttagtgataatttttcaacaaatataccatacctgattatacctacttcattgaaaattatggacca

SEQ ID NO: 10288 - DNA, 1360 bp, Homo sapiens
ctataagtgggcttgagctcgaccgcgcgcctgtggaagttctttctctactcgaaaaagggaaagcatttccttgagtttgcgttttaagggaaacttacagcattgacactttatttaaaatattcactactgctgtagaaaaaaaaaaaacaaaaccccgaaaaacagtggggctgtttctaagacgctgggaatcagtaaagaatagtgatccgggagatacaggaagcaaatgatctgcgctcaaaaagcgagctgctttcaaagatattagtattttatagatgcgatgcaggagagtgaactcaagcagagcccagccgattgcctgcgttggcaaaatagaacagatattctggggagaccaagcaaacagctttcaaaaatgaagactaactaggctggatgcagtggctcacacctataatcccagcactttggaaggccgaggtgggcagatcacgaggtcaggagatcaagaccatcctggctaacacagtgaaatcccccgtctccactagaaatacaaaaattagccaggcgtggtggcgggcacctgtagtcccagctactcgggaggctgaggcgggagaatggcatgagcctgggaggtggaggttgcagtgagccaagatcgtgccactgcactccagcctgggtgacagagcaagactgtctcaaaaaataaataaaaataaaaaagaaggctaactaaagacattcttaaacacacaaaaatggaaggaaattttcagcataagatcccacatgaaacaagaagttcttcaggcagaatgaaaatggcattagcttcaaatctgaatgtatacaaaggagtgaaatgtggtcctggctacttaggagtctgaggtgggaagatcacttgagcccagttcaaagctgtgatgagttggtcatgccattgcacttcagcctgggtaacaaagtgagaccctatctttaaaggaaaaaaaattgtgatgtgggttttataacatatgtaaaagtaaaatgtagcacaaagtgtgggagagaagaaataaaagtaaatttatatgcttgtatagtttctctgaagttttgttatcagttgaaggtgaactgatgagttaaaactgtgttctagactctctgaagcaatagtgccaacacactttagaagggctaccagtgagtcatttccttgtgtgatttctttctttctagtgcagatagaaattgtgaccaatagaatacaataaaggtgatgggatgtcattctattgattaggttgcttgttaggcagaggggatagcatgccactctcatgcctccatttccatgtatagcagaagcttagcagactgcacaaaaaaa

SEQ ID NO: 10289 - DNA, 460 bp, Homo sapiens
tttttacaagagacataaacaaagctatgtatgtgagtgaaaaactggaagcaggaactgtttttattaacacatacaacaagacagatgtggcggccccatttggcggagttaaacaatctggctttggaaaagacttaggtgaggaagctctaaatgaatatctcaaaaccaagacggtgacactggaatattagagcaacaccatcatcaggaaagccttgacagacagccctttacaactctggacacacttaagaagattgggtgtgttgaggcaggaggtgtcagccacaaaccaaaaaatacacagatggaccatgaagagggccaggccatgttaaagcatttacacatgtgcctgagtattttctaatacaccttccagtgatttggagttgttgcattttgactatgttgtatatcatacgtatttctaaaataccaagctgtttctccc

SEQ ID NO: 10290 - DNA, 477 bp, Homo sapiens
actgggtaacaacttttgaataattttattcccttgttagatctttgctatggcccaagaactctaggaatatttacaaaaataaaggatctttcttacctttcaaaaatgatccatggtgcagtttgaagagttgtggctagaatgagcttcatgatgtcccttaacatttttattcatcataatatgttcaaggcttaatgagatctggcacatggtagatatataatcagtgttttaaaaatgagtaatgagggtcaggcacggctgtaatctcaacactttgggaggccaaggtgggcggatcatgaggtcaagagatcaagaccatcctggccaacatggtgaaaccctacctgtaccaaaaatacaaaaattagctgggcctggtggcacatgcctgtagtcccagctacttgggagtttgaggcaggagaaccgcttgaacctgggaggctgaggttgcagtgagccgag

SEQ ID NO: 10291 - DNA, 960 bp, Homo sapiens
  misc_feature (505)..(505): n is a, c, g, or t
gtcaggacagctgtgagccagccaggggcaagcgtagacggggttttaccatgttggctaggcgggtcttgaactcctgacctcaagcgattcccctgcctcgacctcccaaagtgctaggattataggcacgagccaccgcccccagcccaagatatgttttagtaagccgccagttggatcatctgtaagcaactcactagaagcttccagcatcctccacaaatttgacaactgagaaatgtggctgggaaatcatgatttgggtccgaagaagtgaaagcaacaatcctcaggttgttgtttcttgagagaagaaggtaaacagcaggaattcggctgaggtgtccaaatctcggggaggatgaattctcaggagagctgaacctgagacaaagccctttgtcctgggctggaaggatcctggaaaggttatctggtccctgactcagggaagggaggcattctccctgcaggaatgttctcgatcacagtccaccaccanccccctacccccgcccacttttggagtccatcttcgcagcccttgatgattcattttatgtcagcttgacgggctaagggatgctcagatagctgggaaaacgtgatttctgggtggctctgggaagagactggcatctgaaccgggggactgagtaaagaagatccctcctcgccaggttggggcaccatcactccaatctgttgaaaagcccggacagaacaaagagacaagaggcagaggcaaggcaaaaccctccctctgcaagagctgggacatccaaggctgggcgcgggtggctcacgccctgtaatcccagcacttgggaggccgaggcaggtggatcaccctgagctcaagagtttgagaccaggcaacatggggaaaacccatctctactaacaatacacaatgaccgggcgtggttgggcacacactacaagtccccctaattc

SEQ ID NO: 10292 - DNA, 816 bp, Homo sapiens
attctataattgttttgtcacattaattgaacaatgagagggcaccagcattcctcactcatgaggtagaagcaccacatctacatttctttttagctatgggtgatgtttttgcttttaaatcttagaaatctgttaataaacaaataacacaacaaagtttggggtacttccttgtggggactgggatgcttaagctaaaacaaagtttaaatttggactgtgtgtgttatgtttcgcagaatctatatgtttctcaaaagtgggtgtcaccctccttcctcccccaacacacccttcaggggtaagaggagaagtaatgtagaaaaattaactgtttctccactgtaaaagtagggtgtctttagaatgtttcatgttcaaaggaaagattgtgcttctcccaaggcaaggtgttcccttaaaaaaaaaaaaaaaaaggttgagcatgtctttgtattgctgtctctggaagaggaaatgaggcatctcttggggtgagaacaagggagaattgaactctcgggcctggccagatggattcctcacactggcacagagctgtgaagggaagggcctttcatcctccagaggaaagagggctggggtctcagaggccagagcatagggacaggcaggagtcctgcagccctgatgcctgcccctcccagtacagaatctctgtcctgacccccacctgttgaacctttcaaatcccagtgactcgccagctttctctgtggatattggctgaattggtggcttgtgtggctgcctgggagagcaatttacccctgagccaaggagggggtgggc

SEQ ID NO: 10293 - DNA, 403 bp, Homo sapiens
taatccataaatgtagacatcacttcccacctttcgtatttgggatcattacagcttggagaagttcagtgaatttacccatggtcatacggtgacaaaactaatattagaaccaaatttgattttctccaaagcctgctttttaaaaatatactacctacatatttttctcttcagatccctataggaacatgtatttttactgcttcatggttcaaaaagttttttatttggaataaattaaaataactcgggtttagtgcttcctggttcacccaatttattaacatttacttcatgaatgtttgattagtaattactaaaataattttaatatttctctaacatcaagccagaaagaggattcttagtgggttctcccatcctatccatcatttttttc

SEQ ID NO: 10294 - DNA, 420 bp, Homo sapiens
gttcaaattagccaggtgcagtggctcatgcttgaagtcccagctacttggagagctgaggtgggatactcacttgagcccaggagtttgaggctgcagtgagctataatcatgccactgcgctctatcctgggcaacagagcgaggccccgtctctaaaaagaaaatgggctgggcacggtgactcacacctgtaatcctaacactttgggtggctgaggtgggaggatcacttgatcccaggagtttgagaccagcctgggcaacatggcaaaaccctgtctctacgaaaaatacaaaaaactggctaggcatggtgacatgtacctgtggttccagctatctagctatccgggaggtggaggcagaaggatcacctgagcccaggaggttgagactgcagtgatccatgatcacgcc

SEQ ID NO: 10295 - DNA, 170 bp, Homo sapiens
tacagggaaaaataataaacaaggaaatattttttcaagtcccccaaactattctgaaagcagccaggtttgagaacaggcattctcggtaacagccagcagaaatataaactgaaattgcccttcttgttgggagttcagggaggagatggcaatttgagtcaaaacta

SEQ ID NO: 10296 - DNA, 339 bp, Homo sapiens
tgtttaagctactcccagtcaatttcaaataaacagtagcagagttcgtttaagacgactgccattgctaacacagctgaatgaaatcagaggtctctttgtgggctcccagtagatccaggccctgtaggaccagttcacttgtccactgtagctaaatagatcatacaaaagggccaaatgaacagatctaccagataggaatatgatgaagtggcctgtggagaccgctgccacagtcactgtgtcatgccttctgtataccccagcccaattttaaaggagctttgcaagctgactcatctcacagtattgctgtgtttaatcataattggtctc

SEQ ID NO: 10297 - DNA, 322 bp, Homo sapiens
gcatttcaagatggtgacagcaaagcatcaaaccaagcatggggcccatctgagcaagggccctgtgtgactgcatggggtgcacactcatgaagccaggcttctgtccatcaactgtgtttttacaaccactccacgtgattccgtgcccactcaagtgtgaaaactacttcattaactctttttcattttaaaagtaatacctgtttgttaaagaaaccaggaaatacagatacatgcaaagaaggaaatgaaaaggaaagagaaccacaaatgatctcactacttagagataaataaactgttaactcttcatcataaa

SEQ ID NO: 10298 - DNA, 329 bp, Homo sapiens
tgtaatcccagctactcaagaggctgaggcaggagaatcgcttaaacctgggagacggaggctgaagtgagctgagatcgtgccactgcactccatcctgggtgacagagtgaaattcatctcaaaaaattaaagtaataatagtaataatacataaatattctagcattagtatcatctcatctcatcagaactcttcaaaatatttgtatgtactgcagctcaattagaggtggtctctgactttcatcagcttctccctgggctccatgacactggcctggagtgactcattgctctggttggttgagagagctcctttgccaaca

SEQ ID NO: 10299 - DNA, 471 bp, Homo sapiens
aattttcaccaacctgggcaacacggtgaaaccctgtctctactaaaaagtacaaaaagtagccgagtgtggtggcgagcacctgtagtcccggttactcaggaggctgaagtgagataattgcttgaacctgggaggcagacgttgtgatgagccgagatcacgccactacactctagcctggtcgatagagtgagaccctgtctcagaaaaagaaaaaagaagaattttcatagtcgttttatcataatagcacaaactgaaaatagcccaaatacccatcgataggagaataaataaataagtcgtaatatactgtgtaatgctaaacagcaactaacgagcactgctgctttgggccaggcatagtggctcatgcctgtaatcccagctctttgggaggccgaggcaagtgtatcacttgagatcaggagttcgagactagcctggtcaacatggtgaaaccctgtc

SEQ ID NO: 10300 - DNA, 601 bp, Homo sapiens
aaactgcttaggctatttttacacctacccaggttcaatcagtacctgttggctcatcttctttactgctggccacctcgctgtagctgcaacttggaaagaagcatgtcaatactacttgtttgggtagcctcctttgttcctattattgaaaatgaatgagtgaggggaagaatttaacccagaaatacagctcttgcttgtgacttttgttgtactgtgctcttcatgaggagccctggcgaactgataccagagtaactcacagactcagctgcttgagaacacagccatagtctcctcatcttatccccagcaccctacacagagcctggaccacagcagatgccccagctttgaaccaagcaactgaggcttatcctaggagatgcacacagacagatgcatgtgtgataagtgtcttttgagggccgattctatgcttggccctgagaatgctgctctggagaacaggaggcccaagttcacagcaaagcagaacatagggtgaactgagtcctaaatctcctccttgattttttttttttttaagagtctcactctccagcctgggtgacacagtgagacttggtctcggttc

SEQ ID NO: 10301 - DNA, 652 bp, Homo sapiens
aaactgcttaggctatttttacacctacccaggttcaatcagtacctgttggctcatcttctttactgctggccacctcgctgtagctgcaacttggaaagaagcatgtcaatactacttgtttgggtagcctcctttgttcctattattgaaaatgaatgagtgaggggaagaatttaacccagaaatacagctcttgcttgtgacttttgttgtactgtgctcttcatgaggagccctggcgaactgataccagagtaactcacagactcagctgcttgagaacacagccatagtctcctcatcttatccccagcaccctacacagagcctggaccacagcagatgccccagctttgaaccaagcaactgaggcttatcctaggagatgcacacagacagatgcatgtgtgataagtgtcttttgagggccgattctatgcttggccctgagaatgctgctctggagaacaggagaatcgcttgaatccgggaggtggaggttgcggtgagccaagatcgtgccattgtactacagcctgggcatcagagcgagactctgcctcgaggaaaaaaaaaaagaaaaagaaaattagagggtgaggcctgtttataaccctaaatgactgaccatatgagacagtgaaaaact

SEQ ID NO: 10302 - DNA, 658 bp, Homo sapiens
gatgcactgcttaaaactcaagggagggaacaaggcaagaggtagggagaacagtttggaggttgtcatattatccagcagcacagtggtgttatctcaatgggggaaggagcagaaggatggagagatggtgatggagtcacatgagtttctattttcttactcctcccacctcaggtaccctgcttccaccttttcaccagtctgaatccagttaaatagttttaactagatgacttaagactatttcaggaggaatatcctgtttgcagagagtaagaaagaaaattaggccaggtgcagtggctcacgcctgtaatcccagcactttgggagaccgaggcaggcggatcacctgaggtcaggagtttgaaaccagcttgacaacatggtgaaaccctgtctctactaaaaatacaaaaattagccaggcgtgatggcacacgcctgtagtctcagctacttagcaggctgaggcaggagaatcgcttgaatccgggaggtggaggttgcggtgagccaagatcgtgccattgtactacagcctgggcatcagagcgagactctgcctcgaggaaaaaaaaaaagaaaaagaaaattagagggtgaggcctgtttataaccctaaatgactgaccatatgagacagtgaaaaact

SEQ ID NO: 10303 - DNA, 934 bp, Homo sapiens
gcatttctgtataatgtgaagaagcaactgtatttgaattaaaaatcactgctaaagaatatatttgagtcatacagtttctaagggtacaacctgtgaagtcagacttcctgagttcagatctctcagccataactagctatctgaccttggccaagtatgctcaaagtcacaaaaccttagtttccttatgtgcatgatgattataataccttttgtacagttatgaggaaacttagacaatgcctgtgttgtatggtaagcgttttcataaatgctgcctacctgtaagtagcattatagtgtgtagttattggttaatttcctttttctttaccagaagtgtgggttttgcccagcctttatacaacttcagtatttctggttaatctgtctctctatggctctaaacttttcagagtggtgggggagttaccaacacttttgtaaaaggccagatagtaaatgttttatgctttatgtagtctctgttgcaagtactcaattctgtaattatagcgtgaaagcggccacagacttgtaaatgaatgagtacagctatgttctaataaaatttttatttacaaaaccatgtggtggactggatttggcctttgggccatattttgctgaccctgttttaaaccataagcttttctaagaattttttttttaatcccaataatgaagttacatagaaaatacttaatggtgtgtgaagagaatggtaatatgaaaatacagtcagtggctggtattttggcatctttttcttcagacaagctctttaaactcgcatatgttattcacacatgcctctttaacaattatgacaaaaatattcttcctggcttgcattctgtcacaatctgtgcagtatatagggcttaaggtattgtggaagagcttatgtagatcaatcatctgtgttaaa

SEQ ID NO: 10304 - DNA, 720 bp, Homo sapiens
ttggggtgctctaccggaccttacctaaatgcctgtgttgtatggtaagcgttttcataaatgctgcctacctgtaagtagcattatagtgtgtagttattggttaatttcctttttctttaccagaagtgtgggttttgcccagcctttatacaacttcagtatttctggttaatctgtctctctatggctctaaacttttcagagtggtgggggagttaccaacacttttgtaaaaggccagatagtaaatgttttatgctttatgtagtctctgttgcaagtactcaattctgtaattatagcgtgaaagcggccacagacttgtaaatgaatgagtacagctatgttctaataaaatttttatttacaaaaccatgtggtggactggatttggcctttgggccatattttgctgaccctgttttaaaccataagcttttctaagaattttttttttaatcccaataatgaagttacatagaaaatacttaatggtgtgtgaagagaatggtaatatgaaaatacagtcagtggctggtattttggcatctttttcttcagacaagctctttaaactcgcatatgttattcacacatgcctctttaacaattatgacaaaaatattcttcctggcttgcattctgtcacaatctgtgcagtatatagggcttaaggtattgtggaagagcttatgtagatcaatcatctgtgttaaa

SEQ ID NO: 10305 - DNA, 378 bp, Homo sapiens
gatgtctttcgtgttgacactttgtatctgttactctccaagtgcatttcatacattaactcctgcaatccttaccacaactccaggagggagatactaggctcccctttctacagatgaggaaactgaggcttgaagtggtcaagaagcctgtccaggcttcacatgggatgcgtgtggcagaaccaggattctaaccctaaagtagttagcaatatggaaataaaggaagcacaagtgtatcttcggagaattcataagagaaaggtttcccttgcttgggaagtgaggggatgacttcatagaggaggtgttgactgacgtgggtttgagcagtggatagaatatgtcattgtaggcctggtgcggtggcttatg

SEQ ID NO: 10306 - DNA, 486 bp, Homo sapiens
gggcaacatggtgagaccctgtgtctacaaaaaatacaaaaattaggcgtggtggctcgtgcctgtagtttcagctacttgggaggctgaggtgggaggatcacttgagcctggcaggtggaggctgcagtgagccaagatcatgccactgcactccagcctggctaatggagccagatcctgtcgttggatggtgttcaaggctgtccctggaagtgtggtagtagaagtgaagaaagagagcataccctgagtttccttaggccctggaaacagttttactgggtttcagatttgtttgggaataaagagcatagtaggaaggactgtccaatgtgctaacatctttattggatgttaaagagatatttcgtgtattaagtaattcattcagattcactagagcccatttttgccagatactatgttagatgctggtaatgcaaagatgaaaaaggtaagtgcttgcctttgaggaataactgg

SEQ ID NO: 10307 - DNA, 523 bp, Homo sapiens
tgagcttaggagtgagaaggctggatcaaagcctggctccatgcctgcatccctctgacttgccagtcatttcaccctccgagcctctatttccccacctcttaaatggggataataatactacctaccttatgggattgcggtaagactgataatgctggtacgagtgacagcttccctcatggaaggcccaccacgtaaagcagtttacagccatctcattccatctatgacagaatcctgtgtcactgttttggagatgggaaaaaagaggctcagagatggtgagtgacttgcataataattacataaaacccccagagcccctggcccctggagttctcaaaagttccttctctgttggtacctgcagctgccactccctaccccgctcccatagaccctctcctccttggagactctgccccatctgccgtcccttctctgctggatcaacaccttttccctctctgctggctcccatcagtatttaaacattgcctttcatatctgtcttcaagaa

SEQ ID NO: 10308 - DNA, 384 bp, Homo sapiens
ggcagggatactgaggaagacttttgaaaggcaacagttagagaccaggcagggagaagatctgtgcttcccagagcctccctgctccttgtgcttgaagggtagaaagtgaggcagaacgcaggaagggtgctcttacctgggagggctgaggctggcagaagtactgcttgaaatactcacccaggaggcctggcatggtggctcacatctgtaatcccagcactttgggaggccgaggagggcagatcacgaggtcaggagatcgagaccatcctggctaacatggtgaaaccccatctctactaaaaataaaaaaaattagctgggtgtggtggcgggcgcctgtagtcccagctactcaggaggttgaggcaggagaat

SEQ ID NO: 10309 - DNA, 357 bp, Homo sapiens
tgccgcacaatccagggtgagaactaatgaggatctgagcatagactgaaggagactggtgaggtatattaagactcaaaacatattcatgactggctacacataaaggttgaggggaaaaaggttgctttctatgccttcagaaattaacttaggaaaacaggtctaaaacccaaatggatcactaaccagttttatagcctagggccaattatttctcttaaatgttagctttttcttctgtcaaatggtgacaatgatagctgtccttgtcaactaggggatgatgtagcaatcaaatgaaacagaggacatgaaagggaggtcatcaccataaaggactgtgtctatggaagt

SEQ ID NO: 10310 - DNA, 495 bp, Homo sapiens
gaatgccctctcccttccctcacctgcagactctgacttaccttccaaggttatctcaggcggtctctcctccaggacgcctttcctccttgaggggcttaggatccccgctgagagctctgcccagaatctgggcttcgctgtcgtagcactgtactgtacattacctgttccctggtctggagattctcccaccttggcctcccaaagtgctgggattacaggcatgggtcactgcatccaggctcctttcttttatttttttctcattgaggtgaaattcatataacataaaactaatcatttttaagtaaacagtttagtgacagtttggacatttttgcagtgctgtgtgacaccacctcatctaattccaaaacattttcattaccgtgaaagaaagccccgtaccgggatgatgaaaagttctggagatggaggtggtgatggttacattaacaatgtgaatatacttaatgtcacaggattgtatat

SEQ ID NO: 10311 - DNA, 451 bp, Homo sapiens
ttaagagacagggtctctcactctgtcacccaggctagagtgcagtggtgggatcacagctcactgcagccttgaattcctgagctcgagtgatcctcctaccttagcctccctagtagctaggaccacaggcacacaccactaaatttttttttattttttttttgtagacacagagtgtgaccatgttgtccaggctcatctcgaacctctgggctcaaggggatcctcccaccacagtctctcaaagtgcagggattacagaaataagccaccacatttggccaaagttgtaaattttgcttattagtatgtgaatgctattttcaaactactcttaggcaccttttcaaagaaaccagaccatattttttttatctttcatatttttgatgtgtttataattcaatgagatatacaattctacataaaaagataaacactattgggt

SEQ ID NO: 10312 - DNA, 275 bp, Homo sapiens
tttcgcctctgagattccaagaactagctgggatgttctgaatcattagaatccattagttctgacccctgacttaaaaccctcccaaggctcctaggaccacccacactggcctgcccaatgctagccactaggtacctgcatgtggccactgagcgcttgaaatgtgctcctacccacaccagactttgaagatttagtaggaaacaaaaaaaggtaaatgtcattaatttttttttttgtctcttggcttaataaaacataataaaatcagg

SEQ ID NO: 10313 - DNA, 380 bp, Homo sapiens
gggaagtttcctgtgaaaacatatacaccataaagaataatgtatttagaatatctccctgttggtagtattacaattgaagcacagttgttgttactcattcctctcctcttacatgtaataatcaaataatacaacaacaaaaccaaatatagtaaaaataaattcactgcccgtggggaagaatcttaaatattacctttattgtatatgtttgaagtatgtttgtagctttagttgcatcttcatcactccttagcagtctccttgttcattgtttactgaatcatatgcctctgctattcttccagattttctctattctctgtagtccctcaaactgaaacttgcacctgacagttttagtaaatgaccatctt

SEQ ID NO: 10314 - DNA, 404 bp, Homo sapiens
atagctctgaactcaaaatatatccttgctaagatgatatatctgttattttactgctccttagtaaaattactgcaaaacttagtggcttgaaacaaccaccatttacttgcacatgattcagtgggtgtgcatattaagctgggctcacctgtgtggttcttctgctagtcttgtgtgggctcactgctttggttgcagccagttggtggctgggtcagctttgttgtccagaatgacctcaccctcaagtctggtggttagtgctgttggttgagcctctgcctccatgtgctcttttgtccagcttactttctatgggcatctcagcagcaagaatggaagctgcaaggccacgttatgttggtcaaaggaagggccagcgcagattcacaaggtgggaa

SEQ ID NO: 10315 - DNA, 435 bp, Homo sapiens
aacttctagcgagggcccttactgcaaaatagatgaaaggcatttttcagatttgtttttcccttttttaagaaaaaaatgaacgggaaggagccaatgtgtgagtgtgtatgtgtgtgtgtgtgtgtatgtgttgggggttgagggtattgatgcatgctatttattaatacaaactcaattagtcaaccacctcttgaacatttcattgggtgtttaatgggcatcaaacttacctgttcaaaaccaaattcttgatttctccccactacttcccaaactgctgctcctttggtctttcccatcccagtaattggctgctgcattctgccaagtgcacaggccaaagcccctcccttaggctcctcattcccaattgtcctggcatcccatcttctccacttccagcatttacacagcatccctcctccgctc

SEQ ID NO: 10316 - DNA, 443 bp, Homo sapiens
atgtgtagaagttgtcaaacatgaactccgtggaagtagatagtgggcctcctcccacacccacctactcccttgaggaagctccaggcagtacatttggaaagctaccaaacaggactacctctcaggacttctcttgttttattagtctctgagctgcctctttggttggtttatctggagtttttgtagcatcttctcactcatccacagcatgtcacttgttctctggatgaaggaggctccaagtcatgctagactgtggagttctggaactagagtatactgtttatttcctgtactggaagccagagttagggccaggctggattttatgtctgcacctaaaaccattcagtcccccacaaatgaatcaacctaattagtgctagactgttgtagctccctgagagcagggctctggccatcttaccactgtattc

SEQ ID NO: 10317 - DNA, 331 bp, Homo sapiens
ttttttattttacattggttaatatttataaatcaatgatttctgcatacttatttttatgaaatatatttgacatatgagatatgtatacttatttttatggaatacatttttattattgtaatcatttagctgttgagtcctaagatttcttatgtgctataatcctattatctacaaataataattgttttcttttttcactccgtaatctatagtttttttctttttacttgccttacttcattgactagtaagaaacttcattaactcgataactctagttataatgttgaagaaatgtgatagtaggtttaattatcatgtttag

SEQ ID NO: 10318 - DNA, 790 bp, Homo sapiens
gaggttttaaatttgcttttttgaggaaaagaactgggggtggattttggcatcgtagcatatcgattaaagaataatcaggacatcagatacattttaatacatagctggggccttatgttgtagatgaagcttgctgtttttagcaagttcctgggtttcacattcatttctgctgcatctagtagctccacacatttcataacctgatctctttatttgtatgcaaaaaatactgtcttaatacagagcagcatttttgtaacaaagagactcgctggagctatttggtgcttgaatgtgaccatcctttttacttttgctaagccttatttaaattttgtataccgtggaatatgtagaatttgtcaaatcattttagtgctgaaggtttttgatttcttgtttttgtttctgttgttgcagtttctttggtggcttgttttgtattgtaagatggcacttgctgatataaatactaaggcactaagagaaaatacagataagtatttataagttgcttgggaaccatagcagaattttttgtttggttttgtaagagaaaaaaaattaccaataaataactgatctagcacccaaactctcttgggggatgtcttagtatcttcacgctataaaattgttcatctaagcacagcatcatcttatggccttatggattgtaaatcttctagtgaggctataaactccactctgaaaacaaaggcataacttaaccgactgctcagttgtccttcgttgtaaaatgaattggctttgggaaaaagga

SEQ ID NO: 10319 - DNA, 1489 bp, Homo sapiens
gaggttttaaatttgcttttttgaggaaaagaactgggggtggattttggcatcgtagcatatcgattaaagaataatcaggacatcagatacattttaatacatagctggggccttatgttgtagatgaagcttgctgtttttagcaagttcctgggtttcacattcatttctgctgcatctagtagctccacacatttcataacctgatctctttatttgtatgcaaaaaatactgtcttaatacagagcagcatttttgtaacaaagagactcgctggagctatttggtgcttgaatgtgaccatcctttttacttttgctaagccttatttaaattttgtataccgtggaatatgtagaatttgtcaaatcattttagtgctgaaggtttttgatttcttgtttttgtttctgttgttgcagtttctttggtggcttgttttgtattgtaagatggcacttgctgatataaatactaaggcactaagagaaaatacagataagtatttataagttgcttgggaaccatagcagaattttttgtttggttttgtaagagaaaaaaaattaccaataaataactgatctagcacccaaactctcttgggggatgtcttagtatcttcacgctataaaattgttcatctaagcacagcatcatcttatggccttatggattgtaaatcttctagtgaggctataaactccactctgaaaacaaaggcataacttaaccgactgctcagttgtccttcgttgtaaaatgaattggctttgggaaaaaggaaaaaaacaaacaaaaaaagaaaaagaaaaaagcctcctccttgcccctaatttttttttcccatatggttttagccattccccatcactatattgtgaagctgtaaaaatatatatatatactttacaagagtttactaatggatttcaaaactggtctcaacgtttataatacatatctgtgtttggcagttgtcataacccaatcctacattcagccatcgggacaagtctgtcggggaggtagttcatggtttacaagcctttgctttttaactgtccaatttcctttaaagcacaactagctatttgtttacaaatgatatttttatgtatattttgtatagtgtatcatcatttttgccaaatatgtttttcattataaatgagtaaagagtacttaaggttgcattcatgtattacatgtttgttgttgtaaacctctccaatcagctggtagaaattctcctcattgtgttctatttggtcagtctctgtgtgattgtaggatgtgctccttggtagtactcccagctgtagatttaccagcttaaaagtttgttaggatctgtgcaataaagtgtttgcagtcttattttctctaagaaattccttatggacgtcataattgttgtatattgaacaaaatatttatacttatgcagttgcataacattgaaataaaaatttagcatgaaaa

SEQ ID NO: 10320 - DNA, 1896 bp, Homo sapiens
gaggttttaaatttgcttttttgaggaaaagaactgggggtggattttggcatcgtagcatatcgattaaagaataatcaggacatcagatacattttaatacatagctggggccttatgttgtagatgaagcttgctgtttttagcaagttcctgggtttcacattcatttctgctgcatctagtagctccacacatttcataacctgatctctttatttgtatgcaaaaaatactgtcttaatacagagcagcatttttgtaacaaagagactcgctggagctatttggtgcttgaatgtgaccatcctttttacttttgctaagccttatttaaattttgtataccgtggaatatgtagaatttgtcaaatcattttagtgctgaaggtttttgatttcttgtttttgtttctgttgttgcagtttctttggtggcttgttttgtattgtaagatggcacttgctgatataaatactaaggcactaagagaaaatacagataagtatttataagttgcttgggaaccatagcagaattttttgtttggttttgtaagagaaaaaaaattaccaataaataactgatctagcacccaaactctcttgggggatgtcttagtatcttcacgctataaaattgttcatctaagcacagcatcatcttatggccttatggattgtaaatcttctagtgaggctataaactccactctgaaaacaaaggcataacttaaccgactgctcagttgtccttcgttgtaaaatgaattggctttgggaaaaaggaaaaaaacaaacaaaaaaagaaaaagaaaaaagcctcctccttgcccctaatttttttttcccatatggttttagccattccccatcactatattgtgaagctgtaaaaatatatatatatactttacaagagtttactaatggatttcaaaactggtctcaacgtttataatacatatctgtgtttggcagttgtcataacccaatcctacattcagccatcgggacaagtctgtcggggaggtagttcatggtttacaagcctttgctttttaactgtccaatttcctttaaagcacaactagctatttgtttacaaatgatatttttatgtatattttgtatagtgtatcatcatttttgccaaatatgtttttcattataaatgagtaaagagtacttaaggttgcattcatgtattacatgtttgttgttgtaaacctctccaatcagctggtagaaattctcctcattgtgttctatttggtcagtctctgtgtgattgtaggatgtgctccttggtagtactcccagctgtagatttaccagcttaaaagtttgttaggatctgtgcaataaagtgtttgcagtcttattttctctaagaaattccttatggacgtcataattgttgtatattgaacaaaatatttatacttatgcagttgcataacattgaaataaaaatttagcatgaaaaaaaaaaaaaaaagaaaaaaaaagaaaaaaaaaaagaaaaaaaaaaaaaaaaaaaaaaaggggggggcaaaaaaagaaggaagcggcacaagcgtagcaaaccacaacaagagtgcaagagaaggggcagcacccaccaaccaagctactatgaaaagagcgaccaggcggcgcaataaaatagaaatgtctaaagagagaagcgcagcgcaacagaggacaatggaggaagagcaaacacatagtgacggatctgaaaaatacagaaaccacacctcagcaagggtaggaggccaccgacaacaaccaacatacaagctacaacgggggtcaaaaaaacatacagcagggggagagaagcaccacgcgacctggtgagacaaaccagcgaggagataaaatacagga

SEQ ID NO: 10321 - DNA, 1434 bp, Homo sapiens
gaggttttaaatttgcttttttgaggaaaagaactgggggtggattttggcatcgtagcatatcgattaaagaataatcaggacatcagatacattttaatacatagctggggccttatgttgtagatgaagcttgctgtttttagcaagttcctgggtttcacattcatttctgctgcatctagtagctccacacatttcataacctgatctctttatttgtatgcaaaaaatactgtcttaatacagagcagcatttttgtaacaaagagactcgctggagctatttggtgcttgaatgtgaccatcctttttacttttgctaagccttatttaaattttgtataccgtggaatatgtagaatttgtcaaatcattttagtgctgaaggtttttgatttcttgtttttgtttctgttgttgcagtttctttggtggcttgttttgtattgtaagatggcacttgctgatataaatactaaggcactaagagaaaatacagataagtatttataagttgcttgggaaccatagcagaattttttgtttggttttgtaagagaaaaaaaattaccaataaataactgatctagcacccaaactctcttgggggatgtcttagtatcttcacgctataaaattgttcatctaagcacagcatcatcttatggccttatggattgtaaatcttctagtgaggctataaactccactctgaaaacaaaggcataacttaaccgactgctcagttgtccttcgttgtaaaatgaattggctttgggaaaaaggaaaaaaacaaacaaaaaaagaaaaagaaaaaagcctcctccttgcccctaatttttttttcccatatggttttagccattccccatcactatattgtgaagctgtaaaaatatatatatatactttacaagagtttactaatggatttcaaaactggtctcaacgtttataatacatatctgtgtttggcagttgtcataacccaatcctacattcagccatcgggacaagtctgtcggggaggtagttcatggtttacaagcctttgctttttaactgtccaatttcctttaaagcacaactagctatttgtttacaaatgatatttttatgtatattttgtatagtgtatcatcatttttgccaaatatgtttttcattataaatgagtaaagagtacttaaggttgcattcatgtattacatgtttgttgttgtaaacctctccaatcagctggtagaaattctcctcattgtgttctatttggtcagtctctgtgtgattgtaggatgtgctccttggtagtactcccagctgtagatttaccagcttaattccttatggacgtcataattgttgtatattgaacaaaatatttatacttatgcagttgcataacattgaaataaaaatttagcatgaaaa

SEQ ID NO: 10322 - DNA, 1436 bp, Homo sapiens
gaggttttaaatttgcttttttgaggaaaagaactgggggtggattttggcatcgtagcatatcgattaaagaataatcaggacatcagatacattttaatacatagctggggccttatgttgtagatgaagcttgctgtttttagcaagttcctgggtttcacattcatttctgctgcatctagtagctccacacatttcataacctgatctctttatttgtatgcaaactatttggtgcttgaatgtgaccatcctttttacttttgctaagccttatttaaattttgtataccgtggaatatgtagaatttgtcaaatcattttagtgctgaaggtttttgatttcttgtttttgtttctgttgttgcagtttctttggtggcttgttttgtattgtaagatggcacttgctgatataaatactaaggcactaagagaaaatacagataagtatttataagttgcttgggaaccatagcagaattttttgtttggttttgtaagagaaaaaaaattaccaataaataactgatctagcacccaaactctcttgggggatgtcttagtatcttcacgctataaaattgttcatctaagcacagcatcatcttatggccttatggattgtaaatcttctagtgaggctataaactccactctgaaaacaaaggcataacttaaccgactgctcagttgtccttcgttgtaaaatgaattggctttgggaaaaaggaaaaaaacaaacaaaaaaagaaaaagaaaaaagcctcctccttgcccctaatttttttttcccatatggttttagccattccccatcactatattgtgaagctgtaaaaatatatatatatactttacaagagtttactaatggatttcaaaactggtctcaacgtttataatacatatctgtgtttggcagttgtcataacccaatcctacattcagccatcgggacaagtctgtcggggaggtagttcatggtttacaagcctttgctttttaactgtccaatttcctttaaagcacaactagctatttgtttacaaatgatatttttatgtatattttgtatagtgtatcatcatttttgccaaatatgtttttcattataaatgagtaaagagtacttaaggttgcattcatgtattacatgtttgttgttgtaaacctctccaatcagctggtagaaattctcctcattgtgttctatttggtcagtctctgtgtgattgtaggatgtgctccttggtagtactcccagctgtagatttaccagcttaaaagtttgttaggatctgtgcaataaagtgtttgcagtcttattttctctaagaaattccttatggacgtcataattgttgtatattgaacaaaatatttatacttatgcagttgcataacattgaaataaaaatttagcatgaaaa

SEQ ID NO: 10323 - DNA, 417 bp, Homo sapiens
ttgttgactcaagccactgttttctttatagtacaacttcttcctggacttctctttttcattaatgtttccctaccctttaagagcttgttcatacacttgtgatccaacaccttatcattctgctcccatctagaatggtttcagtctgggcttacacatacattgcctcgggacttcccttcacttagatcccattttggtggagcatatcctccaatagccttctgagaaaaaaggtagatgggaggcaaatttttactctactctcacattcaatttatagtttaagatctgtttgttgctgatattctgaaatttcacagtgaaatacctttttttctttgagacagtctcgctctgttgcagtgagccgagatcgtgccactgcactccagcctgggcgacagagcaaga

SEQ ID NO: 10324 - DNA, 253 bp, Homo sapiens
ttttttttataacttttacctaacagcatctcttttttagatgaaggcaaacatgtctttttaaagcctggtttttctcaatacatctttaaaggttcttaaattatttcatacctggccaagttgaaatctttaagaatctcatttttaattttaattttttaattttaaactttatacttgatttttttcttttaaaaaaagaacttttaaatttttaattttaaactttactacttgattttttccccaa

SEQ ID NO: 10325 - DNA, 179 bp, Homo sapiens
tttgtaccttggggttttttgttttcttccttggatataataatgatttgtaataactacttttaagattttgctttgaaaaatcaggaatggactgtttatcatatatggtctttaaagataaaataagctatacaggctgattaagttagtttttttgcattaaaacattatttcct

SEQ ID NO: 10326 - DNA, 378 bp, Homo sapiens
gcgtcgacaaaaccctttaatcctcatcatgtactggatgtaagatccaaactccttgtaaagggcgtatgaaatcctctgcgatctgctccttgtctactcttggatcttgtccttagtaactccaaggcctcacactggatgcctcagctatctcagactacttccctgagatatcaagtaacatcggttggcaagaaagcaagataagttatctgccttcctagctaaccagtatctgttcaagaatctgctttccttcagggaaatcttcctgactgtcccctaagctagggtaggtttttttcctttatgctcctgtagaagtgtactgttaacatttatttcagacacaggacttcaccacacaagatttag

SEQ ID NO: 10327 - DNA, 496 bp, Homo sapiens
aatgacaggaatgtgaacaaaaatatttaggataaagaagtttaaaaattataagttctttacggtcatgttctaataaatttgaaaatctgaatgaaatggactgttctctaggaaaagatcaaaattggcttaagaaatctgcactagcaaaccgttgcagtcttttatttatttatttaattttctgtagagacagggttttgccatgttgcctggactggtcttgaactcctgagctcgagcagtcttcctgcctcagccttccagaatgctgggattacaagcatgaaccaatgtgcctagcctacagtcttttataaaattatcaaagaattcttttttaaaatggctgcaagtccaggtgttttacaagtggattgttttaaaatttcaacatgaaatatttaaagttatttaaactgtcccagaaggtagaaaaatcatccaaattcattttatgcagttagcatgaatctggtatcaaacagttggc

SEQ ID NO: 10328 - DNA, 1091 bp, Homo sapiens
tggtgtgaaattaaatcctttgactcaagtaaaggtagaggttttgaagtagaagcattaaatcctgctctttaattgttgtgtatttttaatatagtaatcaatggatactttataaaaatgtacattaccaagtatgtaacatcttctgttaatattgtcttatttgggaaagaaaatgtgtattgtattttagcatgcctgattaatctgaaaatggtagcagtgattcaatcttttttattctgtgaatgtttttgtttttattatgaaatatattaaaattgaaaagtacagagaataatcggtgtctactgtaacaccaccagatttaacaatgttaatgttacgccatatttgtttcaaatatttttgtaatattgaacattatggatagagttaaagcttgtttgtatccatcccgttgtttacattctccatcccctacataggtaaccactattctgaagttgatgtgtattctttgtgtacatgcttttataccttttctgcatatgtatgtatccataaataatatgtagtctgttgtgtgtttttaaactttacacagtggatgtcatactcttacatgtattctgcagcttgcatttttcacacattcattttgaatattcgttcatgttaacaatgtagatctagttttctttttaaactctgtatagtattcttatgtatgacatacacttgttgttatacatttgaattatttccaggtattcttttttgtgtgtggtatgtaaagtcacgatggcagagatttttgaaggaagataaattattttaggattacatttacagcgtcagtgcccacttcaaggtttatgaaaatttggatgcccagaaacaagtacttcgtagttggaggaataaaattctgtctgttgtgcagcttattattacaaagtcttactgttagaacaattatgtatataacacattcttaatcagttatttgaaatactttaaaattttcaatattcaattcatagcttttttctctgtttagaaaatattgtgtgtcttttttgatggagaagcaaattaaacatttgtcctgaattgaaaacctg

SEQ ID NO: 10329 - DNA, 1627 bp, Homo sapiens
tggtgtgaaattaaatcctttgactcaagtaaaggtagaggttttgaagtagaagcattaaatcctgctctttaattgttgtgtatttttaatatagtaatcaatggatactttataaaaatgtacattaccaagtatgtaacatcttctgttaatattgtcttatttgggaaagaaaatgtgtattgtattttagcatgcctgattaatctgaaaatggtagcagtgattcaatcttttttattctgtgaatgtttttgtttttattatgaaatatattaaaattgaaaagtacagagaataatcggtgtctactgtaacaccaccagatttaacaatgttaatgttacgccatatttgtttcaaatatttttgtaatattgaacattatggatagagttaaagcttgtttgtatccatcccgttgtttacattctccatcccctacataggtaaccactattctgaagttgatgtgtattctttgtgtacatgcttttataccttttctgcatatgtatgtatccataaataatatgtagtctgttgtgtgtttttaaactttacacagtggatgtcatactcttacatgtattctgcagcttgcatttttcacacattcattttgaatattcgttcatgttaacaatgtagatctagttttctttttaaactctgtatagtattcttatgtatgacatacacttgttgttatacatttgaattatttccaggtattcttttttgtgtgtggtatgtaaagtcacgatggcagagatttttgaaggaagataaattattttaggattacatttacagcgtcagtgcccacttcaaggtttatgaaaatttggatgcccagaaacaagtacttcgtagttggaggaataaaattctgtctgttgtgcagcttattattacaaagtcttactgttagaacaattatgtatataacacattcttaatcagttatttgaaatactttaaaattttcaatattcaattcatagcttttttctctgtttagaaaatattgtgtgtcttttttgatggagaagcaaattaaacatttgtcctgaattgaaaacctgaagatgtttcctataccttagacattgtaaggtagacatttaagtaaatttaatttctcagtcagccaggcagctcttaatctctgtctttataccgagtttttaccagatgatcacttttagtttgtttttgtttgcttgcttctttgtggggaaagaaatactaattttttttttttttttaccatatttcccttatctgcatgaatataattatcaggaactttgttcttaaatgtaactaagtcataaacagttccctacaaatttaggtttaataatggattcttctcagattgtatataagatcttttagctgttgttactttggaaacatcacattatggagtaggtttgtatttaaaatagtcacccaacataagttaaaaatacatagtgattctgtgaatactttagaatcattaggatatgtaggtaatttcatgtataatgttgctctactagaaaattagttctagataattagcatttttgtatacacttagtataaagtattggaaaaaatgcattattta

SEQ ID NO: 10330 - DNA, 362 bp, Homo sapiens
ggtgatccgcctgcctcggcctcccagagtgctgggattacaggtgtgagccaccatgcctggcctatacctggtactgttctaagctcttttatgtattaagttatttaatccttaaaacaaccctacaaggtaggccgttattatttccccccattttatagatgaggaaactgaggcatagcaacttaagaaacttgctcaaagctagcaagtggcacagctggaatttgaactcagccaatttggctcctaacctcatactcctgtaggctatgctattctgttgcaattttctgagttctggtctgtgttccacatcagactgggaggtcctcgaaggcagagcttgggcctgattc

SEQ ID NO: 10331 - DNA, 871 bp, Homo sapiens
cctcacaccaacaactgcacctactttcttacagggttggatgcctataacatgcctgcatggatttttgtcaaccgcagcctggcgctggggaagattcgttgctttggcttcgacatggactacactctggctgcctacaagtccccagcttatgaggccctgaccttcgagctgctgctggagcgcctggtgtgcattgggtacccgcatgagatcctgcgctacacctacgaccccaccttccccaccaggcggctggtgttcgatgaactctatgggaacctgctgaaggtggacgcccacgggaatgtgctgctgggtgcctatggcttcaccttcctctcggaggcagagatctggagcttctaccccagcaagttcattcagagggacgacctgcagtgtttctacatactcaacatgctcttcaacctgcctgaaacctacctctatgcctgcttggtggacttcttctctggctgctcccgttacactaattgtgacaccggctatcagcatgggaacctcttcatgtccttccgaagcctcttccaggatgtgactgatgccatgaataacatccaccagtcgggctgtctcaagaagaccctggaggacttggagaaatatgtgaagaaggatccacgcctccccatcctgctggggaagatgaaggaggttgggaaagtgtttctggccaccaacagcagctacaactacaccaatgccatcatgacctacctgttcagcatcagtgaggctgaagcctcgggcaggccctggaggtcctactttgacctgatcgtggtggacacgcagaagccccacttctttgcagaggggttggtcctgaggcaggtcaacacgg

SEQ ID NO: 10332 - DNA, 1103 bp, Homo sapiens
ccatgttgcccaggctcatgtgactaatttctgattcagacacagggtgctgggatcacaggcatgagccaccgcgcgctgcccacggtgtcctacttaacaaggcatctggcccagccatcattggaaatccacctggcttcagaaacagggtctcaccgtggcccaggccgagtgcagcggagccgtcatagcacactgaagccttgaactcctgggcacatgcgatcctcccacttcattgttccaaagtgctgagattacagatgtgagcctgactgggaatataaaatggatttttgtcaaccgcagcctggcgctggggaagattcgttgctttggcttcgacatggactacactctggctgcctacaagtccccagcttatgaggccctgaccttcgagctgctgctggagcgcctggtgtgcattgggtacccgcatgagatcctgcgctacacctacgaccccaccttccccaccaggcggctggtgttcgatgaactctatgggaacctgctgaaggtggacgcccacgggaatgtgctgctgggtgcctatggcttcaccttcctctcggaggcagagatctggagcttctaccccagcaagttcattcagagggacgacctgcagtgtttctacatactcaacatgctcttcaacctgcctgaaacctacctctatgcctgcttggtggacttcttctctggctgctcccgttacactaattgtgacaccggctatcagcatgggaacctcttcatgtccttccgaagcctcttccaggatgtgactgatgccatgaataacatccaccagtcgggctgtctcaagaagaccctggaggacttggagaaatatgtgaagaaggatccacgcctccccatcctgctggggaagatgaaggaggttgggaaagtgtttctggccaccaacagcagctacaactacaccaatgccatcatgacctacctgttcagcatcagtgaggctgaagcctcgggcaggccctggaggtcctactttgacctgatcgtggtggacacgcagaagccccacttctttgcagaggggttggtcctgaggcaggtcaacacgg

SEQ ID NO: 10333 - DNA, 533 bp, Homo sapiens
gaaaatccaaaagttatactatttgaattaataagttatttatttatttatttttgagaccgagactcgctctgtcacccaggctggagtgcagtggtgtgatcttggttcacttcaacctctgcctccaaggttcaagccattctcctgcctcagtctcccgagtagctgggactacaggcgcacaccaccacacccaggtcactcactccagaggaagccagctgctgtgtcatgaggcactcaagcagccatatggagaggctgatgtggtagggaactgagacctcctgccaacagccagcatcgtcttgccaggaggtcaccctgatgagctgcccatctaacagataagagcactgaggcagaggtgtttcatctgggcctcaggacccaaaatctgtttcattttggagcatccaggctgagctaggtcctgagccagacactgaggatgtgatagcaaatcaaacagacatgtcttctgtcctcttgaaatttacactccagtggggagacgcaaataaacaagt

SEQ ID NO: 10334 - DNA, 747 bp, Homo sapiens
  misc_feature (458)..(458): n is a, c, g, or t
ggtcactttctacacgatggtgctactgccttccagcctgcttaatagagcaagactctttcttaaaagaaaagaaaagagcatggggatgagattggcaaggagccagaatggcagctggaattctagtgggtgtgagggcagttgtccaggggaacatgggaagtggcctggccaagagtgtggcagaagaaatgggagaaatagatagattggagaaatatttaggaaagtaagaaggacttgcatgacttgggaagtacaggaaagggaggtatcaagaataacccctgggtccctgacttttataatggggtggtggtgatgtcaaatgcagagattgggaaggctggggcggggtgagggatgtgtatgtaggcacagtcaaaaagtttatttggaggcaggcatggtggctcacacctgtaatcccagtgctttaggaggatgaggaagtntgtcgctgatggcatcttcaaagctgaactgaatgagtttcttactcgggagctggctgaagatggctactctggagttgaggtgcgagttacaccaaccaggacagaaatcattatcttagccaccagaacacagaatgttcttggtgagaagggccggcgggttggggaactgactgctgcagttgagaagaggtttggttttccagagggcagtgtagagctttatgctgataaggtggccgctaggggtctgtgccattgcccaggcagagtctctgcgttacaa

SEQ ID NO: 10335 - DNA, 364 bp, Homo sapiens
  misc_feature (103)..(103): n is a, c, g, or t
tttaatatgatcgcttgttctcacgtcttgactccttcccttgggctttttcgtccggccattggcgagcgcccggagtctccttcaactgccgcttcacaanaagaggtaccaggtccgcaccaaacgagcacacaagcagcaccaggagcggcagaagaaggaggcaccaaccaggacagaaatcattatcttagccaccagaacacagaatgttcttggtgagaagggccggcgggttggggaactgactgctgcagttgagaagaggtttggttttccagagggcagtgtagagctttatgctgataaggtggccgctaggggtctgtgccattgcccaggcagagtctctgcgttacaa

SEQ ID NO: 10336 - DNA, 406 bp, Homo sapiens
ggtttcaccatattggcctgtctggtcttgaactcctgaccttgtgatctgcctgctttggcgtcccaaagtgctgggattagacgtgagccactgtgcccggccacatttgtacttccataagcaataaagacttagttaagaaactgcagaaaattacaaaagaggaggaaacctccataggcctaccattaaaagacatctgtcatctcaaaattttgtagtattttattcaatgctttttcagtcataggtttttatttacctttttcttttttttcctttaaagtaattatcttctctgtattgttcacagttttagtatatgtgctgctgaagtgagcactaccattacttttctttatacttagattaatctgaaagtttttttgttttttgagacgga

SEQ ID NO: 10337 - DNA, 377 bp, Homo sapiens
cttgtcctacaatgtcctcttagaagaaagagcagcaatgaaacactaggtctcatctgacctggacttacagatgaattgacctgatgcacagttagagaaagggaaagttcccacaggcataacagccagacacatattccttacacattacaatgtctgcatttttcatcattaccctaagcttcttgaaaaattagtgagaccgtttcttatgacctatgaaccagaagaacttgccacagcactctgataaagaaatagctttaaggctgggcatggtggctcacacctgtaatcctagcgctttgggaggctgaagtgggaggatcacttgaggtcaggagttcgagaccagcctgaccaacatggcgaaa

SEQ ID NO: 10338 - DNA, 372 bp, Homo sapiens
aggcaactttcttctggattctgtaggtctcaacagtcagccattggcttgttgttagtactttgatttattttttcttaccttgtgtgtgtatgtacactatctgacttgaggtttactaaattcttgtataggtggactaaagtcttttactagtttttaacaagttaagctattataaaccttctaaaattgtttttgtattattttctcttgtttctccacctgagacaacacatacatatgttgtaactttaaactgtgtctcagatcttctttattctctggtatcttctattcattcttttgtgaatgttatgcatttactttgcttcaagttgtcaactcttttcttctattttcagtctccac

SEQ ID NO: 10339 - DNA, 487 bp, Homo sapiens
gaagaattgtaaatacttataggtccattaaaaataacaataatgagccaccgcacccagcctgactattgattcttgattgaagaatgtttagtgttgatttttgattcctcaggaggcagtttaattattggcaaattacagtgaacttgtgttggcttgtttttttgccctaatagcaaggatttgaaggaagttcaaagtgtttcccaagcccttctaatttggcaggactcagcttccaaattctgtctcttttgcagatcttgtcagctcttgggttttaggttttgttagggatgagtctataatttttaggggcacagcctttctgtgggtgcctcagtaggagggtggggcaattaatgaggggttaaggcaatatctccactctgacaaggctaaaccctactgttcccaggatagctcttctctagcaccactagacctcaggatattggttttgttctcaaccccatagcagctg

SEQ ID NO: 10340 - DNA, 439 bp, Homo sapiens
agcagtcactttatggtatacttaacatcactttatttaaaacatttgaaatcaatgtaaaattagtgcaaatatagagctttctcattatgaagatcagctcatttaatataatctgtagatggaataaaatcttgaagataaagaattaccaggccagatgcaatggttcacatctgtaatctcagcactttggaaggccaaggtaaaaggatcacttgagcccaggagtttgagaccagtctgagcaacataacaagaccccctctcaacaaaacaaaacaaattagccaggcatggtggagtgtgcatatagtcctagctacttgggaggctgaggtggaaggatcgcctgagccccaggaggtcaaggctgcagtgagccatgttcatgccactgcactccagcccaggcaacagtataagaccctgtctcaaa

SEQ ID NO: 10341 - DNA, 420 bp, Homo sapiens
tgttttcaaggttaatccatgttgtagcgtttctttcctttttattgccaaataatattttgttgtatgactataccatattttatttttcctttcatcagttgatggacattggggttgtgttcatattttggctattatgaatactgctgctgtgaacatttgtgaacaggtttttgtgtgggtgtgtatgtttatcttgcttgggtaactacctaggagtggaattgctgggtcctgtggtaactttgtatttaactttttgaggagctgtcaaactgttttcccaagcagctccatcattgtacagcctcactagtaatctataaaggttcttactgctccacattgtcaccaacacttgttatttttcatgtttaaaaaaataataaatatcctattgggtgtgtgaagtagtat

SEQ ID NO: 10342 - DNA, 393 bp, Homo sapiens
aatattatttggctcgaaaaggaatcaagtgctgatacatgctacaacatagatccttgaaaccttacactaagtgacaaaagccagtcataatagaccacatagtgcatgattattatttttttctttatcaagttgattatatttttatgaaatttttagaataggcatatccatagagacaggaagtagattaaagattgtattgggctggagtgaatagtggtaagaggtgataggggagtgactgctaatggattttggggtttctttttggagttatgaaaatgttctataactggatagtggtagtggttgtacaaccctgtgaatataaacaactttaaatgggtgaattgcatggtatttgaattacatcagtaaaactactaa

SEQ ID NO: 10343 - DNA, 363 bp, Homo sapiens
tggtacagttccttagaaccaaatttaaacatttccaaatgtttcatcataaaagcaatacatattcaagataaatattcaaacaatacataaggatggaaagtgtgaaataaaagtgtaaatgggactttttgctcacattctgagaacactatttcccaaacattctctgctgtagaaataatactttcttgattccaattctcatagaccaatacttttgtaaaatacattaaaattactgagttgggcgtggtggctcatgcctgtaatcctggcactttggaaggctgaggtgggcagatcacttgagcccaagggttcaagaccagcctgggcaatatggcaaaaccccatctttac

SEQ ID NO: 10344 - DNA, 353 bp, Homo sapiens
aaagttttaaggtatataagtgtattatgacaggtagctataaaggcgtataagtgtattattatttaaggtgtataagtgtattatgaaagaggtatattatgacaggtagctataaagaaatcggttttttgataggaggctgccaaagaaagaatctcacatttccattccgtgtacaggatgtttccatttcaacctttgggtcccacagtgtgacacagcaagccccacgccagggaaccagcacaggttgtggagcgacagagcctgcattctgagtctcaggcccacttccagctgtccccttagtcacatcacctcacctttcagaactctggtttctttgcatc

SEQ ID NO: 10345 - DNA, 372 bp, Homo sapiens
aaatttaaccacattaaatattctgtccattaagattccccaaagatggtggaaagatggcaggttagtgggagaagatatttgcagcatgcaaggcaagatgacaatgcactaataacaaaatttcataaaacaatggacttggggcttgggaaaaataattatgacatgctttctgaagtgtccccagatagtttcataaaaaatggagcaaataggctaaagaaaaacccatagacatcatgttcaaaagaactgatgacaaggcatgttcataacccataaaatacaagtggatgcagctaaataactgcaatacttttgaaagagtttggcaggtttcgaagatgtgaggagctacaaagcagatta

SEQ ID NO: 10346 - DNA, 819 bp, Homo sapiens
aagaaatgagtacatgaggcagcacatttctagaatgttgtacagatgtcaattctcaaattagtctacaaatttaatgtaatcctattcaaatcctcagatagtttttggtggtggctgtttttgagacagggcctcgctctgttgcccaggctagagtgcagtggtatgactacagatcactgcatcctcgacctcccaggctcaagcaatcctcccacttcagcctctgaagtctctcatatggtgtccgagaaatggggacaaatctcacaaagggactaggctcaggagggctggaatattcagggaaggtttcaagcagaaagatgaacttgagttggcttttgagagattcataggattcccacaggcagagtgaaataagggaattttagatgaacaaacgcacagacaaaagcagaaatgcagatggtgtgactgggggatggtgaggggctgctctggctggaatggagggctggctgccacaatagtggaaatggtaaatgaggcaaataaggttggattggtaggatagcatcaaggttgccagcttattaaatcactcttccaatatgctagcactggcctattgggaaaagtaatgcatcatgtaatcaaactagagtggccagatgtagactttagatatgttaatgcaggttgagcatctctaatccgagggggaatgtctcatatggtgtccaagaaatggacacatctcacagagggcctagactcaggagggctacagtatgagacatttcccctcccttgtgaacttaaaaatgtggccaacaatttttttaaaagatg

SEQ ID NO: 10347 - DNA, 873 bp, Homo sapiens
aagaaatgagtacatgaggcagcacatttctagaatgttgtacagatgtcaattctcaaattagtctacaaatttaatgtaatcctattcaaatcctcagatagtttttggtggtggctgtttttgagacagggcctcgctctgttgcccaggctagagtgcagtggtatgactacagatcactgcatcctcgacctcccaggctcaagcaatcctcccacttcagcctctgaagtctctcatatggtgtccgagaaatggggacaaatctcacaaagggactaggctcaggagggctggaatattcagggaaggtttcaagcagaaagatgaacttgagttggcttttgagagattcataggattcccacaggcagagtgaaataagggaattttagatgaacaaacgcacagacaaaagcagaaatgcagatggtgtgactgggggatggtgaggggctgctctggctggaatggagggctggctgccacaatagtggaaatggtaaatgaggcaaataaggttggattggtaggatagcatcaaggttgccagcttattaaatcactcttccaatatgctagcactggcctattgggaaaagtaatgcatcatgtaatcaaacaaaaggcaaacagaggcaagctccaggaatgggcactgtaaacaggactcaccctagagtggccagatgtagactttagatatgttaatgcaggttgagcatctctaatccgagggggaatgtctcatatggtgtccaagaaatggacacatctcacagagggcctagactcaggagggctacagtatgagacatttcccctcccttgtgaacttaaaaatgtggccaacaatttttttaaaagatg

SEQ ID NO: 10348 - DNA, 508 bp, Homo sapiens
gcccaaattgtaattttattaaatgagtggaaagaaaattacttcctaataatactgatatatgaggatttcccatattcttgacctgctgttaggcttttaataggcatctcatttaatcgcactacatcgagggtctgggcccagcacctcctatctccaagtctgacatcccttcttggacactactgttcctgtatatcttttgttatgtgcattcattaccttttgtaacatatgtgcactttgcttgctccgaagtctatggtatgcacatgtacctcacctacttcccttcactgtgatggctgatgatttttcccccagcttccgtggctatgtcacatgtccagttcattcctcgtaggtgctggaggtagtgatcaaaaggcacaaaactagagtccctgtgactgactgtgacccagcagaaagagtgcccatcacccaacctgtatttgcctgcaggtgcattcccatgtgtgtacatcaaatatcctggtcagga

SEQ ID NO: 10349 - DNA, 447 bp, Homo sapiens
cgtggacaaggatgaacaaatgtgcagaaatctgtggcatgttttagtttatttcagcccttctcaaaaacgtcgtgtattttgggaaaagcttcctagaaacctgaggcccctgtgccttcatcctgaaacgtccttggattaagttgctttacaaacttcttttttccaattttagtatcaactttaagattcccaaagaagacctttcatttatgatttttttgaagacatagtcatggtgttattaagaagatattcactgaaaatatttatatcctgattgaagattatgcttttcagtttattcacttttatctttttttaaataatagttttattgagatacagttcacatataaaattcactcttttaaagtgtacagttcagtgggttttggtgtattcatagagttgtacaactatcgctattatctaatttcagaa

SEQ ID NO: 10350 - DNA, 410 bp, Homo sapiens
gaagggaagacttccagttgcaaggtcaggtgacccaatcaactgcctttgaacatctggaaaaatcttctaaaactcttccttctcaagaagtcctgcaactggagctactaatgaaagctctttccagtagcccttacagctaattttctgttcacatatttgtcttctgctgtaaagagctgtgcctcatagtgtattaagggctggcttttcctttcattgtaagggactttccaccacaaacacaaggccaccatggccagcaatgcacaaaacagcagagtatggtcggcccttaaagacaaggtttgacttactcctctcttctcttttttacagacatgtttctctactataaacttcactcttagctttattttcaagaataaaatatttctgttttcaaa

SEQ ID NO: 10351 - DNA, 347 bp, Homo sapiens
tggctagggcatccagtggctgtcacttccccaccctggtatagtcctgtttgctcaaaagattccaggccaggtgcagtgctcacacctgtaatcccagcactttgggggtcaaggtgggtggatcacctgaggtcaggagttagagaccagcccaggcaacatggcgaaaccctgtctctgctaaaaatacaaaaattggctgggcgtggtggtgcacggctgtaataccagctacttgggaggctgaggcatgaaaacagcttgaacccaggaggcagaggttgcagtgagctgagatcacgccattgcactccagcctgggcgacggcgagactgtctcaaaa

SEQ ID NO: 10352 - DNA, 288 bp, Homo sapiens
tttttatttttcctgtgttgcccaggttgattttgaactcctgggttcaagtgatcctcctgccttggcctcccaaagtgctggaattccaggcaagagccaccatgcctggccctgggcaacatttttattgtcagtcatttaatagcctagtctaatggatgtgtagtgatatgtcattgtgattttaatttgcctttccttaatgactaatgatgctgaacactttttttatgtgctttttttttttgccatttataaattttcctttgtgaagtttaagtcttg

SEQ ID NO: 10353 - DNA, 802 bp, Homo sapiens
ccaggcaactacaacaagcgtccataaggccaggtgcagcggctcacacctgcaatcccagcaatttgggaggccaaggcaggaggatcgcttgtgcagtggctcacacctataatcccagcactttgggaggccaaggcaggaggatcgcttgtgcagtggctcacacctgtaatcccagcactttgggaggccaaggcaagaggatcgcttgtgcagcagctcgcacctgtaatcccagcactttgggaggccaaggcaggaggatcgctcgaggccaggagttccagaccagcctgggcaacatagcgagacccccacctctacaaaaaattttaaaaattagccagaggtgggggtgcacacctgtagtcccagctactcaggaggccgaagcaggaggatcacttgagcccaggtatttgaggctgcagtgagctatgatcacactactacactccagcctgggtgtcagagtgataactctctcacaaattcaaaaaaacacaaactgtccatgatcacagcatggccctaaatttctagctgcaggtgtaatttctactttctgggactctcaacctaaaggaggcaggatcacacctcctcaagggcctgggcagggaggggaggccaccgtccctccctgtccccctagggcggtctccttccacttcctcaggccaacctttgccaaagaggcctctctgtagagtgaccagctcacagggcacaccacctcccttgagggttccctccttctgggagtgtaacatgactgtccaggcaagtaccttctcca

SEQ ID NO: 10354 - DNA, 297 bp, Homo sapiens
tctgattgcagaactagtaggtcctaatgttaaaacacctggaaagcatagaaaagcaaaagaataaaagaattctgtcaaactggatatggttttgaatcatgtttttctgttataccatgactattttcctttgtcattcaaactgcttcagaattgtttaaaattaaattgacaaatttgagacacaaaacctttctagaatatttatctttgatgaatgaaaactcttggaaagactttgtttaaagaaatttccctaaagtattggagtccataaggtatgatgaactttag

SEQ ID NO: 10355 - DNA, 382 bp, Homo sapiens
tcaaccttttaaaaattatagcaaccatgcttgcggacagtccaaaaacacaccatgggccatactttgcctatcctggtataaaacaagtaaatcttctgagcagtatttaagataagcccaggacagttagtaacataggaaaagatctggataagcctggttgagaatttcaacattgcaattttttaatttttaaaaatttaatttcttcaataattattgaattaatttgcatttattttgttagccaagtgggagtgatttttgaatttttaaggaggctattattgggtgggttttataagatgacttgccaagtatatttgggataaccataagaaataccattataagatctcagaagggaggtgggacttct

SEQ ID NO: 10356 - DNA, 316 bp, Homo sapiens
aaaaaaagaaaattgaatctacaataactgtagtaattatactttgaaataaatttaaccaaaaagtggaaaaacctgtgcattataatctaaacaatattgaagtacaaaattaaataatacacaaatggaaaaatattacctataaatgaattagcattattattgttaaatatctgtattacacaaaataatctacagacataatgcaacctctatgaaaataccagtgacacactggtataaattttaaaacatacatctaaaatttatattgtaccacagaagacccaaagtagccaaagcaataaagaaa

SEQ ID NO: 10357 - DNA, 362 bp, Homo sapiens
ttagttttttttgcataagaatgaaagtagtaagtgtgtacttttacgtgtgtattttcctctaaatgtgttctatataagaactgaaatttttaattaaaatttatttcccctattaggctgggcgcagtggctcacgcctgtaatcccagcactttgggaggctgaggcgggcggatcacctgaggtcaggagttcgagaccagcctggccaacatggtgaaactctgtctctgctaaaaatacaaaaattagccaggcctggtggcacacgcctgtaatcccagctactcgggaggctgaggcaggagaatcacttgaacccaggaggcagaggttacagtgagccgagattgcgccac

SEQ ID NO: 10358 - DNA, 405 bp, Homo sapiens
gatcccacccaacacgagaaggcaggccagaaaatcaattaattacaagttgtaatgagtgtgtacttcaattgggcttatcagaggatcctctaaggaagtgacatgtgagctgagagtttgctgacaagattgagctaggtttgtaaagaatgtcaaaaggaggattctaggtggaaaaagtaaaatatgcaaagcccctgacgtagaaaataacttggggttctaaggatgagcttagcagacaccgggtaagagacagcaggaggcgtgccatgccctggaagaggtaacatgctagcttaaggcaattccaagggatagaagagagacaatagctgggctcggtggctcatccctgtaatcgcagcactttgggaggccgaggtggactgatcacgaggt

SEQ ID NO: 10359 - DNA, 594 bp, Homo sapiens
accccggcaccaatatatttctctctccacaaattaagatattgttttcttagaggcatagccttgcacccacagtcttgtttttggagtgtgtgactgctacttatatgatgaccttgccttgaacgtctctcacctggctcaatgccaggctgcagaggtatcactcattgctttcaactcaggatgaagagcgcgagcttcactgtgtacagagtcatctccgagggattacacagagtacaacaaaaggagaaggctcagtccttgacataagcaaagatatctgcggacagttgactgtaggattgtaaagtctcataactgccaggcatagtcgtcacgcctctaatcccagcacttagagaggcagaggcaagaagatagcgtaagcccagcagttcaagaccagcccgggcaatatagtgagaccccgttctccacaaaaaggaaaaaaaaagccaaaaaaaaaaagtcttgtaaccaataaacagaaattataagccatattgaaaaggcagtaggaagccaagctagaatcatttagataattgatgcttgagaaagatgcctttttaccagtacagtaaaagt

SEQ ID NO: 10360 - DNA, 442 bp, Homo sapiens
gaactaataatttaaaataaagaggctttgctttaatatcacactcaattttgccccttgtaaaagaataagtcggatagttaaacaatttaccctgatacgctgggtgccctgcccaaggtacttgcccggttttaatcctaaaatatgtcctgcccagggggacaaatgagagggattcctccattttgcatctgtgtttcatacctgtgctcttagcaaaggagtaggttgtgggggagaaggagggtcttttatattcagctgtatgtactatttgacatcagagaccccatgaataatcactcttttttccattcggccaccagctagcaggttgcaattctttcctacctggagcgctgcagggggtggggcaagtggagacattactggacatttgcatttaaagaattaataaaaattccttatttgcctgaaa

SEQ ID NO: 10361 - DNA, 427 bp, Homo sapiens
tagcaggaatttatatcaagtatcactgtacttgatacaaattccttcccctcctagcagtctgggtatacccttccgtacctcaggtacagagacagactccctttcctgcactgtcttcttttcaaattaaagcctattctccttgccaacacaatgattcatctaccctttcctttctgtaaaagggcagaaccttaaaattatatctcttggtgctgtgaatgcttttctcttatatttgtcttttaaatacaaagttgggcactgactctctaaaaatatgcacaccaaatgcttggttgaggcaatgtgggatggtagaaagaatataggtttgaaagggtgcagattctcgctctatcccctataagtgtgaccttgagaaagttacctttgtctgaattactccaatggaaaaggtggg

SEQ ID NO: 10362 - DNA, 485 bp, Homo sapiens
ggatagtgaaagtaagatcactctcaattcctacttcctggtcattgagcctttgcgtagtctccttccatatcatatcagagttggctgtgtgaccaacaaaatatggcagaattgacgctatgtcacttctgaggctggtgtatgaaaagcactgcagctttctgcgctctcatggcctctctttctctctctctctttccctcttcctcccacagataactcaatctgggggaaagtcagctgccatttatgaacagccctatggagaggccctcaaagtcaagggactgtagtgtctgacaggagccatgtgagtgggctcagaagcagactctccagtcgcagtcaagcctacgatgactgcagccccaaccaacaactgaataaccacgtcatgatagatactgagccagaatcacccagctaagctgctctcaaattcctgatcacagaaagtgtgagataataaatgtttgttatct

SEQ ID NO: 10363 - DNA, 1007 bp, Homo sapiens
gtggcttctatatagataattagataattgagtttgatttagcactttatatgggaacgcaaaggtctggacaaataagtactttggaagagttgaaatagaaactgggcagttaagcttatttaatatgtaacaaccatcagtggatagataaataagtcttgatagggagaatttcttaatatcttttgaagaatacctccattttcatagtagggagtacccagaggataattttcggagccagtacagtggaattgaccagcaaaagttagttaaagctagtttcttgaatattgataatatattcaacatggtacagtctacatacaaagaggccgagatgggcagatcacttgagtccaggagttctgagactagcctaggtaatgtggtgaaaccctgtctctctaaaacattaaaaaaaattagctgggtgtggtggcacatgcctgtggttccagctacttgacaggctgaagatgggaggatcacctgagcccagggaggttaaggttgcagtgagctttgattacaccactgcactccaccctggccaacagagtgagactttgtctcaaaaaaaaaaaaaagaaaaagaaaaaaagtggtcacccttaaaggtgggaagagttgaggtataagtagtagatatgatttaatagttattcttcttggaaaaaattattttttaaaaagaaagattgtaccagttttttactaagttgttggattgagtaatatttttaagaagctttttcctgtttactactcagattattagtgatcctgtttttgggtagcatgatagaccaagtattaaatagttttaacttggaaggctgtagagatgaacatcaaaacactgggggaaaaaaaggtatatatatgtcacttgatagtctgtatgctaaggtctctatgaacagattggaaattaatagattcacttttaacttaaaatagatctcataattccaaatagagcattaataggaagaaattat

SEQ ID NO: 10364 - DNA, 645 bp, Homo sapiens
tgagacaggtttttgctctgttgcccaggctggagtgcagtggcatgaacgtggctcacggcaacttccatgtcccgggcttaagccatcctcccacctcagctacttgacaggctgaagatgggaggatcacctgagcccagggaggttaaggttgcagtgagctttgattacaccactgcactccaccctggccaacagagtgagactttgtctcaaaaaaaaaaaaaagaaaaagaaaaaaagtggtcacccttaaaggtgggaagagttgaggtataagtagtagatatgatttaatagttattcttcttggaaaaaattattttttaaaaagaaagattgtaccagttttttactaagttgttggattgagtaatatttttaagaagctttttcctgtttactactcagattattagtgatcctgtttttgggtagcatgatagaccaagtattaaatagttttaacttggaaggctgtagagatgaacatcaaaacactgggggaaaaaaaggtatatatatgtcacttgatagtctgtatgctaaggtctctatgaacagattggaaattaatagattcacttttaacttaaaatagatctcataattccaaatagagcattaataggaagaaattat

SEQ ID NO: 10365 - DNA, 398 bp, Homo sapiens
gcggccgctactactactaaattcgcggccgtcgactaatgagcaaaatatattaattccctgttcttaaggagaccacattctagtggagggaatcgacaatagaccaatatatgcctggcacgttggctcacgcctgtaatcccagcactttgggaggctgaggtgggcggatcacaaggtcaagaggcggagaccatcctcgccaacatggtgaaaccctgtctctactaaaaatacagaaaaaattaggtggacatggtagcgcgtgcctgtagtcccagctactctggaggctgaggcaggagaatcgcttgaacccgggaggcaggggctgcagtgagctgagatcgtgccattacactccagactgcacaacagagtgagactccatctcc

SEQ ID NO: 10366 - DNA, 377 bp, Homo sapiens
agacatccatctctaatcatatttttccttaaatcaacttaaaatagcttaaagacttagagcagaaactatgaaactactagaagaaaatatgaagaaaaattttcaggacattggtcttggcaaagattttatagagaaaacctcaaaagcacaaacaaaaaaagaaaaaataaacaggactataacaaactaaaaagcttcggcacagcaaaggaaatgatcaatagagagaagagatgacttgcagaatgggaaagaatattagcaaactattcatctgacaaaggattcatatccagaatatacaaggaactcaaacagctcaacatggaaaaaacacacaaataatctgatgtataaatgggcatattagc

SEQ ID NO: 10367 - DNA, 284 bp, Homo sapiens
taggcccccttcttgcagattgaaaaacacatcctaaaactcatggagatgcaagggacccaggatagtcagaacaatcttgtgaaagaagaaagttggaggattcacacaccaccaacaacaataaaaaccagaagacagtgaaataatatcatcagaatgctaagagaatagtgttattccttattcagctatactattgttctcaaaagagggcaaattaaaagacattttccagcaaatactgagaggcatcaccatttatttatagagcattcatgaaa

SEQ ID NO: 10368 - DNA, 443 bp, Homo sapiens
tatatacatagatatcacatacttaaattcccggaagaggcccaattcccgttaaaccataaatatacacacacctcatatatatgtggcacacacactcgtatatcccacacacaacatatttaatgtgcctcatatataatatccctgggtgtgtgtgtgtgtgtgtgtgtgtgtgtgtatatatacatagaaaatacattagttcctctttatctgtgcaatcacattctgcagtttcaggtactgtggacaactgtggtgtaaaaatatgtgagtacagttcaatgagatattttgaaagaggccacactcacgtaacttttatgacagtatattgttataaatgttctcttttattagttattgttcatctcttactgcctctaatttatgaactttatcaaaagtgtgtacatataataaaatacatagtatataaa

SEQ ID NO: 10369 - DNA, 524 bp, Homo sapiens
atatcagtgattcgtctgcatacacttaaattggaacacttcagctatgaccttggtaaaaagatcagaggttgtccttgtttctaacttaagtttaattcgttcatctctgatttttcactcttgttaatgacatgtccaactttctaaactgattcttccaaaaggacaattttatgaatctttagaacctgaatgaaatgagtgttagctcataagtattttctttgctgctgcttgtccccatttctgccttccctactccaggcaaaaatattagtttaatatttcctattccacttcttaatctttttgaaaaaataatactttgcatggagaaaaaagtgaaatagcatgaaagggtaaaaaatagtgtgaaagggtagaaaatcatttggaacagtcaaaaaaatatgggtatacagtaaaaagtaagttttcctccttcttttggcccccacacactccccatccaactcattttccctccacagaaacaacaaccacttggagagacctacttt

SEQ ID NO: 10370 - DNA, 498 bp, Homo sapiens
gagcacccatggacacaaatatgggaacaatacacactgtgggctactagagggtgaaggaaggtgggatgggttaaaaaaactacctatcagatactatgctcactatctgggtgatgagatccatactccaacctcagcatcacacaatatttccatgtaacaaatctgcacatgtacctcctgtatctaaaataaaagttgaaattgaaaaaaaaaattaagagcaaaaatatactctgactcatgaaaaaatataccttggatgtataaatttcagtttcttctcttggcaaattctattttatccctactactttattttccgtatgaatggtcctaggaatactagaaatgctaaaggcacacaaatatttttctgtaattaaaatgtgcaagactgttgtactgttgtaatgaaatccttttcaattataggcttacatacttatgttcaatgaagagaatgacaactaatataatctaatttatacctta

SEQ ID NO: 10371 - DNA, 450 bp, Homo sapiens
gaaaacactttactaggccagacccccaccccggaactatcactgtttgtattctctgcaaggtgttggttgtgaaatcaggcttccatcttgttttacatcctgagggcatggcttctaactccagtggcaaggctttgtttagcaatcctgccttaggggatgagccctctctggttccatatctgcatgtcttcctagccctgtctcttaaagggccccacccagtgactgggttttcttttgcctgtctgtgtatatactgtgtgtggtatctgtaaaaagagctctaattaatttggcctaaacaaagacaagcacttggatctaatattttttaaagggaagataaaaactgtgatacctttcagttcacgtgactttaatcattgagaaacaaaaacagccttaaggattattggtaaagagcagatgttgtcaaaatgtaaa

SEQ ID NO: 10372 - DNA, 1330 bp, Homo sapiens
tggctggcgccggatccgcgagcagcagtgtccacctcacgtagctggccgaggcggtatccagattccgggggtctcgctccttggcatagtggtcgcttaactccagcgccttcccagtgcctcccaaacctctcctcctcctgcccggggctgttctaggaggagcctaaatgtccgcttccccagctgaaggggattgtggtgcgtaaacaggattaactccctcgcccccagctgcgcggatctgcgcggcggcctgcgggccagagcgagccttcgggtgcgtggagggcgcagcactggagcgggggatggggaagcgcgcggccttggagccgtctcttgggcccgcttcctcgccgagtggggaggggggccacagcctaaggagctgctcctcaaaagcccgggcggacggcggcgacggcgcgggttcctagcggcagcctcagctccaccacctccctcaccctccccgcgcttcctctccgcccctcgcgctccagccactcggccgcagccggcgctgtcctccgccccccggagccgccgcgccagaccctcgcccagacatgggggacctgccgggcctcgtgcgcctctccatcgcgctgcgcatccagcctaatgacggcccggtcttttacaaggtggacgggcagcgcttcggccagaaccgcaccatcaagctgctcaccggctcctcctacaaggttgaggtgaagattaaacccagcacgctgcaggtcgagtgagtgcggggcgcctggtggcagcagggtcccccatggggtacaggcagaggactgaggcccccaggacagcccgagcctctcaagggcctctggcctcgcgccgctcccagcgggcccgggggttggaggaagaggtcactccctgtccgccttcgtccccttccttccctttggcttgtattcctccattctcgcttccctccacccatcgcagtgacctcagtgggttctttaaaatcagtgacaagaagccagggtttttgcttgtctgtttcttataaatttctcctgccttctgtccagccttgggcgcggaaccgcaggcggtcggggtggagcagatgggagaggtccgcagggttcacccaccgcaatcccagccctcctgcgcgcggtccaggcggcccaccgggtctgcccgcaaggctgaaggagggagaaaggaggaatgaggtggaaaggcaggggaggggtgattactggggctccctgagggatgctccccactcccttcgccattcagtggctgggaccctggggtggagcagcagacactagtaagagagcggccg

SEQ ID NO: 10373 - DNA, 1922 bp, Homo sapiens
tggctggcgccggatccgcgagcagcagtgtccacctcacgtagctggccgaggcggtatccagattccgggggtctcgctccttggcatagtggtcgcttaactccagcgccttcccagtgcctcccaaacctctcctcctcctgcccggggctgttctaggaggagcctaaatgtccgcttccccagctgaaggggattgtggtgcgtaaacaggattaactccctcgcccccagctgcgcggatctgcgcggcggcctgcgggccagagcgagccttcgggtgcgtggagggcgcagcactggagcgggggatggggaagcgcgcggccttggagccgtctcttgggcccgcttcctcgccgagtggggaggggggccacagcctaaggagctgctcctcaaaagcccgggcggacggcggcgacggcgcgggttcctagcggcagcctcagctccaccacctccctcaccctccccgcgcttcctctccgcccctcgcgctccagccactcggccgcagccggcgctgtcctccgccccccggagccgccgcgccagaccctcgcccagacatgggggacctgccgggcctcgtgcgcctctccatcgcgctgcgcatccagcctaatgacggcccggtcttttacaaggtggacgggcagcgcttcggccagaaccgcaccatcaagctgctcaccggctcctcctacaaggttgaggtgaagattaaacccagcacgctgcaggtcgagaatatttccattggtggtgtgcttgtcccactggaactgaagtctaaagagcctgatggggacagagttgtttatacgggtacatatgacacagaaggtgtgaccccaacgaagagtggagaacggcaacccatccagatcaccatgccgttcacagacattgggaccttcgagacagtgtggcaagtcaagttctacaattaccacaagcgggatcactgccagtggggaagccccttctctgtcattgagtatgaatgcaagcccaacgagacacgcagtctgatgtgggtgaacaaggagtccttcctctgaaagtggctctttctgatgctactggacaatcttttcagaaatctacttttagataaaccagcgcaggccttaaacaaggcatgccacaccattgctgttccccatctggtactaatgacctactagccctggttattttgaaagtgtaattcccctctgacacaatatccctcacatacaagatggtgatgtaccactcccgagaatattcccatctgtattttgtgctgatgttcctgcatccagttgttctcggtcatacttttgaccacttgtgactggagttcagtggccctggcaggcttgtcctgctcttgaccattccactgactaactttggtgttttgtttccaagttaagtgattcctccttttttttgttcaatgttaaatttaaaaataacaatgtgtatgggtcctcccatgtgtaatatggtaacatgtaacttgcagtgtttgccagctttcaaagcaggctttgtgaaaatgtaatacaaacagcagtgaatgggactcaaatgttgtgcttcctataaacagctccgctctttcagggaaggatggtaacaaactagaaggacaaatatgtacgtatttataacgtattaaaactcttttaagtagcttaaggtattgtgcaatggcctagcctagtagaaatgggggaaaagcattgctgtggaccattgttaaagtgacaggagttgtagggttacccctttgacaagcttccatagtcttcagacacgcacattgatggcatccctacagtcttcttcacttgaactttgtaaaactgcatatggacctgtaatcaacttttgatatttcttaataaaggcgttgaaaatca

SEQ ID NO: 10374 - DNA, 1890 bp, Homo sapiens
tggctggcgccggatccgcgagcagcagtgtccacctcacgtagctggccgaggcggtatccagattccgggggtctcgctccttggcatagtggtcgcttaactccagcgccttcccagtgcctcccaaacctctcctcctcctgcccggggctgttctaggaggagcctaaatgtccgcttccccagctgaaggggattgtggtgcgtaaacaggattaactccctcgcccccagctgcgcggatctgcgcggcggcctgcgggccagagcgagccttcgggtgcgtggagggcgcagcactggagcgggggatggggaagcgcgcggccttggagccgtctcttgggcccgcttcctcgccgagtggggaggggggccacagcctaaggagctgctcctcaaaagcccgggcggacggcggcgacggcgcgggttcctagcggcagcctcagctccaccacctccctcaccctccccgcgcttcctctccgcccctcgcgctccagccactcggccgcagccggcgctgtcctccgccccccggagccgccgcgccagaccctcgcccagacatgggggacctgccgggcctcgtgcgcctctccatcgcgctgcgcatccagcctaatgacggcccggtcttttacaaggtggacgggcagcgcttcggccagaaccgcaccatcaagctgctcaccggctcctcctacaaggttgaggaatatttccattggtggtgtgcttgtcccactggaactgaagtctaaagagcctgatggggacagagttgtttatacgggtacatatgacacagaaggtgtgaccccaacgaagagtggagaacggcaacccatccagatcaccatgccgttcacagacattgggaccttcgagacagtgtggcaagtcaagttctacaattaccacaagcgggatcactgccagtggggaagccccttctctgtcattgagtatgaatgcaagcccaacgagacacgcagtctgatgtgggtgaacaaggagtccttcctctgaaagtggctctttctgatgctactggacaatcttttcagaaatctacttttagataaaccagcgcaggccttaaacaaggcatgccacaccattgctgttccccatctggtactaatgacctactagccctggttattttgaaagtgtaattcccctctgacacaatatccctcacatacaagatggtgatgtaccactcccgagaatattcccatctgtattttgtgctgatgttcctgcatccagttgttctcggtcatacttttgaccacttgtgactggagttcagtggccctggcaggcttgtcctgctcttgaccattccactgactaactttggtgttttgtttccaagttaagtgattcctccttttttttgttcaatgttaaatttaaaaataacaatgtgtatgggtcctcccatgtgtaatatggtaacatgtaacttgcagtgtttgccagctttcaaagcaggctttgtgaaaatgtaatacaaacagcagtgaatgggactcaaatgttgtgcttcctataaacagctccgctctttcagggaaggatggtaacaaactagaaggacaaatatgtacgtatttataacgtattaaaactcttttaagtagcttaaggtattgtgcaatggcctagcctagtagaaatgggggaaaagcattgctgtggaccattgttaaagtgacaggagttgtagggttacccctttgacaagcttccatagtcttcagacacgcacattgatggcatccctacagtcttcttcacttgaactttgtaaaactgcatatggacctgtaatcaacttttgatatttcttaataaaggcgttgaaaatca

SEQ ID NO: 10375 - DNA, 1221 bp, Homo sapiens
tggctggcgccggatccgcgagcagcagtgtccacctcacgtagctggccgaggcggtatccagattccgggggtctcgctccttggcatagtggtcgcttaactccagcgccttcccagtgcctcccaaacctctcctcctcctgcccggggctgttctaggaggagcctaaatgtccgcttccccagctgaaggggattgtggtgcgtaaacaggattaactccctcgcccccagctgcgcggatctgcgcggcggcctgcgggccagagcgagccttcgggtgcgtggagggcgcagcactggagcgggggatggggaagcgcgcggccttggagccgtctcttgggcccgcttcctcgccgagtggggaggggggccacagcctaaggagctgctcctcaaaagcccgggcggacggcggcgacggcgcgggttcctagcggcagcctcagctccaccacctccctcaccctccccgcgcttcctctccgcccctcgcgctccagccactcggccgcagccggcgctgtcctccgccccccggagccgccgcgccagaccctcgcccagacatgggggacctgccgggcctcgtgcgcctctccatcgcgctgcgcatccagcctaatgacggcccggtcttttacaaggtggacgggcagcgcttcggccagaaccgcaccatcaagctgctcaccggctcctcctacaaggttgaggtgaagattaaacccagcacgctgcaggtcgagaatatttccattggtggtgtgcttgtcccactggaactgaagtctaaagagcctgatggggacagagttgtttatacgggtacatatgacacagaaggtgtgaccccaacgaagagtggagaacggcaacccatccagatcaccatgccggagtgcctggaacaacgaccccaagagatctctcttacatatgaatgtgaagaataagcacattcttcaatgtgtgccatcatgaggaacaaatgttctttttttttttttccaaattatttgctttgcattctaggggagggcttctcacaggccatcagaattatcggggatgcttgttaaaatgtagattcctaaactctacctttttagacctcttaaattgagcaaactctctgagagtaaatccaaagcatctgcattttattaagcactttaggtgattcttatcatattaaagtttggaaaacactac

SEQ ID NO: 10376 - DNA, 4740 bp, Homo sapiens
cccagatagtcacatttaaaggttgctagtttgaaatttgcaaatgcttccctgctgtcagagttaggtttcctacagctgtaagatagctgctactcaacctacagcagatgcccgtgacattgtgtgttcctgggtgtatctcccatctagcaactccaaactgtgtatgctgtagtttgtgttcctggaactactatcttcaggagaagcttcagttataaatagtaattggagtgaagagatgagttctgtttaggggagatccattaactttcaacaagggaggacagggactttttcaataggaattgcaataacatggtttgtttttgaaaatgcaatagactgtggattaaatagctattgcacacaaagaagaaaataaagttataatctccagcatgagatctggatttacatatgctctgttagctgcaagaatttgggcaagctatttaatttccataaatttaggtatccttaagatacccactgcttagagttattgtgagaattaattgaggtaagaaaactgaggctcaggttgtcatttgctcaaatcacacagcaaaaccgtgatagaatgcagattcaaactgggatattaacattccaaagcctttacagttattgactactattcagcactgccttcaatatatgctgatgactgcacacaggagttagaaatgcccactgtcacttgcctgccttgagcggtttcttgtttgtataaataatccaaaatacttggttgtgttgtaagaagcaccgtgttttgtgagacatttcaaaggtaccacaaataggaaagatttcattctagaatgaatagagcacatatttagtatctacgtgctgtttggttaattttagttatttggtcatgcttttaaaatctatttttatagtatatattttcttttatagcatatcagaattatctttagattcaactcttcatgccgtcaatcttcattgcaataacatctccaagatcgaagccattgatcatatttggaatttacaacatctagatctgtcatctaatcaaataagtagaattgaaggactaaacacactgacaaaactgtgcacattaaatttgtcctgcaatttgattacaaaagtagaaggacttgaagaactaattaatctgactagactaaatgtatcttataaccacatagatgatcttagtggattgattccccttcatggaattaagcataaacttagatatattgatctacatagtaatcgtatagatagtatccatcacttacttcagtgtatggtaggattgcacttcctgaccaatcttattttggagaaagatggagacgataatcctgtctgtcgactgccagggtacagagcagttattctccagactttgccacagcttagaatcctagattgcaagaacatatttggtgaaccagtaaatttgacagaaataaattcatcacagctgcagtgcctagaaggtcttttggataatttagtttcttctgattctcccctaaatataagtgaagatgagatcattgatagaatgccagtgataacagcacctatcgatgagttagttcccttggaacagtttgcaagtacaccaagtgatgctgtgttgacgtcttttatgtctgtgtgtcaatcttctgagccagagaaaaataatcatgaaaacgatttgcagaatgagataaaacttcagaaattagatgaccaaattctacaacttctaaatgaaacttctaattcaatagataacgttcttgagaaagaccccagaccaaaaagagacacagatataacttctgaaagtgactatggaaacagaaaagaatgcaatagaaaagttcctcgaagatcaaaaatcccttatgatgccaaaaccattcaaactattaagcaccacaataaaaactacaactcttttgtaagttgtaatcgtaaaatgaaaccaccttaccttaaagaattatatgtaagctcatctttagcaaactgtcctatgttacaagaatcagaaaagccaaagactgaaataattaaagtagaccaaagtcactcagaagacaacacttaccagtcccttgttgaacagctagaccaagagagagagaagagatggagagctgagcaagccgaaaataaactcatggattatattgatgagctgcataaacatgcaaatgaaaaagaggatattcatagtctggctctacttaccacagataggctaaaggaaattatttttagagagagaaattccaaaggacaactcgaagttatggttcacaaacttcaaaatgaaattaaaaaactgactgttgaactaatgaaagcaaaagatcaacaagaggatcaccttaaacacttaagaaccctcgaaaaaacattagaaaaaatggagagacaaaaaaggcagcagcaggcagcacagataagactgatccaagaggtggaactcaaagcttcagctgccgatagagaaatatacttacttagaacttcccttcatcgagaaagagaacaagcgcaacaacttcatcaacttcttgcattgaaagaacaggaacacaggaaggaacttgaaacaagggagttttttactgatgctgacttccaggatgccttagctaaagaaatagccaaagaagagaaaaagcatgagcaaatgataaaagaataccaagagaaaattgacgtgttaagccagcagtatatggatttagaaaatgaattccgtattgctttaactgttgaagccagaagatttcaagatgttaaagatggttttgaaaatgttgcaactgagttagcaaagagcaaacatgctcttatttgggctcaacgaaaagaaaatgagtcttcctctttaattaaagatctgacctgtatggtaaaggaacaaaaaacaaaactggcagaagtttctaaattgaaacaagaaacagcagcaaatttacagaatcaaatcaacacccttgaaattttaattgaagatgacaagcagaagagtattcaaatagaacttctcaagcacgaaaaagtccagcttatttctgagctagcagccaaggaatcactaatatttggtttaaggacagaaagaaaagtatggggacatgagctggcacaacaaggatcttctctagcccaaaatcgtggaaaattggaggctcaaattgagagtttatctagagagaatgaatgtctgcgaaagacaaatgaaagtgatagtgatgcattaagaataaagtgcaaaatcatagacgaccaaactgaaactattagaaaattaaaagattgtttacaagaaaaagatgaacacatcaaaagattacaagaaaagatcacagaaatagaaaaatgcactcaagaacaacttgatgaaaaatcttcacaactggatgaggtacttgagaagttggaaaggcacaatgaaagaaaagaaaaactaaaacaacagttgaaaggaaaggaagtagaacttgaagaaatcagaaaagcttacagtacactgaatcggaagtggcatgataaaggagaacttctatgtcatcttgaaacacaagtaaaagaagtgaaagaaaaatttgaaaacaaggaaaagaaacttaaagcggaaagagacaaaagtattgaactacaaaagaatgcaatggaaaaacttcatagtatggatgatgcctttaaaagacaagttgatgcaattgttgaagctcatcaagctgaaatagcacagctggccaatgaaaagcagaagtgtattgattctgcaaatttaaaggtccatcaaattgaaaaagaaatgcgtgaacttttggaagaaacatgcaagaacaaaaaaacaatggaagcaaaaattaagcaacttgcttttgctttaaatgaaattcagcaagatatgtgatggttctgagaatgaatttaattgaaatagaccagcagacctattgtaaaaatgattaaatattgtaatagtagtaactgctatgactttgaaatgtctctttctatacatttcattatgaatatatttttaaagacttttgatcaagtatttattaattgtataggttttttataataaattgttgacaattttgtctattagaaaaaactatcataactagacttacaatatttttcttgtttctgtactatacgttgtttggtaattacacatttgcctacaaatttgtgaatgaaaagattagtattttcaccatatgaggtaaaacattttaatcattgttatcttattgtgatgatgaagaactaattatatttgttatttaattgatgtagctcaattcttttaaagtacttatgtagccaaaaagcatttgaaatctgtatgataaaagatgtggcattcttaagaaagtatatgtagccatctccacatcactcattatgaccccttcttttataatgcttatatcttttcattaaagattacatttaaggttttataaatattgtctgttcctgaagaggaacaccactgttccaccttcattctcccttctaataactgtatatgaagaaattctgataatgtaactggaagcagtaattcatttcattccataccaggtcattactgtattactgtttcacttttgtcacatcatatgctagtatgcagaacaaaagtcttaagtactatgcccctcttctatttctgaaaggaagaaaatatatattttcttgatatca

SEQ ID NO: 10377 - DNA, 643 bp, Homo sapiens
tttttgtatgtaaggatttaatgattacatgctgcagaagttgaataagtaacaagtttattatttgctttctggaactattccgggtgatgtatctggtagctgataaatttagtttattctagaaataattgactttttttaatatttcagttttcattttgaatgatttgtttccaagggtacagagcagttattctccagactttgccacagcttagaatcctagattgcaagaacatatttggtgaaccagtaaatttgacagaaataaattcatcacagctgcagtgcctagaaggtcttttggataatttagtttcttctgattctcccctaaatataagtgaagatgagatcattgatagaatgccagtgataacagcacctatcgatgagttagttcccttggaacagtttgcaagtacaccaagtgatgctgtgttgacgtcttttatgtctgtgtgtcaatcttctgagccagagaaaaataatcatgaaaacgatttgcagaatgagataaaacttcagaaattagatgaccaaattctacaacttctaaatgaaacttctaattcaatagataacgttcttgagaaagaccccagaccaaaaaaaccctctggccaatttttggccttga

SEQ ID NO: 10378 - DNA, 1104 bp, Homo sapiens
tgtcttttaaaggcatcatccatactatgaagtgaatgcaatggaaaaacttcatagtatggatgatgcctttaaaagacaagttgatgcaattgttgaagctcatcaagctgaaatagcacagctggccaatgaaaagcagaagtgtattgattctgcaaatttaaaggtccatcaaattgaaaaagaaatgcgtgaacttttggaagaaacatgcaagaacaaaaaaacaatggaagcaaaaattaagcaacttgcttttgctttaaatgaaattcagcaagatatgtgatggttctgagaatgaatttaattgaaatagaccagcagacctattgtaaaaatgattaaatattgtaatagtagtaactgctatgactttgaaatgtctctttctatacatttcattatgaatatatttttaaagacttttgatcaagtatttattaattgtataggttttttataataaattgttgacaattttgtctattagaaaaaactatcataactagacttacaatatttttcttgtttctgtactatacgttgtttggtaattacacatttgcctacaaatttgtgaatgaaaagattagtattttcaccatatgaggtaaaacattttaatcattgttatcttattgtgatgatgaagaactaattatatttgttatttaattgatgtagctcaattcttttaaagtacttatgtagccaaaaagcatttgaaatctgtatgataaaagatgtggcattcttaagaaagtatatgtagccatctccacatcactcattatgaccccttcttttataatgcttatatcttttcattaaagattacatttaaggttttataaatattgtctgttcctgaagaggaacaccactgttccaccttcattctcccttctaataactgtatatgaagaaattctgataatgtaactggaagcagtaattcatttcattccataccaggtcattactgtattactgtttcacttttgtcacatcatatgctagtatgcagaacaaaagtcttaagtactatgcccctcttctatttctgaaaggaagaaaatatatattttcttgatatca

SEQ ID NO: 10379 - DNA, 3548 bp, Homo sapiens
tttttgtatgtaaggatttaatgattacatgctgcagaagttgaataagtaacaagtttattatttgctttctggaactattccgggtgatgtatctggtagctgataaatttagtttattctagaaataattgactttttttaatatttcagttttcattttgaatgatttgtttccaagggtacagagcagttattctccagactttgccacagcttagaatcctagattgcaagaacatatttggtgaaccagtaaatttgacagaaataaattcatcacagctgcagtgcctagaaggtcttttggataatttagtttcttctgattctcccctaaatataagtgaagatgagatcattgatagaatgccagtgataacagcacctatcgatgagttagttcccttggaacagtttgcaagtacaccaagtgatgctgtgttgacgtcttttatgtctgtgtgtcaatcttctgagccagagaaaaataatcatgaaaacgatttgcagaatgagataaaacttcagaaattagatgaccaaattctacaacttctaaatgaaacttctaattcaatagataacgttcttgagaaagaccccagaccaaaaagagacacagatataacttctgaaagtgactatggaaacagaaaagaatgcaatagaaaagttcctcgaagatcaaaaatcccttatgatgccaaaaccattcaaactattaagcaccacaataaaaactacaactcttttgtaagttgtaatcgtaaaatgaaaccaccttaccttaaagaattatatgtaagctcatctttagcaaactgtcctatgttacaagaatcagaaaagccaaagactgaaataattaaagtagaccaaagtcactcagaagacaacacttaccagtcccttgttgaacagctagaccaagagagagagaagagatggagagctgagcaagccgaaaataaactcatggattatattgatgagctgcataaacatgcaaatgaaaaagaggatattcatagtctggctctacttaccacagataggctaaaggaaattatttttagagagagaaattccaaaggacaactcgaagttatggttcacaaacttcaaaatgaaattaaaaaactgactgttgaactaatgaaagcaaaagatcaacaagaggatcaccttaaacacttaagaaccctcgaaaaaacattagaaaaaatggagagacaaaaaaggcagcagcaggcagcacagataagactgatccaagaggtggaactcaaagcttcagctgccgatagagaaatatacttacttagaacttcccttcatcgagaaagagaacaagcgcaacaacttcatcaacttcttgcattgaaagaacaggaacacaggaaggaacttgaaacaagggagttttttactgatgctgacttccaggatgccttagctaaagaaatagccaaagaagagaaaaagcatgagcaaatgataaaagaataccaagagaaaattgacgtgttaagccagcagtatatggatttagaaaatgaattccgtattgctttaactgttgaagccagaagatttcaagatgttaaagatggttttgaaaatgttgcaactgagttagcaaagagcaaacatgctcttatttgggctcaacgaaaagaaaatgagtcttcctctttaattaaagatctgacctgtatggtaaaggaacaaaaaacaaaactggcagaagtttctaaattgaaacaagaaacagcagcaaatttacagaatcaaatcaacacccttgaaattttaattgaagatgacaagcagaagagtattcaaatagaacttctcaagcacgaaaaagtccagcttatttctgagctagcagccaaggaatcactaatatttggtttaaggacagaaagaaaagtatggggacatgagctggcacaacaaggatcttctctagcccaaaatcgtggaaaattggaggctcaaattgagagtttatctagagagaatgaatgtctgcgaaagacaaatgaaagtgatagtgatgcattaagaataaagtgcaaaatcatagacgaccaaactgaaactattagaaaattaaaagattgtttacaagaaaaagatgaacacatcaaaagattacaagaaaagatcacagaaatagaaaaatgcactcaagaacaacttgatgaaaaatcttcacaactggatgaggtacttgagaagttggaaaggcacaatgaaagaaaagaaaaactaaaacaacagttgaaaggaaaggaagtagaacttgaagaaatcagaaaagcttacagtacactgaatcggaagtggcatgataaaggagaacttctatgtcatcttgaaacacaagtaaaagaagtgaaagaaaaatttgaaaacaaggaaaagaaacttaaagcggaaagagacaaaagtattgaactacaaaagaatgcaatggaaaaacttcatagtatggatgatgcctttaaaagacaagttgatgcaattgttgaagctcatcaagctgaaatagcacagctggccaatgaaaagcagaagtgtattgattctgcaaatttaaaggtccatcaaattgaaaaagaaatgcgtgaacttttggaagaaacatgcaagaacaaaaaaacaatggaagcaaaaattaagcaacttgcttttgctttaaatgaaattcagcaagatatgtgatggttctgagaatgaatttaattgaaatagaccagcagacctattgtaaaaatgattaaatattgtaatagtagtaactgctatgactttgaaatgtctctttctatacatttcattatgaatatatttttaaagacttttgatcaagtatttattaattgtataggttttttataataaattgttgacaattttgtctattagaaaaaactatcataactagacttacaatatttttcttgtttctgtactatacgttgtttggtaattacacatttgcctacaaatttgtgaatgaaaagattagtattttcaccatatgaggtaaaacattttaatcattgttatcttattgtgatgatgaagaactaattatatttgttatttaattgatgtagctcaattcttttaaagtacttatgtagccaaaaagcatttgaaatctgtatgataaaagatgtggcattcttaagaaagtatatgtagccatctccacatcactcattatgaccccttcttttataatgcttatatcttttcattaaagattacatttaaggttttataaatattgtctgttcctgaagaggaacaccactgttccaccttcattctcccttctaataactgtatatgaagaaattctgataatgtaactggaagcagtaattcatttcattccataccaggtcattactgtattactgtttcacttttgtcacatcatatgctagtatgcagaacaaaagtcttaagtactatgcccctcttctatttctgaaaggaagaaaatatatattttcttgatatca

SEQ ID NO: 10380 - DNA, 3896 bp, Homo sapiens
acagttgggacgaggattccagttttgcgtcaccgtcaaggcgggaaagttcccggctgtcggttggagggtgggtcctcgccccgccccgccccctcgggccgcccttccgcgcttccgggaggcttgtcccaagctcacggacccctcgctgggtgccggttaagaccccgctccccgtcgccagtgctatggaggcggcggcggcggtggtggcggcagaggcggaagtggaaaacgaagacggcgacagcagctgcggggatgtatgcttcatggacaaaggcttgcagaggacttgaagaactaattaatctgactagactaaatgtatcttataaccacatagatgatcttagtggattgattccccttcatggaattaagcataaacttagatatattgatctacatagtaatcgtatagatagtatccatcacttacttcagtgtatggtaggattgcacttcctgaccaatcttattttggagaaagatggagacgataatcctgtctgtcgactgccagggtacagagcagttattctccagactttgccacagcttagaatcctagattgcaagaacatatttggtgaaccagtaaatttgacagaaataaattcatcacagctgcagtgcctagaaggtcttttggataatttagtttcttctgattctcccctaaatataagtgaagatgagatcattgatagaatgccagtgataacagcacctatcgatgagttagttcccttggaacagtttgcaagtacaccaagtgatgctgtgttgacgtcttttatgtctgtgtgtcaatcttctgagccagagaaaaataatcatgaaaacgatttgcagaatgagataaaacttcagaaattagatgaccaaattctacaacttctaaatgaaacttctaattcaatagataacgttcttgagaaagaccccagaccaaaaagagacacagatataacttctgaaagtgactatggaaacagaaaagaatgcaatagaaaagttcctcgaagatcaaaaatcccttatgatgccaaaaccattcaaactattaagcaccacaataaaaactacaactcttttgtaagttgtaatcgtaaaatgaaaccaccttaccttaaagaattatatgtaagctcatctttagcaaactgtcctatgttacaagaatcagaaaagccaaagactgaaataattaaagtagaccaaagtcactcagaagacaacacttaccagtcccttgttgaacagctagaccaagagagagagaagagatggagagctgagcaagccgaaaataaactcatggattatattgatgagctgcataaacatgcaaatgaaaaagaggatattcatagtctggctctacttaccacagataggctaaaggaaattatttttagagagagaaattccaaaggacaactcgaagttatggttcacaaacttcaaaatgaaattaaaaaactgactgttgaactaatgaaagcaaaagatcaacaagaggatcaccttaaacacttaagaaccctcgaaaaaacattagaaaaaatggagagacaaaaaaggcagcagcaggcagcacagataagactgatccaagaggtggaactcaaagcttcagctgccgatagagaaatatacttacttagaacttcccttcatcgagaaagagaacaagcgcaacaacttcatcaacttcttgcattgaaagaacaggaacacaggaaggaacttgaaacaagggagttttttactgatgctgacttccaggatgccttagctaaagaaatagccaaagaagagaaaaagcatgagcaaatgataaaagaataccaagagaaaattgacgtgttaagccagcagtatatggatttagaaaatgaattccgtattgctttaactgttgaagccagaagatttcaagatgttaaagatggttttgaaaatgttgcaactgagttagcaaagagcaaacatgctcttatttgggctcaacgaaaagaaaatgagtcttcctctttaattaaagatctgacctgtatggtaaaggaacaaaaaacaaaactggcagaagtttctaaattgaaacaagaaacagcagcaaatttacagaatcaaatcaacacccttgaaattttaattgaagatgacaagcagaagagtattcaaatagaacttctcaagcacgaaaaagtccagcttatttctgagctagcagccaaggaatcactaatatttggtttaaggacagaaagaaaagtatggggacatgagctggcacaacaaggatcttctctagcccaaaatcgtggaaaattggaggctcaaattgagagtttatctagagagaatgaatgtctgcgaaagacaaatgaaagtgatagtgatgcattaagaataaagtgcaaaatcatagacgaccaaactgaaactattagaaaattaaaagattgtttacaagaaaaagatgaacacatcaaaagattacaagaaaagatcacagaaatagaaaaatgcactcaagaacaacttgatgaaaaatcttcacaactggatgaggtacttgagaagttggaaaggcacaatgaaagaaaagaaaaactaaaacaacagttgaaaggaaaggaagtagaacttgaagaaatcagaaaagcttacagtacactgaatcggaagtggcatgataaaggagaacttctatgtcatcttgaaacacaagtaaaagaagtgaaagaaaaatttgaaaacaaggaaaagaaacttaaagcggaaagagacaaaagtattgaactacaaaagaatgcaatggaaaaacttcatagtatggatgatgcctttaaaagacaagttgatgcaattgttgaagctcatcaagctgaaatagcacagctggccaatgaaaagcagaagtgtattgattctgcaaatttaaaggtccatcaaattgaaaaagaaatgcgtgaacttttggaagaaacatgcaagaacaaaaaaacaatggaagcaaaaattaagcaacttgcttttgctttaaatgaaattcagcaagatatgtgatggttctgagaatgaatttaattgaaatagaccagcagacctattgtaaaaatgattaaatattgtaatagtagtaactgctatgactttgaaatgtctctttctatacatttcattatgaatatatttttaaagacttttgatcaagtatttattaattgtataggttttttataataaattgttgacaattttgtctattagaaaaaactatcataactagacttacaatatttttcttgtttctgtactatacgttgtttggtaattacacatttgcctacaaatttgtgaatgaaaagattagtattttcaccatatgaggtaaaacattttaatcattgttatcttattgtgatgatgaagaactaattatatttgttatttaattgatgtagctcaattcttttaaagtacttatgtagccaaaaagcatttgaaatctgtatgataaaagatgtggcattcttaagaaagtatatgtagccatctccacatcactcattatgaccccttcttttataatgcttatatcttttcattaaagattacatttaaggttttataaatattgtctgttcctgaagaggaacaccactgttccaccttcattctcccttctaataactgtatatgaagaaattctgataatgtaactggaagcagtaattcatttcattccataccaggtcattactgtattactgtttcacttttgtcacatcatatgctagtatgcagaacaaaagtcttaagtactatgcccctcttctatttctgaaaggaagaaaatatatattttcttgatatca

SEQ ID NO: 10381 - DNA, 4102 bp, Homo sapiens
acagttgggacgaggattccagttttgcgtcaccgtcaaggcgggaaagttcccggctgtcggttggagggtgggtcctcgccccgccccgccccctcgggccgcccttccgcgcttccgggaggcttgtcccaagctcacggacccctcgctgggtgccggttaagaccccgctccccgtcgccagtgctatggaggcggcggcggcggtggtggcggcagaggcggaagtggaaaacgaagacggcgacagcagctgcggggatgtatgcttcatggacaaaggcttgcagagcatatcagaattatctttagattcaactcttcatgccgtcaatcttcattgcaataacatctccaagatcgaagccattgatcatatttggaatttacaacatctagatctgtcatctaatcaaataagtagaattgaaggactaaacacactgacaaaactgtgcacattaaatttgtcctgcaatttgattacaaaagtagaaggacttgaagaactaattaatctgactagactaaatgtatcttataaccacatagatgatcttagtggattgattccccttcatggaattaagcataaacttagatatattgatctacatagtaatcgtatagatagtatccatcacttacttcagtgtatggtaggattgcacttcctgaccaatcttattttggagaaagatggagacgataatcctgtctgtcgactgccagggtacagagcagttattctccagactttgccacagcttagaatcctagattgcaagaacatatttggtgaaccagtaaatttgacagaaataaattcatcacagctgcagtgcctagaaggtcttttggataatttagtttcttctgattctcccctaaatataagtgaagatgagatcattgatagaatgccagtgataacagcacctatcgatgagttagttcccttggaacagtttgcaagtacaccaagtgatgctgtgttgacgtcttttatgtctgtgtgtcaatcttctgagccagagaaaaataatcatgaaaacgatttgcagaatgagataaaacttcagaaattagatgaccaaattctacaacttctaaatgaaacttctaattcaatagataacgttcttgagaaagaccccagaccaaaaagagacacagatataacttctgaaagtgactatggaaacagaaaagaatgcaatagaaaagttcctcgaagatcaaaaatcccttatgatgccaaaaccattcaaactattaagcaccacaataaaaactacaactcttttgtaagttgtaatcgtaaaatgaaaccaccttaccttaaagaattatatgtaagctcatctttagcaaactgtcctatgttacaagaatcagaaaagccaaagactgaaataattaaagtagaccaaagtcactcagaagacaacacttaccagtcccttgttgaacagctagaccaagagagagagaagagatggagagctgagcaagccgaaaataaactcatggattatattgatgagctgcataaacatgcaaatgaaaaagaggatattcatagtctggctctacttaccacagataggctaaaggaaattatttttagagagagaaattccaaaggacaactcgaagttatggttcacaaacttcaaaatgaaattaaaaaactgactgttgaactaatgaaagcaaaagatcaacaagaggatcaccttaaacacttaagaaccctcgaaaaaacattagaaaaaatggagagacaaaaaaggcagcagcaggcagcacagataagactgatccaagaggtggaactcaaagcttcagctgccgatagagaaatatacttacttagaacttcccttcatcgagaaagagaacaagcgcaacaacttcatcaacttcttgcattgaaagaacaggaacacaggaaggaacttgaaacaagggagttttttactgatgctgacttccaggatgccttagctaaagaaatagccaaagaagagaaaaagcatgagcaaatgataaaagaataccaagagaaaattgacgtgttaagccagcagtatatggatttagaaaatgaattccgtattgctttaactgttgaagccagaagatttcaagatgttaaagatggttttgaaaatgttgcaactgagttagcaaagagcaaacatgctcttatttgggctcaacgaaaagaaaatgagtcttcctctttaattaaagatctgacctgtatggtaaaggaacaaaaaacaaaactggcagaagtttctaaattgaaacaagaaacagcagcaaatttacagaatcaaatcaacacccttgaaattttaattgaagatgacaagcagaagagtattcaaatagaacttctcaagcacgaaaaagtccagcttatttctgagctagcagccaaggaatcactaatatttggtttaaggacagaaagaaaagtatggggacatgagctggcacaacaaggatcttctctagcccaaaatcgtggaaaattggaggctcaaattgagagtttatctagagagaatgaatgtctgcgaaagacaaatgaaagtgatagtgatgcattaagaataaagtgcaaaatcatagacgaccaaactgaaactattagaaaattaaaagattgtttacaagaaaaagatgaacacatcaaaagattacaagaaaagatcacagaaatagaaaaatgcactcaagaacaacttgatgaaaaatcttcacaactggatgaggtacttgagaagttggaaaggcacaatgaaagaaaagaaaaactaaaacaacagttgaaaggaaaggaagtagaacttgaagaaatcagaaaagcttacagtacactgaatcggaagtggcatgataaaggagaacttctatgtcatcttgaaacacaagtaaaagaagtgaaagaaaaatttgaaaacaaggaaaagaaacttaaagcggaaagagacaaaagtattgaactacaaaagaatgcaatggaaaaacttcatagtatggatgatgcctttaaaagacaagttgatgcaattgttgaagctcatcaagctgaaatagcacagctggccaatgaaaagcagaagtgtattgattctgcaaatttaaaggtccatcaaattgaaaaagaaatgcgtgaacttttggaagaaacatgcaagaacaaaaaaacaatggaagcaaaaattaagcaacttgcttttgctttaaatgaaattcagcaagatatgtgatggttctgagaatgaatttaattgaaatagaccagcagacctattgtaaaaatgattaaatattgtaatagtagtaactgctatgactttgaaatgtctctttctatacatttcattatgaatatatttttaaagacttttgatcaagtatttattaattgtataggttttttataataaattgttgacaattttgtctattagaaaaaactatcataactagacttacaatatttttcttgtttctgtactatacgttgtttggtaattacacatttgcctacaaatttgtgaatgaaaagattagtattttcaccatatgaggtaaaacattttaatcattgttatcttattgtgatgatgaagaactaattatatttgttatttaattgatgtagctcaattcttttaaagtacttatgtagccaaaaagcatttgaaatctgtatgataaaagatgtggcattcttaagaaagtatatgtagccatctccacatcactcattatgaccccttcttttataatgcttatatcttttcattaaagattacatttaaggttttataaatattgtctgttcctgaagaggaacaccactgttccaccttcattctcccttctaataactgtatatgaagaaattctgataatgtaactggaagcagtaattcatttcattccataccaggtcattactgtattactgtttcacttttgtcacatcatatgctagtatgcagaacaaaagtcttaagtactatgcccctcttctatttctgaaaggaagaaaatatatattttcttgatatca

SEQ ID NO: 10382 - DNA, 1626 bp, Homo sapiens
aaggaaacttccttagtttgggcgacaagagctggcacaacaaggatcttctctagcccaaaatcgtggaaaattggaggctcaaattgagagtttatctagagagaatgaatgtctgcgaaagacaaatgaaagtgatagtgatgcattaagaataaagtgcaaaatcatagacgaccaaactgaaactattagaaaattaaaagattgtttacaagaaaaagatgaacacatcaaaagattacaagaaaagatcacagaaatagaaaaatgcactcaagaacaacttgatgaaaaatcttcacaactggatgaggtacttgagaagttggaaaggcacaatgaaagaaaagaaaaactaaaacaacagttgaaaggaaaggaagtagaacttgaagaaatcagaaaagcttacagtacactgaatcggaagtggcatgataaaggagaacttctatgtcatcttgaaacacaagtaaaagaagtgaaagaaaaatttgaaaacaaggaaaagaaacttaaagcggaaagagacaaaagtattgaactacaaaagaatgcaatggaaaaacttcatagtatggatgatgcctttaaaagacaagttgatgcaattgttgaagctcatcaagctgaaatagcacagctggccaatgaaaagcagaagtgtattgattctgcaaatttaaaggtccatcaaattgaaaaagaaatgcgtgaacttttggaagaaacatgcaagaacaaaaaaacaatggaagcaaaaattaagcaacttgcttttgctttaaatgaaattcagcaagatatgtgatggttctgagaatgaatttaattgaaatagaccagcagacctattgtaaaaatgattaaatattgtaatagtagtaactgctatgactttgaaatgtctctttctatacatttcattatgaatatatttttaaagacttttgatcaagtatttattaattgtataggttttttataataaattgttgacaattttgtctattagaaaaaactatcataactagacttacaatatttttcttgtttctgtactatacgttgtttggtaattacacatttgcctacaaatttgtgaatgaaaagattagtattttcaccatatgaggtaaaacattttaatcattgttatcttattgtgatgatgaagaactaattatatttgttatttaattgatgtagctcaattcttttaaagtacttatgtagccaaaaagcatttgaaatctgtatgataaaagatgtggcattcttaagaaagtatatgtagccatctccacatcactcattatgaccccttcttttataatgcttatatcttttcattaaagattacatttaaggttttataaatattgtctgttcctgaagaggaacaccactgttccaccttcattctcccttctaataactgtatatgaagaaattctgataatgtaactggaagcagtaattcatttcattccataccaggtcattactgtattactgtttcacttttgtcacatcatatgctagtatgcagaacaaaagtcttaagtactatgcccctcttctatttctgaaaggaagaaaatatatattttcttgatatca

SEQ ID NO: 10383 - DNA, 2294 bp, Homo sapiens
tttttgtatgtaaggatttaatgattacatgctgcagaagttgaataagtaacaagtttattatttgctttctggaactattccgggtgatgtatctggtagctgataaatttagtttattctagaaataattgactttttttaatatttcagttttcattttgaatgatttgtttccaagggtacagagcagttattctccagactttgccacagcttagaatcctagattgcaagaacatatttggtgaaccagtaaatttgacagaaataaattcatcacagctgcagtgcctagaaggtcttttggataatttagtttcttctgattctcccctaaatataagtgaagatgagatcattgatagaatgccagtgataacagcacctatcgatgagttagttcccttggaacagtttgcaagtacaccaagtgatgctgtgttgacgtcttttatgtctgtgtgtcaatcttctgagccagagaaaaataatcatgaaaacgatttgcagaatgagataaaacttcagaaattagatgaccaaattctacaacttctaaatgaaacttctaattcaatagataacgttcttgagaaagaccccagaccaaaaagagacacagatataacttctgaaagtgactatggaaacagaaaagaatgcaatagaaaagttcctcgaagatcaaaaatcccttatgatgccaaaaccattcaaactattaagcaccacaataaaaactacaactcttttgtaagttgtaatcgtaaaatgaaaccaccttaccttaaagaattatatgtaagctcatctttagcaaactgtcctatgttacaagaatcagaaaagccaaagactgaaataattaaagtagaccaaagtcactcagaagacaacacttaccagtcccttgttgaacagctagaccaagagagagagaagagatggagagctgagcaagccgaaaataaactcatggattatattgatgagctgcataaacatgcaaatgaaaaagaggatattcatagtctggctctacttaccacagataggctaaaggaaattatttttagagagagaaattccaaaggacaactcgaagttatggttcacaaacttcaaaatgaaattaaaaaactgactgttgaactaatgaaagcaaaagatcaacaagaggatcaccttaaacacttaagaaccctcgaaaaaacattagaaaaaatggagagacaaaaaaggcagcagcaggcagcacagataagactgatccaagaggtggaactcaaagcttcagctgccgatagagaaatatacttacttagaacttcccttcatcgagaaagagaacaagcgcaacaacttcatcaacttcttgcattgaaagaacaggaacacaggaaggaacttgaaacaagggagttttttactgatgctgacttccaggatgccttagctaaagaaatagccaaagaagagaaaaagcatgagcaaatgataaaagaataccaagagaaaattgacgtgttaagccagcagtatatggatttagaaaatgaattccgtattgctttaactgttgaagccagaagatttcaagatgttaaagatggttttgaaaatgttgcaactgagttagcaaagagcaaacatgctcttatttgggctcaacgaaaagaaaatgagtcttcctctttaattaaagatctgacctgtatggtaaaggaacaaaaaacaaaactggcagaagtttctaaattgaaacaagaaacagcagcaaatttacagaatcaaatcaacacccttgaaattttaattgaagatgacaagcagaagagtattcaaatagaacttctcaagcacgaaaaagtccagcttatttctgagctagcagccaaggaatcactaatatttggtttaaggacagaaagaaaagtatggggacatgagctggcacaacaaggatcttctctagcccaaaatcgtggaaaattggaggctcaaattgagagtttatctagagagaatgaatgtctgcgaaagacaaatgaaagtgatagtgatgcattaagaataaagtgcaaaatcatagacgaccaaactgaaactattagaaaattaaaagatgttcagaaaaagatgacccttcaagattcgaaaagatccaaaaaaaaaaaaaaaaaatttgggggtggccgaaagttttaacttcgtggggggcggatagaaagggaggtcagaaacggggaagggggtcccaaaaaggggggggtgaaacgggggggggtcag

SEQ ID NO: 10384 - DNA, 812 bp, Homo sapiens
tttttgtatgtaaggatttaatgattacatgctgcagaagttgaataagtaacaagtttattatttgctttctggaactattccgggtgatgtatctggtagctgataaatttagtttattctagaaataattgactttttttaatatttcagttttcattttgaatgatttgtttccaagggtacagagcagttattctccagactttgccacagcttagaatcctagattgcaagaacatatttggtgaaccagtaaatttgacagaaataaattcatcacagctgcagtgcctagaaggtcttttggataatttagtttcttctgattctcccctaaatataagtgaagatgagatcattgatagaatgccagtgataacagcacctatcgatgagttagttcccttggaacagtttgcaagtacaccaagtgatgctgtgttgacgtcttttatgtctgtgtgtcaatcttctgagccagagaaaaataatcatgaaaacgatttgcagaatgagataaaacttcagaaattagatgaccaaattctacaacttctaaatgaaacttctaattcaatagataacgttcttgagaaagaccccagaccaaaaagagacacagatataacttctgaaagtgactatggaaacagaaaagaatgcaatagaaaagttcctcgaagatcaaaaatcccttatgatgccaaaaccattcaaactattaagcaccacaataaaaactacaactcttttgtaaggtggtttcattttacgattacaacttacaaaagagttgtagtttttattcg

SEQ ID NO: 10385 - DNA, 398 bp, Homo sapiens
gccttttctctctctctctttacaaaactcaattaaaatgtgcatgtgcagtaatcttccctttcagagcgcctgtggtgattgatagagttgtttctaagtatgtttaggctcagtggaatcacttaacccattgtgggacatgcagaaatgggcaaagaaaaagaggccataaaaattatacagccagaggaggctgataatatccagaagaaaggagatacagaaagagaattgaacacatgacatataagaatgagaagggatggaaatgcatcctctatgaattgttcattgtgcccattttcaaagtgaagaaacttctagaatatgggtgaggcacagttttcgatacaaagctcattgcgtgtttaccaatgtgaaggttaattgggagg

SEQ ID NO: 10386 - DNA, 493 bp, Homo sapiens
tctaatagcttctcttccaagagaccttttttaaccagttgaactccagtaatgcccccttctctgaacggataatacttattatctttaccacttattaatcttacttcacagtttctctcataatattatttccatgagtaaactgtaagacttgaagggaagaactgtggcttatactaatttttatagtagtgtaaatgcaaaatatgtaataaacccacaataaacatagtactgtatggaaggatgaaaaaaaagatggacaagtggatgggaagggtgaccaggatcaggtcaagttacaccttgtggcatcaatggtatgttatcgcttcattaactaatatttattgggcatctactgtatacaaatactgtgctgtaatctatgagggataaaagagaaggggaaaatactgcttttgttcacaatatagataggaagacaaaacaaaagccaaacaaaccaaaagaaacaataccaacatgg

SEQ ID NO: 10387 - DNA, 549 bp, Homo sapiens
cagagccctgccaccgactcatccgaggagtccttcagcagatccccacggagaggtacggaatcgactgcatcatgaatgatgaatggatgcaaggggtgccataccctacacctttggaacctttccaactggatcccaaacatttgtcggaaaccagcactctcaaggaagaagaaaatgaggtcaaaagcactttagaacatttgggcattacagaagagcatattcgaaataaccaagggagagatgctcgcagctcaatcacaggggtctatagaattattttacatagagtccaaaggaagaaggctttggaaagtgtcccagtcatgatgctaccagaccctaaagaaagagacctcaaaaaagggtcccgtgtctacagagggataagacacacatccaaattttgctcgattttataaattgcactagactgcttgtaactaaccaagatgattgttgctgcttctaaatttttttcaaggacaacttgagtggagacatttttgtaatttttaaataaacttaaatttgagatatgca

SEQ ID NO: 10388 - DNA, 445 bp, Homo sapiens
gaactctactactttatgaatctacagatgcaataaagcgaggaaagctgaaggctggctctgcagcaaaaatgatactcatggtcaataagcctgtgatcaactacaggtgcttactatgtgccaagacctttgcttggtgcttctcatgcagaatattatttaactgccacaaaagtcctatagtatacgtatgatatcaccgttttgcaaattgtgagtctgtaactatgagaggtagagtgacttcctcaagctggtgtttaatcctgtatcagtcaatataagaaacaggctgcttaaagtcaatgcagtgcttttactttatcacacaaaagctccttttaaatatgagaaattataggaatttatttatcttccctccctggtataaataaataccatggtataagtaataaataaatgcaaatattctggctctaaa

SEQ ID NO: 10389 - DNA, 472 bp, Homo sapiens
ttccaaaactgaccctgtcaacttcagcaattttattgcacaaattaagctgtcatccatgggattagaaaagagggcattcgggcattcggcaactcctcaagaccaacctgaagaatatctgcccttgtaacctgtccatttgttcctctgatctccaggttatgataaagctctcccagaaagggtacaaatgcatgaaattgttttggagtaacttcatccccttttgcagcttgatctttaatgtcatatttcagtccgacatctttgaagtagaaattggcggaaggtgctactctctgtgctaactgtcagatgatgtcaggtaattacacaggtgagctcccattgtaagagaaatttggggctgggcacggtggctcacgcctataatcccagcactttggaaggccgaggcgggtggatcacaaggtcaggagatcgagaccatcctggctaacatggtgaa

SEQ ID NO: 10390 - DNA, 761 bp, Homo sapiens
cctgtctcaaaaaaaaaattacatataagcccggtttaaagagaggataatatgcaaccaccctagttgaaacagagtgtatcacttctttctcaccctaaatttaatgcctagtttgaaaatcagtagacaataataaagttgataagctttaggttggtaggaaagctatgtaatctatatagtgtactaaatccttatatgtttttggtaaaaaaagactttaatagctaatttggacttcagaaaatgggttaatttcacgagtgcatatcacttttgactatattagtcaagcatattattaaagtttaaaaaactctaaaacttctgtactgtttttttcttaagtgctctcttccttatttctacattactacattcacatttctgctgtcaataagccctaatggagtgataaactttaagctagtagatactgcaccatgtcttgtggtggtgttttcttaatgaaatggaagctgtacttcctgtttgtttttaaatacttttgaaacagacagttcatgtaccccatcatttagagatgcagtttgaatttccatggaaaaaggtgccaattttggattgggaaaggagctgaagccccagtcaagactttgccatttggggtaatgcagcagattcctgtgtctgtatctttccagtgtgtgtgttaatccatagtgttctgagcaccagaagggtcatgtaaatctgaagttgttattaaaggtttttctatagtgaaaaaaaaattt

SEQ ID NO: 10391 - DNA, 231 bp, Homo sapiens
tgagtaaatatggtaatgacctggttttattttcttgtgggaaactgtcacccaactggcatgactggaagacacatctcttacagaacagtgttttttctaaggatttgcattgaccacttgagagtgattaatatttacttcattttttacctttcctcctatcaccatctgtagaaaaatctgataagcagagtaaagaaataaaaagttaagaaaaagcatttactt

SEQ ID NO: 10392 - DNA, 467 bp, Homo sapiens
aaagacgtcagtgatgcactcattagactgcaaatgaaatatgtttgtacaagatataattgagtttgatatgaaaatattaggagaaaaatattaacatttaagtagttaaatagtttatcaaaatctagttaaccagttgtttaatcacagtagggaaaaagtaaattagggaattgtgatcaagaaggtagtgttttggttgggtgtggtagctcacagctataattggagtactttgggaagccgaggcaggaggttctgttgtggccaggagttcaagatcagcctgggcagcatagcaagacccatctctacaaaaaaaaaaagttagctgggtatggtggctcacacctatagtcttagctactagggaggatgaaacaggattgcttaagttcaggagttcaaggttgtagtgagctaaggagtgccagtgcactccagcctgggtgacaagaacagta

SEQ ID NO: 10393 - DNA, 900 bp, Homo sapiens
ggacccctcatagctctagttctgctggatagttggttcattactggtttactctctggaggtgtgtagccttttgggttcttgcttactgtagtggggttttgggttatatgttttggaggacccagtcttttattcctgtctccccctctctgcactgtcttaaaaatgaaagttgagacttttcagaattggcaagtgcactgagggcagaggtagtttctgtgcttatctctttgacttcctggtttcacttcaatttttgcctgttatttatttcttgtcttgtcaggttgtggttgcttttaagattataaaaatattctgtccatattttcttttagtctttttcagaaggagggttggaccaaataacattgcttgaaattaagaagccaaaacgcgttcttttttatttcactccagagtctagacctgaacctgatgtttgatatggtaactgctagccacatgtggccaattaaattgaaattaattacagttaagcgaagttgaaaggcccattcctcagttacactagtcccatttcaagtgctcattagccacatgtggctagtggctactacattgggcagcgctggtatagaacattttcatcattgcagaaagttctagtggatagatatggcttgactatcaaaacctcatcagggacttgcactggtacgtggatctgcatttgaaaaccactaatatgggtatccttgctgtttaaagtttgaattttttggaatctatatagctagacagatgattgagttcctttaatagacttactgtgaaatctatccctaaggtacagtgtagattcttagactgatttaggtggtgaaatgtgaatctgtggcacactgagtagataactattaagtattgata

SEQ ID NO: 10394 - DNA, 556 bp, Homo sapiens
atcatggcacaagctgcagtttccaccctgcccattgaagatgaggagtccatggaagatgaggagtccgttgaagatgagtctgttgaagatgagtccgcagagaacaggatggtggtgacattgctcatatcagctcttgagtccatggatcatggcacaagttgcagtttccactctgcccattgaagatgaggagtttgttgaagatgaggagtccttggagagcaggatggtggtgacattcctaatgtcagctctcgagtccacggtcagaccttctgttctcacattctgtagtttggtaggactgggcagtagataaggttgacttatttttgtagaacttacaattttatgattttcagttgtaatgagtagacctttttcgtgaatagtagttatggttaaacacctctaaccaaatgtgcatgtggagtttctacactgattttcagacaatctggatcccaactgggtatcccacaattccatcctgacactccctggagttagtgcagaccccgcaggatgggggctcagtcccaggagtgta

SEQ ID NO: 10395 - DNA, 410 bp, Homo sapiens
atatactcaatcccttcccttgatgggttagactctacagcctctgtggcaacagcccacagtgggtactcacgaatgtctactgtgtcctgctgcagctggtccagaagccacccccagaattagaatttaagcatgaaaaaatgcccagggaaatctgtgacttgttgctaaatcctaaacacagtttgtgtatccagtgctcagcagagggcttagcacatgacaggtgctcaagaaaacacctgctaatacaagggcacaatcaacacagaaacatttctaaatgtccaaaatcttttttgtaccaaagcaaaatcaaaaccaaaacaaacaaataacaacaaaaaacctcgggcagtttgttttcctgaatatttaaccaaggaagtatatcccagccctgaggg

SEQ ID NO: 10396 - DNA, 409 bp, Homo sapiens
cctgggccaagtgatcaaagctaactgcaccagggacgtcttgtggatattgggtacctctgatgcgaagagaagggcactttcccctgtgatatgtatccaaaaatccataagcccagaataattgtaagagagcatcagacaaacataaactgagggacattctacaaaatatctgataagtacccgtcaaaagtgtgaagatcgtgaaaagcaaggaaagactgaggatctatcacagattggaggagactgaatagagatgacaactaattgtatgtgagatcctggattatatcctgcaacagaaaaaggacagtagtagaaaaagtagtagaaactgaacatagtctctaatttagttcatagtgttgtgccaatgttaacttcttagtttcaataaaaaaaa

SEQ ID NO: 10397 - DNA, 3031 bp, Homo sapiens
  misc_feature (2777)..(2777): n is a, c, g, or t
  misc_feature (2827)..(2828): n is a, c, g, or t
  misc_feature (2875)..(2876): n is a, c, g, or t
  misc_feature (2881)..(2881): n is a, c, g, or t
  misc_feature (2888)..(2888): n is a, c, g, or t
  misc_feature (2903)..(2903): n is a, c, g, or t
  misc_feature (2907)..(2907): n is a, c, g, or t
  misc_feature (2913)..(2913): n is a, c, g, or t
  misc_feature (2919)..(2919): n is a, c, g, or t
  misc_feature (2923)..(2923): n is a, c, g, or t
  misc_feature (2940)..(2940): n is a, c, g, or t
  misc_feature (2979)..(2979): n is a, c, g, or t
  misc_feature (2984)..(2984): n is a, c, g, or t
atttagatgtcgggggcgggggagggtggttggcggcgggagttgctgagagggccggccgcttatccctgtttggtcccacttttctcccagcacctgcccttgttcaccgcctcttcatctacttggatttggctcgaataaaccctcagctcccggccagcgctgagagccctggcggaagagtgggtagcggtggccttaagtattaaatctgagcctgcttcttgggggagagactcgttgaaaagggagtgtgttgggggggtgttgtgcgctgaggggagttagaacttcccggtcggttacccagtgggaagctgcggggcacaaagcccagaatttgctgctaatcgctgggtgccctggagacagagggggcgtgtcctctgcggattccattctcaccttcccctcccgcttctgatctcgctgtttgctccacccttgctccccacccactatcagctccagcgggtgggggtgaagggctgtccccaggccaacacctccttccaggctttggggagtggggattctttccccggatgggcagagttccttctgcagtggcgctaccgtccgtgctgccctcctggaaacaccggggtttggggcaggaacacttcacctgaaagcaggcctgcttggcgcctcccggcacatctgtggtctcctctgcacgtcgctcgcgcagcctccttgcctggaatgtccttcgctgcccatcctcataggcccacctgggagagatcatatccatgccccctgccccaggtttgtgggtcaaggactggcactgtctggtgctgtagcactggggcacaggccacccccctgcccccaggccctgcttttcgtgcaacccccaggcacataatggccacccagctaaggctctacaagcgtaagcctgagcctcccaggtggacaaggacagaagtcacctgggggctcactcctggtctcatcggagaaacctaggcccagagaggtgggggtactaaagcaaagtcacaccacatgctcctctgatggccagggtgagcctgcagtcctctcctctcccccttactccagggtgctggggtggcccctcaggacagtgaactgactgtgtcccaggctccaggtccctggcacagctggggtcacactgacagcctgcccagaggcaccccaccttgggacccgtaccccagcagcccctgcctggctccttcttggggtgcccccaacctacaggctcagggcagataatgccagtgcttctccttggtggctggggagggggactgtccaccccctactattcgcctagtgtgggtcacgtgttttaacttctcagggaggcggggccagcatcttgactgacagcatccttgaggccttgcatggtggaaggtttggaatgcctccccctctcccctactgggggatcaacccaaatcttgaggccacatagacactgggctctggatggacagaagcaggcgcagagagaaaagctcagctaggggtgggagaacccgggaggagaggtaaccccaagagggaagggtgcctcttccactacctctgctaccagccatccccaggacagtggttcctccccaccccgcccagccctgaggactactggttggggattgcctccggagcccagcttagggaggacagtagacagtaggctttggagttgggagacagggttccgcttctgctggtgtgactggaggcctcctcgtgcgctcagaaaggtggtgaggaggctcctccaatggaggccggccccacagcccacactgttcctgaggatgggttcttctgggtgaaggagaccaagcccctcgccgaagggtgctgaaacaagtcagaagagaaagtgggaaccagtgcctctcctgggagacttgagtggggccttgtgggagtggggcctcccaacagaggcaagtggcgtaagggtctttctgctctctccctcccacgccttgctgctgttgctgtcacctgggcaggtctggggccagaggcgtgaccatgcacccacaggaaggggaccccacagctggacctagcttcaagggacatggaggggcctcgaggggccccctgctggagggagaagtaaagtccagtggcacatcctgggcaagtgttcagtttccaaaaccgagggaaatccagatacttcccaagaaaagaggttctagaacgaggattttcagctttagaaaattaaaaagctgaagtggaaaagaggatggatttcctgtttccaggatgcaaaggcctcccagaaaatcagaaacccaaatggaagtcatgaaagaaaagataggcttggtggttgcttcttcattcacctgtgaatgttagaggctctggaagaagaaggaacaggtctggagatgattaatatgatgaataaataatagtggaaattttccctgatcagaagagggcatgagtctgcacagtgaaagtgttggtagagctccaggcagggttactttaaagaaaaagacacacccttggcatctcctggtgacattcttgaaatccacagataaaatctcagcgacctcccacagaataaataaaccattgacaaaggagaaaaaaaaaaaaacattggcagcagatttctcatctgcagcactgaaagccagaggaccaaggctggcctgggcccaggattctcaaccagagcattcatactgttccccaaccagattaagaaatagattttgagccgggctcagtggcttacncctgtaatcccagcacttcgggaggctgagatgggtggatcacgaggtcnngagatcgagaccctcctggccaacatggtgaaaccccatttctaaanntatanaaattanctgggtgtggtggcncgcncctgtngtcccngctncacaggaggctgaggcnggagaatcacttaaacccgggagacagaggttgcagtgngccgngatcgcgccattgcactccggcctgggtgacagagcaagactatctc

SEQ ID NO: 10398 - DNA, 479 bp, Homo sapiens
cactactctcctctttcccagtcccacctcaaaacctcaaggccaactttgtcactctgtccttctagctctcataaaacccccaatcacagaagattaggggtggaggaggaagtgtgggccagaatcatggccccagagctcgagcctccagttgtctgtcaatcctggtcaagtctctgagctccatgtggaccacctgcagcccaggtcggccagggccttccagccagcacagtctccatgtgagtctgcctgaccaggtgtatcaagtgcacaaagatgggatgcatccttagagagaaaactctgacacctcctattctacctttgttaggaaatgaaccatgacataacaagatcatagcaaaggagaaaaacaaatggttaataaatatatattttatcaatataaatcaaagaaatgcagactaaacaatgatgtactgagtagacaaatattaaaagttattttaata

SEQ ID NO: 10399 - DNA, 305 bp, Homo sapiens
aattctgggtctcttcattaaatctcatcttgttggtaaggtgctccctgaccattctacataatacaaaacaacctgcctgccccacttctccccagcctctctgtcttgctatgcctttctccagagccggatccccatcttggtggctacctagttactgtttacctgttagctgcctggcttctccctactacaacgtaagctccgtgtgcactgctatttggttcactgctgtgtccccagtgcctagaacagtgcttggcacataaaaggcattaaatgactcttcgtgaaataaataa

SEQ ID NO: 10400 - DNA, 2168 bp, Homo sapiens
ttctttccgtcctggcttccctgcccccactgctcaccctcgcgtccaggaattgcccgccttggggagggaccgaggggcggggcggatgtcaccccatgggaagcgggccgacggccaagcgcaggggcagctgaggctgccgccgagcacgccgcgcgcacctgaccgtggagggtgtgagccgagggcccctcgctcccaggagctccgctcctgggcacaacctgcgggcgggcgggcacccggttgcgcagccccctgggtgccccagtgtcacccccttcctcccggccagtcaagcgcagaaagataccgggcgctgtgcccggcgctccctccctcctctgccccctccggagcagaggcgccccggtcgcctcccctccggctgcagcgttacacaaccgcggcggcggcgcctgccctgcagcagcgcagggcgtgacgcttcacgtggccgggctcaggtcgtagcaccgcggaccgcgagcctctctgcgttgacccagggactgagaccccggggacgtggcgtgccagcccggatcggccctctccctgcctgttgggaagttcggcggcgctgttcgcggtctgcacccagggcaggagggatgagagagacaagaaaaaaaaaccgcctgttacagggaaatcttagcaatcatgcggtcgacacgtatttcttgagccccctgctctgcactaggcgctgcactagttgatgaatccgacacggatcctgcccttgaacttgcagaacctctaggaagaggttaaattgagcaataaaggaaaggcagccctgggaaaattgtatcgaggccactggctgacagaggggaaaaacaatgagaacttgtgttgctttgtgttttgtttttaatttcattgtaaccgagatgcctaggtagagaagcgggggagaagctaacccaaagccccaagcccggggcggaaggacctcctccagcggccccagatctctgcaatctcacttaggctgccggagggccccacccacctcccccggaaaggtccgggctctgtgaccttctcactcagccgggagcagggaaaacagctgaaactccaatcccgcggtgtgagcagcgctgatacagtcagaggagggagccagtggaaactcatgactaaaataaggcctggctggggatttcactgacctctgcgctcccctgccctgcaagttcggggagttgagagatgactgtaagcccttcccactgcgcttcgggtcagtcaccccactgctgagtgacctggctgtgggaaggattgaaaaaaaaatggggtcactgccgagactgggcgaagagtagtagcctcgggtgcagttaggggatcagtcttaactggcagtgcccttgacgacctagagaactggcattcacaagttgaccaaactggcagtgtatttccttcaggtcgccttggagagctcccgcttcctgtttatatttcacaagcgtcaaactctttagcaagtgtgagaaatgcctccttttctaactgctaactggcatgtcctcacttcggggctcagagatccctccctgccagaatgtacttttgctggccaaaggcggggaccggggtccgccctggaaacgcgctttcaatcttgggcgacctgcttcattgtgtgattttaataaggatgaagggctgtcacggctgcgtcaaaaccacggttccagcaggaaataagcactgggagaggacaggacacgtacccccttccgccgacaccccccacccgatggcaggagggagcccaaaccttgcagcttccatggctcatggctcatgacaatatcattcttaaaattctttgagtttatcaatacgttttgcccttacctgccctacaactgtaaataacaaaatgtatgcatttcctactttttatttgttccgaatgtattctcaagcttcaagaacggttcccatcctaccagacttccaccgtatcaggattaaaaaacaaaacaaaactctgttattctctccatagcttatggcttttaaaaaataataatttgaacaaacaattcctacgtggcatagatctttccatcctggagaatgttactatttcagtctgtcatcttttgtagatattaaaaacctttcgtatgtca

SEQ ID NO: 10401 - DNA, 294 bp, Homo sapiens
  misc_feature (14)..(14): n is a, c, g, or t
  misc_feature (84)..(84): n is a, c, g, or t
ataaaggcaaatcntaaccctaccaataaatttttaaaaatatcctccttttccttttcctttgaaggacaagaagttttggcntctttgtcgcccccaggctgggattgcaatgggcacccatctcagccccactgcaacctctgcctccccagatcccaagtgattgtcctgcctcagcctccagagtagctgagacaggagaatctcttgaatccagaaggcagaatttacagtgagccgagataacgcctctgcactccagcctaggccatagagcgagactccatctga

SEQ ID NO: 10402 - DNA, 303 bp, Homo sapiens
gtcatatttccaacaagctgccttctttccttggggatttcttttgcattacaaagaacattatcccttcattgaacccagtttgaaagccacaagtagtttagcaaatattagaatacctgaagttactaagtgttggtgaagacgtggggagacaagcatgttatttatggaagtggacttgctatgttacccagagtactggagtgcagtggcatgatcctcaactccccaggccaagtgattctactacttcagccttgggagtggctggaaccacaggcgtgcaccaccatgcccagg

SEQ ID NO: 10403 - DNA, 349 bp, Homo sapiens
ccacatttacaaaacatttctatgaggaaataatgcccaaaaagtgtagaaaaggaatccaactaaggaaaatagattcctacattacagtctgaccagtgtctctgatgccttcctcatcaaagaaacagaagaatgactaatccaaaataatgaataatccaaaactctgtataatgaataatattaattcctcacagatacctatttgagttcctactgtgtgaattattttgccaatctctaggttcaattatgagtaattcataattcttgccctcagggagcttccattctagtaaggagatatttacagtctttctttgctgatgttgtgctaggagaaggc

SEQ ID NO: 10404 - DNA, 2565 bp, Homo sapiens
ccaatctggcggtgcaccggcgtgcccacactggcgagaagccatatgggtgccaggtgtgcgggaagcggttcagcaaaggggagcggctggtccgacaccagagaatccatacaggggagaagccctaccactgtcctgcctgcgggcgaagcttcaaccagaggtccatcctcaaccggcaccagaagacccagcaccgccaggagccgctggtgcagtgagcatagcaggtggcaggcagcaccatcattcatctttctcactgcagggccttgcggggtgcaaggtgatggctgcaggaaagcactggtcccatcgccttcccacccattcgccaacgcgggaaaggcaaggcctggcttacttagagcttccagagagcatagctgcttccatctcttacccaagtggtgctaaacaatttttcttccaatgtttgagggaagcagtctcctgcggttcagttcaggctgagattttctccttcagtggactgtctgtgtccccctgccgaacaaagctgggagtaaaggcaaaaccttgacacgtgttggtagctgggacctcatcttcctgagggctctgtcttgcctgcagggtcatagctcagactcttcccccaccccctctcttttccattgaacaaacatttattgaacatcctctgagcacctggccgtgggaatgccgtggtgaatgagagactagacgtgatgcctctgggggttgtgcgttggggatgcatgcgacagcccatgacccgaggcattctcagggtatctgtgctgtgtgcccgtgagaacatcttcccatgaccactcctgccctcctgccccgtgctggatcttccctccccagctgggatctgctcccaggcaactgtgtgaattttacattatttggagcctcatctgtgtcaggctataacattctatcctcatctgtaaaacttccccgtccattattccttgcactataacaactgtcaacacaccaactattaggaagttagtattttgctattgatcactgaataaacatcagagtattttaaaaaacagttctctagaaagaactgttataattaaaatgagtctgaaagatgaactctagtattaatgccctatatttgatggcactttatagttcataaaattaatttcaccccattctcattggacccatttcccaagtatttattgaggccctgtaacaaacatgtcaggaactcttctgggtgcttgagacacatccatgaataaaatagggggagaagctgttgacctcgtagagcttatgtctcgtggatgtacctgatcttcagaacccgtggatattcctgcaaatcctctgggcctgtattcattgctttgtcagcatcttgccctgaaatgcatttgtcacctacctcttgttactaaatggtctctgccctccagacccttgtcatccaaggcactaggggtcctggacacccactggggatgatgagctggtagcgacctgttttgcatgagtgccaagtcaggaaaaataaagatatttgtaggcattaaaaaaaaatacatttctttaaaaatgagaagatgcaatatttgtaaactgttgaagcttccttattgtgccatcacttaagggtttcatttctgtttaaagttctggaagctgcataactagcgtggactgactgctgtgtcattgtgctgtgcctttgaaccctggctgagtgagtgagtttgtcctttgttgatagtgtcctataattgcaaaatgtggtttgtcttctgatgcctcttaataccagattcttttactgagatttttttttttcattttccattgtaaataaggtaaatggtaatgactaacacaaagctgtattactcagcccactttgaaacgtggttttatcacctgttcttgttaggcagcatggtgtctaattttggcttagcaaatgacgctccttggtcttcctggctcattagctgtgcccacgaggctgcactgactgggtcgtaaatgtatctgagatgtccacacggggctgctgctgctcctctgtaatactgaggtccacatgcaaaatcagctttttttcccccgtaattatcagagcagctaggcagggctgacagccaggcagactcagtgggaggcttctggcctgagtgtggccttccccagagggtggttttccaaaggcaggtggggactggggaggcctcggggggctgcttgtcattacctgaatcacagatgctcttttgtcatacacagccagcattcctctgggtttcagcaagttggcatatcttaagcttcagaaggagctgggccttgctgactttcctatctggcctcttccctatctcctgtggggccaagagcttaggacagtgtctcagatctattcaaatgttaagaaatattttgttttctgtatttttctattctttagaaatttttttataatagataatttcaaacctatataaataaatccttatgtatttatcatttgactttattataaactcataatcaatcttgaaaaatctc

SEQ ID NO: 10405 - DNA, 667 bp, Homo sapiens
cccccccccctctttggggggaaaaatttttttgggggggggggttttttcccgggggtgttaaaaaaatgttattctgaagatgtccacacggggctgctgctgctcctctgtaatactgaggtccacatgcaaaatcagctttttttcccccgtaattatcagagcagctaggcagggctgacagccaggcagactcagtgggaggcttctggcctgagtgtggccttccccagagggtggttttccaaaggcaggtggggactggggaggcctcggggggctgcttgtcattacctgaatcacagatgctcttttgtcatacacagccagcattcctctgggtttcagcaagttggcatatcttaagcttcagaaggagctgggccttgctgactttcctatctggcctcttccctatctcctgtggggccaagagcttaggacagtgtctcagaaaagcctctaagtagggggtttttcccatgggattgtggtagtctgatttttcatatctattcaaatgttaagaaatattttgttttctgtatttttctattctttagaaatttttttataatagataatttcaaacctatataaataaatccttatgtatttatcatttgactttattataaactcataatcaatcttgaaaaatctc

SEQ ID NO: 10406 - DNA, 2621 bp, Homo sapiens
ccaatctggcggtgcaccggcgtgcccacactggcgagaagccatatgggtgccaggtgtgcgggaagcggttcagcaaaggggagcggctggtccgacaccagagaatccatacaggggagaagccctaccactgtcctgcctgcgggcgaagcttcaaccagaggtccatcctcaaccggcaccagaagacccagcaccgccaggagccgctggtgcagtgagcatagcaggtggcaggcagcaccatcattcatctttctcactgcagggccttgcggggtgcaaggtgatggctgcaggaaagcactggtcccatcgccttcccacccattcgccaacgcgggaaaggcaaggcctggcttacttagagcttccagagagcatagctgcttccatctcttacccaagtggtgctaaacaatttttcttccaatgtttgagggaagcagtctcctgcggttcagttcaggctgagattttctccttcagtggactgtctgtgtccccctgccgaacaaagctgggagtaaaggcaaaaccttgacacgtgttggtagctgggacctcatcttcctgagggctctgtcttgcctgcagggtcatagctcagactcttcccccaccccctctcttttccattgaacaaacatttattgaacatcctctgagcacctggccgtgggaatgccgtggtgaatgagagactagacgtgatgcctctgggggttgtgcgttggggatgcatgcgacagcccatgacccgaggcattctcagggtatctgtgctgtgtgcccgtgagaacatcttcccatgaccactcctgccctcctgccccgtgctggatcttccctccccagctgggatctgctcccaggcaactgtgtgaattttacattatttggagcctcatctgtgtcaggctataacattctatcctcatctgtaaaacttccccgtccattattccttgcactataacaactgtcaacacaccaactattaggaagttagtattttgctattgatcactgaataaacatcagagtattttaaaaaacagttctctagaaagaactgttataattaaaatgagtctgaaagatgaactctagtattaatgccctatatttgatggcactttatagttcataaaattaatttcaccccattctcattggacccatttcccaagtatttattgaggccctgtaacaaacatgtcaggaactcttctgggtgcttgagacacatccatgaataaaatagggggagaagctgttgacctcgtagagcttatgtctcgtggatgtacctgatcttcagaacccgtggatattcctgcaaatcctctgggcctgtattcattgctttgtcagcatcttgccctgaaatgcatttgtcacctacctcttgttactaaatggtctctgccctccagacccttgtcatccaaggcactaggggtcctggacacccactggggatgatgagctggtagcgacctgttttgcatgagtgccaagtcaggaaaaataaagatatttgtaggcattaaaaaaaaatacatttctttaaaaatgagaagatgcaatatttgtaaactgttgaagcttccttattgtgccatcacttaagggtttcatttctgtttaaagttctggaagctgcataactagcgtggactgactgctgtgtcattgtgctgtgcctttgaaccctggctgagtgagtgagtttgtcctttgttgatagtgtcctataattgcaaaatgtggtttgtcttctgatgcctcttaataccagattcttttactgagatttttttttttcattttccattgtaaataaggtaaatggtaatgactaacacaaagctgtattactcagcccactttgaaacgtggttttatcacctgttcttgttaggcagcatggtgtctaattttggcttagcaaatgacgctccttggtcttcctggctcattagctgtgcccacgaggctgcactgactgggtcgtaaatgtatctgagatgtccacacggggctgctgctgctcctctgtaatactgaggtccacatgcaaaatcagctttttttcccccgtaattatcagagcagctaggcagggctgacagccaggcagactcagtgggaggcttctggcctgagtgtggccttccccagagggtggttttccaaaggcaggtggggactggggaggcctcggggggctgcttgtcattacctgaatcacagatgctcttttgtcatacacagccagcattcctctgggtttcagcaagttggcatatcttaagcttcagaaggagctgggccttgctgactttcctatctggcctcttccctatctcctgtggggccaagagcttaggacagtgtctcagaaaagcctctaagtagggggtttttcccatgggattgtggtagtctgatttttcatatctattcaaatgttaagaaatattttgttttctgtatttttctattctttagaaatttttttataatagataatttcaaacctatataaataaatccttatgtatttatcatttgactttattataaactcataatcaatcttgaaaaatctc

SEQ ID NO: 10407 - DNA, 486 bp, Homo sapiens
taagacatgatcactaccctcaaggaacaaataagttaactgaggatgtgagagataaatcacataaagctaactaataatcctataattataataataaaagactatgcaataaagatcagaaggtagtgtattattaattgccaactaagttaggtagttcataaggaatacaaaaattagctgggcatggtggtgggcacctgtagtcccagctactccggaggctgaggcaggagaattgcttgaacctgggaggcagaggttgcagtgagtcgagttcgagccactgcactccagcccaacgacagagcgagactctgtctcaaaaaaaaaaagaaaaaagaaaaagaaaaagaaaaaagaaaagctccagagataatatgaatcctagggtaatgttatgttcctcaagatctgatttctatttacttttggtagttccaggtcattttcattagatcagggattgagatgattcaaagc

SEQ ID NO: 10408 - DNA, 420 bp, Homo sapiens
tctttgactcaattttctcacttataaaatggggataatacacttgagcatgggaggtagaggctgtagtgagctatgatcacaccactgcactctagcctggacaacatctcacccaggctagaaatctcacctttgaaatctcttaaatgataagagtggcttttgaatgctagtgagatgactggttgcaggatgggggctggtcaccagaaagaccgaggcatgatgagtgttgggactttcagccccatctcccagccaccagggaggggagagaggctgcagactgagttgatcaccaatgaccagtgtaatcaatcatgcctatgtaataaagtttccataaaaagttaaaaggataggctttattctgcaagcaatcaaataataaatctattctgctaagagaaaaacaaa

SEQ ID NO: 10409 - DNA, 266 bp, Homo sapiens
acattctctggtggcaactatagcagtaagagtcacaggatgaacagtcaggtggaggatgaccacattgagttgcctagctgaaacatgtgctctgtctatgtctgcaaagtgaaagaaagctacactatctcttcaacatagatcagtgggggaaattttatacttgggatgatttatatgaatgcatctcatcaaagttcacaacacattttttttttcagttttttattttcagtttttagagtcagggccttgctctgtcg

SEQ ID NO: 10410 - DNA, 462 bp, Homo sapiens
aaaaaatgaataaaattgataaaaccttgcaagggaaaataagaaggcaagtcatcaatatcagaaatgaagaaggaagcattgctacaacttctatagagattcaaaaagataatggaaggatatgagggcgatcaggctgtgacgcctgtcaccccactgattgccagggttgatttggctgatctggctggctaagcgggtgtccccttcctccctcaccactccacgggcatccctcccgaagctgcacgcctcgtggaagaaaatgaccatccccgaggaggaccggtctttggtcaaggatataggagtagctgtgctcccgtgatagattcttcagacacggtctcaagcttcatttgtaggagaacgtagggtagtcgagcttccaagacctcagacacatccaaatgaggtgtgacgtgtggcagtctgcttttaaaaaggaaaaaaagaaaa

SEQ ID NO: 10411 - DNA, 267 bp, Homo sapiens
tatgtattctctgaccgttttcaactattggccatgactatcattttctcccaggaatattaaattcatttaaagcccagagaacagtgttgcataaaatttgcttttaaatgatgtccttcagtgatatttattgaaggcattatcatatattctaagaatattttgattctctaacttatagaaggcaacctagctcttaatgtaatgtgattttaactttccttgtcttgtttattttcagtttggtgacttactctctccttt

SEQ ID NO: 10412 - DNA, 421 bp, Homo sapiens
agcccccgaaaacatggccagactgcttttttaagtgagtccccaaacttgttctatatcaccaggtagagccacccaaccagggtcttcggctacgcccaccagtgttctctgtctgacagaggtttcaggtctccctggaacagagctcccaagacgaaaggaaggccaccatctttgctgttcaggtgactcagccattccagccttcagccttaagaggtgaccaggggctgaagtgtgcccccagcccagcacagctgctcaacaaaaacatggccggactatatttttaagcaggtccccaattccattcctcctgaatggaagagaccgcccatccggggtcaccagccacctcctacaggtgcatttgggccagcaacaggtctgtacctccctgggatggagctctctgata

SEQ ID NO: 10413 - DNA, 5767 bp, Homo sapiens
  misc_feature (32)..(32): n is a, c, g, or t
  misc_feature (34)..(34): n is a, c, g, or t
tggtcgatctagaggtccctgttagtcaggcngnctcaaactcctgacctctggtgatcccccacttgggctcccaaagtgctgggattacaggcgtgagcaccacgcccagccacttgaagatttttcttgtttgtgatcaccttctcatactggccttactcagcttagtagagtaagcactgaattgggtaaggtaacctcacttcctaacatgtcagcttcttatcttttcttcctttacctaggtgagaagaaatttgcctgccctgagtgtcctaagcgcttcatgaggagtgaccacctgtcaaaacatatcaagacccaccagaataagaagggaggcccaggtgtagctctgagtgtgggcactttgcccctggacagtggggcaggttcagaaggcagtggcactgccactccttcagcccttattaccaccaatatggtagccatggaggccatctgtccagagggcattgcccgtcttgccaacagtggcatcaacgtcatgcaggtggcagatctgcagtccattaatatcagtggcaatggcttctgagatcaggcacccggggccagagacatatgggccataccccttaaccccgggatgcaaggtagcatgggtccaagagacatggaagagagagccatgaagcattaaaatgcatggtgttgagaagaatcaggagagggatacaagagaggagatggggtcccggcacccatctgtatcatcagtgcctctttgaaggtgggaaacattagtgaaaattctgttggtgccacgctttgatgagcatttgtttgaccccagtttcttcttacacttcttaccccagcctacccttcctgcatttctcttctcagctcttccatgatggattcccccccctttcctaaagccatcatgccttgataaatatatatgatcattgaaatactttttaacaaaaaacagattctatattattatatatatatatatatatatataaagatatatagagatgcattcacaggggttggctgggaggaggaagaccattctgtgaccaaaataccttggtcattttttttatattgccttatttccctatggctgagccttgttgtgacacatcaagcttttctgtagatgttgtcttggcttcccaccagcttaagcgttcatatgctctgcttttagttcatatatacatacataatgtttttcctttcttaattttgtctttttgtttgggatcagcttcttgcactccttccctaactcaactgttgccgtctcatcttctctcatctgatcacttcatgttttgtttttgttactgcctggatgaggcacttctgtcaattttttcaggaccttagttccagcagcagaatggaaaaatccttgaagcccaggctgatgcttgaagtaactgtggagggagtgttcaaaatactactgacgcaggcaccttcttggcgctggagagtcaaaggcatctcccttcattagctgctctgagcatcaagaattagaagtctttcagtggaattgtacaagagtccctttgaagataataatcttggctcagtttgtataaactgtcaaattttcaaataataggtagggggctttcactaggaaaatcatgtgctcagaagaggaaatgactcgtagtcaggttcaggagttagtggagtatttggactttggtactgctgtcttccaaggtagctctaagttttgatgtgtgggcttctgagtttatattctgaaaggaaatacacttcttttgaacatccccactaggttcttttccattgtcaataaggagcatcagccagtgaatctgtttcaggtttccattctgcagaactcctccaaagcatgtgctagtggcaagacagtggttcttatgatgttttcccttaacttttccttgtatgttcttgggtggttcctaagggaaagggaagcacatgatcatgggaatgatagcccagaacaaaaagaaatcttgtcttaccacagtgttttataggagagattgggagaaatcatcctgttttctctgtgacctgatttcagaagagactgatccaaaaattataacggcagggaacctagtgcatttggcactgagatttaaatgcaaccagaattgtcctcaaggcccagccataaaagcattgtctctctcgaccttctggtatcttgttagagagcttttcactgtgaggaagtgtggaaaaatagctctgtgtgtgtgtgtgtgtgtgtgtgtgtgtaatctgttaggttggggataggttttctgctagccaatattaaaagagacctgcaataaaaaaattaccctgatctgatagaaagcaagtgtttttgtatgtgtgggtgaatgtgtgttcatgcccgtatatgtctacacacagatgacaaattatatttgaaatcgttggaaaataaattcagatcaaaatgcctttcaggcccattacctagaaatctatcttaaaacctgggtatgttcctaaggtcatttctttgcttatgctaaattaattacaattatgaatggaggatattctactgtacttttttaaaaagaaactatttttgtgtttgaaagtgaaaccaacatccagatctatagcagagtccttattcttctcataaatctttttactttggctacaaatagatgatggtatgattctattatatattttatataaaatccatccaaattaagttttgggtaagtgtgttgtttaatctgaactatagtaacttaatactctaaacaatagttcactccatttggtcctttctccacagatgtaattatgttttcaactcaggaactatggcaaggaactttccccagatcaaattctattaacgctgagatacaagtcatccatgcacagccactatcataccctttattctcactgaaaggcagaactcagaacctgttattttatgtctgtaatcatgtactttggcatcttttggaggaaaggggcaggataactcactggaatgtacagtattttgctagtgcatttcaaggaatggaatcttctccagtatgaaattaccagatataaaataatgtaatgatgctgaggatataagcttttagaaggtaatttgatggtatttctttctcgaatgaaaagctgctggtttaccctcaaccctattcattagcattaccatgagtgaatttatatctaattatttccacttgccctgttctcttcacaccaaggaagctccagatccagtatcttgtttggcctcaaaacagaagcagcttcttttgtctcccagcagtagtgagccactcagtctcttccacaggaagtttggagcctacattccttgagtcaggagcttattacagaaaaaccccgtttccctgaacttttggctaacagaaattaatttaactgacatgcatattgattctgaaatttttttcctaagtttttttcatttttttgaatgagttttttaaattttttagatgaccaaaacttgcagggcaggggatgcccagaagagtggtgagatagtaaaacacttattccctcatcctttcaggttttcaggttgcccatttatattcatttacatgtcatttgactgtctcactttttacccagaacagtaacaacccacaccgtcttccttcagggatttccaactggcactctgtgggtgctacacagaatgcaatttaatggatatttctcagcctggttcagaataaattgatcctttgatcccagaaagtatatactgaagtgtgggataaagattatgattaggggagggttggagacaaaagctgtaaattactatggctgatttatttctactatatacatatatattttttgcttttgtatatcctatataggaaactaagcattgtattttttttaacaaatctaaaaaagcactatgaactacaggtgtttgactttcaaaatatattttgtattgttaatatcttcacattgtgtgaatactggaagctgcagatctttgctaggacgcaataaatttatatactttttgaggggttcttctggggtgctaatcaggcccctgttatgcttagggggagccctggtgctacttgcttgaagttttcagtgtaagtaccctgatgccttttggaccttgggatcagatcaagagttttggagatcaggtaccaaggaaataaggacagtctagctgcctcaagtgaggggccctttgcatagctctccttccccctcactgaagctgggtagcctattggggttgagagggaaaatgtgaaatctcagaatttatctcccttagaagagagccagtaacttatgtacaaggatgaaagaaaggtcgcagcagtagctttggggaaagggaggaagatatggcacttctccaaccccggaaaacattgcttttgaaaactgctgataaaatatgagccggttattacttctgtttgggagactgtgctctctgtggtgcctctcttggctctactccacagataccagacctcttctaagaggatgagcagaccagctttgaggttgacctgtttctctttgtctgccttcccaaaacaccagcccccaggaagacattaagcagccttaagcttaaattcctactccctcttccaaatttggctcacttgccttagatccaaggcagggaaaggaaaagaaggggggtctctggctttattactcccctaagtctttactctgacttccccaaacccagaaagattttctccacagtgttcatttgaaagaggagtattttgtcccattttccccttcctcattatcaaacagccccagtcttccttgtctctgctaagaaagtagaggcatgatgatctgcctctcaactgccctaagtcctagctaagtatcaggggaaaaaaaaaaaaaaaaagcctaacaaatgggattagactagggctgcaagtagtgaggattttgttgatacctctgctgggatgtgtgctttcccatatcttgccttcaggaattacactgtgccttttccccagggatatgggctctgtctacccagtgctccagtttcccggtaactgctcttgaacattgtggacaagggcaggtcttcatatttttgatcatccctttctcccagtgaaatcccatagcccttacctagagtctagggcacaaagacttcggggaagatacactgagattgacctgaggagacatctacacacaccagtggcagctgccccagggcctgcttccccttcctaagtctgtcatcctctggaagggatgggtggtgctccaatctctggtgcctaaaaacccaagtttatttctctcttaacactggcaataaccagtccacaccactgttgccttttaaaacctcttaataatctcatgctgtgtttgttttgattccaatccaattatcaccagggctgtgtgggtaaatgcttttaaatgctctctcatcttgttcttccccctcaccccccactcttaggtatgtatgatgctaatcttgtccctaagtaagtttcttcctgctccttttgtatcttcctttcttgtctttcctcctaccttttgtctcttggtgttttgggactttttttttttttttttggccttttgtacaaagattagtttcaatgtagtctgtagcctcctttgtaaaccaattaaaaagttttttaataaaaaaaaatgt

SEQ ID NO: 10414 - DNA, 4766 bp, Homo sapiens
  misc_feature (11)..(11): n is a, c, g, or t
  misc_feature (22)..(22): n is a, c, g, or t
  misc_feature (24)..(24): n is a, c, g, or t
ctcgtgcgatntcggcagcgangngggttggctgggaggaggaagaccattctgtgaccaaaataccttggtcattttttttatattgccttatttccctatggctgagccttgttgtgacacatcaagcttttctgtagatgttgtcttggcttcccaccagcttaagcgttcatatgctctgcttttagttcatatatacatacataatgtttttcctttcttaattttgtctttttgtttgggatcagcttcttgcactccttccctaactcaactgttgccgtctcatcttctctcatctgatcacttcatgttttgtttttgttactgcctggatgaggcacttctgtcaattttttcaggaccttagttccagcagcagaatggaaaaatccttgaagcccaggctgatgcttgaagtaactgtggagggagtgttcaaaatactactgacgcaggcaccttcttggcgctggagagtcaaaggcatctcccttcattagctgctctgagcatcaagaattagaagtctttcagtggaattgtacaagagtccctttgaagataataatcttggctcagtttgtataaactgtcaaattttcaaataataggtagggggctttcactaggaaaatcatgtgctcagaagaggaaatgactcgtagtcaggttcaggagttagtggagtatttggactttggtactgctgtcttccaaggtagctctaagttttgatgtgtgggcttctgagtttatattctgaaaggaaatacacttcttttgaacatccccactaggttcttttccattgtcaataaggagcatcagccagtgaatctgtttcaggtttccattctgcagaactcctccaaagcatgtgctagtggcaagacagtggttcttatgatgttttcccttaacttttccttgtatgttcttgggtggttcctaagggaaagggaagcacatgatcatgggaatgatagcccagaacaaaaagaaatcttgtcttaccacagtgttttataggagagattgggagaaatcatcctgttttctctgtgacctgatttcagaagagactgatccaaaaattataacggcagggaacctagtgcatttggcactgagatttaaatgcaaccagaattgtcctcaaggcccagccataaaagcattgtctctctcgaccttctggtatcttgttagagagcttttcactgtgaggaagtgtggaaaaatagctctgtgtgtgtgtgtgtgtgtgtgtgtgtgtaatctgttaggttggggataggttttctgctagccaatattaaaagagacctgcaataaaaaaattaccctgatctgatagaaagcaagtgtttttgtatgtgtgggtgaatgtgtgttcatgcccgtatatgtctacacacagatgacaaattatatttgaaatcgttggaaaataaattcagatcaaaatgcctttcaggcccattacctagaaatctatcttaaaacctgggtatgttcctaaggtcatttctttgcttatgctaaattaattacaattatgaatggaggatattctactgtacttttttaaaaagaaactatttttgtgtttgaaagtgaaaccaacatccagatctatagcagagtccttattcttctcataaatctttttactttggctacaaatagatgatggtatgattctattatatattttatataaaatccatccaaattaagttttgggtaagtgtgttgtttaatctgaactatagtaacttaatactctaaacaatagttcactccatttggtcctttctccacagatgtaattatgttttcaactcaggaactatggcaaggaactttccccagatcaaattctattaacgctgagatacaagtcatccatgcacagccactatcataccctttattctcactgaaaggcagaactcagaacctgttattttatgtctgtaatcatgtactttggcatcttttggaggaaaggggcaggataactcactggaatgtacagtattttgctagtgcatttcaaggaatggaatcttctccagtatgaaattaccagatataaaataatgtaatgatgctgaggatataagcttttagaaggtaatttgatggtatttctttctcgaatgaaaagctgctggtttaccctcaaccctattcattagcattaccatgagtgaatttatatctaattatttccacttgccctgttctcttcacaccaaggaagctccagatccagtatcttgtttggcctcaaaacagaagcagcttcttttgtctcccagcagtagtgagccactcagtctcttccacaggaagtttggagcctacattccttgagtcaggagcttattacagaaaaaccccgtttccctgaacttttggctaacagaaattaatttaactgacatgcatattgattctgaaatttttttcctaagtttttttcatttttttgaatgagttttttaaattttttagatgaccaaaacttgcagggcaggggatgcccagaagagtggtgagatagtaaaacacttattccctcatcctttcaggttttcaggttgcccatttatattcatttacatgtcatttgactgtctcactttttacccagaacagtaacaacccacaccgtcttccttcagggatttccaactggcactctgtgggtgctacacagaatgcaatttaatggatatttctcagcctggttcagaataaattgatcctttgatcccagaaagtatatactgaagtgtgggataaagattatgattaggggagggttggagacaaaagctgtaaattactatggctgatttatttctactatatacatatatattttttgcttttgtatatcctatataggaaactaagcattgtattttttttaacaaatctaaaaaagcactatgaactacaggtgtttgactttcaaaatatattttgtattgttaatatcttcacattgtgtgaatactggaagctgcagatctttgctaggacgcaataaatttatatactttttgaggggttcttctggggtgctaatcaggcccctgttatgcttagggggagccctggtgctacttgcttgaagttttcagtgtaagtaccctgatgccttttggaccttgggatcagatcaagagttttggagatcaggtaccaaggaaataaggacagtctagctgcctcaagtgaggggccctttgcatagctctccttccccctcactgaagctgggtagcctattggggttgagagggaaaatgtgaaatctcagaatttatctcccttagaagagagccagtaacttatgtacaaggatgaaagaaaggtcgcagcagtagctttggggaaagggaggaagatatggcacttctccaaccccggaaaacattgcttttgaaaactgctgataaaatatgagccggttattacttctgtttgggagactgtgctctctgtggtgcctctcttggctctactccacagataccagacctcttctaagaggatgagcagaccagctttgaggttgacctgtttctctttgtctgccttcccaaaacaccagcccccaggaagacattaagcagccttaagcttaaattcctactccctcttccaaatttggctcacttgccttagatccaaggcagggaaaggaaaagaaggggggtctctggctttattactcccctaagtctttactctgacttccccaaacccagaaagattttctccacagtgttcatttgaaagaggagtattttgtcccattttccccttcctcattatcaaacagccccagtcttccttgtctctgctaagaaagtagaggcatgatgatctgcctctcaactgccctaagtcctagctaagtatcaggggaaaaaaaaaaaaaaaaagcctaacaaatgggattagactagggctgcaagtagtgaggattttgttgatacctctgctgggatgtgtgctttcccatatcttgccttcaggaattacactgtgccttttccccagggatatgggctctgtctacccagtgctccagtttcccggtaactgctcttgaacattgtggacaagggcaggtcttcatatttttgatcatccctttctcccagtgaaatcccatagcccttacctagagtctagggcacaaagacttcggggaagatacactgagattgacctgaggagacatctacacacaccagtggcagctgccccagggcctgcttccccttcctaagtctgtcatcctctggaagggatgggtggtgctccaatctctggtgcctaaaaacccaagtttatttctctcttaacactggcaataaccagtccacaccactgttgccttttaaaacctcttaataatctcatgctgtgtttgttttgattccaatccaattatcaccagggctgtgtgggtaaatgcttttaaatgctctctcatcttgttcttccccctcaccccccactcttaggtatgtatgatgctaatcttgtccctaagtaagtttcttcctgctccttttgtatcttcctttcttgtctttcctcctaccttttgtctcttggtgttttgggactttttttttttttttttggccttttgtacaaagattagtttcaatgtagtctgtagcctcctttgtaaaccaattaaaaagttttttaataaaaaaaaatgt

SEQ ID NO: 10415 - DNA, 3789 bp, Homo sapiens
  misc_feature (210)..(210): n is a, c, g, or t
  misc_feature (282)..(282): n is a, c, g, or t
caaatttgtagccagttccaaacaaatttaaatattgagttgagacctgtatggaattgtgttcgcaggagataaggcttgcctttgagcctactcttgattcatgcagagtgccaataagataaatcaaccaagttttggggcctcaaaagagacaccagcaactgggccttgagaacttccatttttttgcagattgtctgcagaaantcagacagctcatcagcagcagcagctgtattgtattttacctcatcttcagagtttatgttctactgaaanaggacgtgtgtgtgtgtgtgtgtaatctgttaggttggggataggttttctgctagccaatattaaaagagacctgcaataaaaaaattaccctgatctgatagaaagcaagtgtttttgtatgtgtgggtgaatgtgtgttcatgcccgtatatgtctacacacagatgacaaattatatttgaaatcgttggaaaataaattcagatcaaaatgcctttcaggcccattacctagaaatctatcttaaaacctgggtatgttcctaaggtcatttctttgcttatgctaaattaattacaattatgaatggaggatattctactgtacttttttaaaaagaaactatttttgtgtttgaaagtgaaaccaacatccagatctatagcagagtccttattcttctcataaatctttttactttggctacaaatagatgatggtatgattctattatatattttatataaaatccatccaaattaagttttgggtaagtgtgttgtttaatctgaactatagtaacttaatactctaaacaatagttcactccatttggtcctttctccacagatgtaattatgttttcaactcaggaactatggcaaggaactttccccagatcaaattctattaacgctgagatacaagtcatccatgcacagccactatcataccctttattctcactgaaaggcagaactcagaacctgttattttatgtctgtaatcatgtactttggcatcttttggaggaaaggggcaggataactcactggaatgtacagtattttgctagtgcatttcaaggaatggaatcttctccagtatgaaattaccagatataaaataatgtaatgatgctgaggatataagcttttagaaggtaatttgatggtatttctttctcgaatgaaaagctgctggtttaccctcaaccctattcattagcattaccatgagtgaatttatatctaattatttccacttgccctgttctcttcacaccaaggaagctccagatccagtatcttgtttggcctcaaaacagaagcagcttcttttgtctcccagcagtagtgagccactcagtctcttccacaggaagtttggagcctacattccttgagtcaggagcttattacagaaaaaccccgtttccctgaacttttggctaacagaaattaatttaactgacatgcatattgattctgaaatttttttcctaagtttttttcatttttttgaatgagttttttaaattttttagatgaccaaaacttgcagggcaggggatgcccagaagagtggtgagatagtaaaacacttattccctcatcctttcaggttttcaggttgcccatttatattcatttacatgtcatttgactgtctcactttttacccagaacagtaacaacccacaccgtcttccttcagggatttccaactggcactctgtgggtgctacacagaatgcaatttaatggatatttctcagcctggttcagaataaattgatcctttgatcccagaaagtatatactgaagtgtgggataaagattatgattaggggagggttggagacaaaagctgtaaattactatggctgatttatttctactatatacatatatattttttgcttttgtatatcctatataggaaactaagcattgtattttttttaacaaatctaaaaaagcactatgaactacaggtgtttgactttcaaaatatattttgtattgttaatatcttcacattgtgtgaatactggaagctgcagatctttgctaggacgcaataaatttatatactttttgaggggttcttctggggtgctaatcaggcccctgttatgcttagggggagccctggtgctacttgcttgaagttttcagtgtaagtaccctgatgccttttggaccttgggatcagatcaagagttttggagatcaggtaccaaggaaataaggacagtctagctgcctcaagtgaggggccctttgcatagctctccttccccctcactgaagctgggtagcctattggggttgagagggaaaatgtgaaatctcagaatttatctcccttagaagagagccagtaacttatgtacaaggatgaaagaaaggtcgcagcagtagctttggggaaagggaggaagatatggcacttctccaaccccggaaaacattgcttttgaaaactgctgataaaatatgagccggttattacttctgtttgggagactgtgctctctgtggtgcctctcttggctctactccacagataccagacctcttctaagaggatgagcagaccagctttgaggttgacctgtttctctttgtctgccttcccaaaacaccagcccccaggaagacattaagcagccttaagcttaaattcctactccctcttccaaatttggctcacttgccttagatccaaggcagggaaaggaaaagaaggggggtctctggctttattactcccctaagtctttactctgacttccccaaacccagaaagattttctccacagtgttcatttgaaagaggagtattttgtcccattttccccttcctcattatcaaacagccccagtcttccttgtctctgctaagaaagtagaggcatgatgatctgcctctcaactgccctaagtcctagctaagtatcaggggaaaaaaaaaaaaaaaaagcctaacaaatgggattagactagggctgcaagtagtgaggattttgttgatacctctgctgggatgtgtgctttcccatatcttgccttcaggaattacactgtgccttttccccagggatatgggctctgtctacccagtgctccagtttcccggtaactgctcttgaacattgtggacaagggcaggtcttcatatttttgatcatccctttctcccagtgaaatcccatagcccttacctagagtctagggcacaaagacttcggggaagatacactgagattgacctgaggagacatctacacacaccagtggcagctgccccagggcctgcttccccttcctaagtctgtcatcctctggaagggatgggtggtgctccaatctctggtgcctaaaaacccaagtttatttctctcttaacactggcaataaccagtccacaccactgttgccttttaaaacctcttaataatctcatgctgtgtttgttttgattccaatccaattatcaccagggctgtgtgggtaaatgcttttaaatgctctctcatcttgttcttccccctcaccccccactcttaggtatgtatgatgctaatcttgtccctaagtaagtttcttcctgctccttttgtatcttcctttcttgtctttcctcctaccttttgtctcttggtgttttgggactttttttttttttttttggccttttgtacaaagattagtttcaatgtagtctgtagcctcctttgtaaaccaattaaaaagttttttaataaaaaaaaatgt

SEQ ID NO: 10416 - DNA, 5680 bp, Homo sapiens
  misc_feature (32)..(32): n is a, c, g, or t
  misc_feature (34)..(34): n is a, c, g, or t
tggtcgatctagaggtccctgttagtcaggcngnctcaaactcctgacctctggtgatcccccacttgggctcccaaagtgctgggattacaggcgtgagcaccacgcccagccacttgaagatttttcttgtttgtgatcaccttctcatactggccttactcagcttagtagagtaagcactgaattgggtaaggtaacctcacttcctaacatgtcagcttcttatcttttcttcctttacctaggtgagaagaaatttgcctgccctgagtgtcctaagcgcttcatgaggagtgaccacctgtcaaaacatatcaagacccaccagaataagaagggaggcccaggtgtagctctgagtgtgggcactttgcccctggacagtggggcaggttcagaaggcagtggcactgccactccttcagcccttattaccaccaatatggtagccatggaggccatctgtccagagggcattgcccgtcttgccaacagtggcatcaacgtcatgcaggtggcagatctgcagtccattaatatcagtggcaatggcttctgagatcaggcacccggggccagagacatatgggccataccccttaaccccgggatgcaaggtagcatgggtccaagagacatggaagagagagccatgaagcattaaaatgcatggtgttgagaagaatcaggagagggatacaagagaggagatggggtcccggcacccatctgtatcatcagtgcctctttgaaggtgggaaacattagtgaaaattctgttggtgccacgctttgatgagcatttgtttgaccccagtttcttcttacacttcttaccccagcctacccttcctgcatttctcttctcagctcttccatgatggattcccccccctttcctaaagccatcatgccttgataaatatatatgatcattgaaatactttttaacaaaaaacagattctatattattatatatatatatatatatatataaagatatatagagatgcattcacaggggttggctgggaggaggaagaccattctgtgaccaaaataccttggtcattttttttatattgccttatttccctatggctgagccttgttgtgacacatcaagcttttctgtagatgttgtcttggcttcccaccagcttaagcgttcatatgctctgcttttagttcatatatacatacataatgtttttcctttcttaattttgtctttttgtttgggatcagcttcttgcactccttccctaactcaactgttgccgtctcatcttctctcatctgatcacttcatgttttgtttttgttactgcctggatgaggcacttctgtcaattttttcaggaccttagttccagcagcagaatggaaaaatccttgaagcccaggctgatgcttgaagtaactgtggagggagtgttcaaaatactactgacgcaggcaccttcttggcgctggagagtcaaaggcatctcccttcattagctgctctgagcatcaagaattagaagtctttcagtggaattgtacaagagtccctttgaagataataatcttggctcagtttgtataaactgtcaaattttcaaataataggtagggggctttcactaggaaaatcatgtgctcagaagaggaaatgactcgtagtcaggttcaggagttagtggagtatttggactttggtactgctgtcttccaaggtagctctaagttttgatgtgtgggcttctgagtttatattctgaaaggaaatacacttcttttgaacatccccactaggttcttttccattgtcaataaggagcatcagccagtgaatctgtttcaggtttccattctgcagaactcctccaaagcatgtgctagtggcaagacagtggttcttatgatgttttcccttaacttttccttgtatgttcttgggtggttcctaagggaaagggaagcacatgatcatgggaatgatagcccagaacaaaaagaaatcttgtcttaccacagtgttttataggagagattgggagaaatcatcctgttttctctgtgacctgatttcagaagagactgatccaaaaattataacggcagggaacctagtgcatttggcactgagatttaaatgcaaccagaattgtcctcaaggcccagccataaaagcattgtctctctcgaccttctggtatcttgttagagagcttttcactgtgaggaagtgtggaaaaatagctctgtgtgtgtgtgtgtgtgtgtgtgtgtgtaatctgttaggttggggataggttttctgctagccaatattaaaagagacctgcaataaaaaaattaccctgatctgatagaaagcaagtgtttttgtatgtgtgggtgaatgtgtgttcatgcccgtatatgtctacacacagatgacaaattatatttgaaatcgttggaaaataaattcagatcaaaatgcctttcaggcccattacctagaaatctatcttaaaacctgggtatgttcctaaggtcatttctttgcttatgctaaattaattacaattatgaatggaggatattctactgtacttttttaaaaagaaactatttttgtgtttgaaagtgaaaccaacatccagatctatagcagagtccttattcttctcataaatctttttactttggctacaaatagatgatggtatgattctattatatattttatataaaatccatccaaattaagttttgggtaagtgtgttgtttaatctgaactatagtaacttaatactctaaacaatagttcactccatttggtcctttctccacagatgtaattatgttttcaactcaggaactatggcaaggaactttccccagatcaaattctattaacgctgagatacaagtcatccatgcacagccactatcataccctttattctcactgaaaggcagaactcagaacctgttattttatgtctgtaatcatgtactttggcatcttttggaggaaaggggcaggataactcactggaatgtacagtattttgctagtgcatttcaaggaatggaatcttctccagtatgaaattaccagatataaaataatgtaatgatgctgaggatataagcttttagaaggtaatttgatggtatttctttctcgaatgaaaagctgctggtttaccctcaaccctattcattagcattaccatgagtgaatttatatctaattatttccacttgccctgttctcttcacaccaaggaagctccagatccagtatcttgtttggcctcaaaacagaagcagcttcttttgtctcccagcagtagtgagccactcagtctcttccacaggaagtttggagcctacattccttgagtcaggagcttattacagaaaaaccccgtttccctgaacttttggctaacagaaattaatttaactgacatgcatattgattctgaaatttttttcctaagtttttttcatttttttgaatgagttttttaaattttttagatgaccaaaacttgcagggcaggggatgcccagaagagtggtgagatagtaaaacacttattccctcatcctttcaggttttcaggttgcccatttatattcatttacatgtcatttgactgtctcactttttacccagaacagtaacaacccacaccgtcttccttcagggatttccaactggcactctgtgggtgctacacagaatgcaatttaatggatatttctcagcctggttcagaataaattgatcctttgatcccagaaagtatatactgaagtgtgggataaagattatgattaggggagggttggagacaaaagctgtaaattactatggctgatttatttctactatatacatatatattttttgcttttgtatatcctatataggaaactaagcattgtattttttttaacaaatctaaaaaagcactatgaactacaggtgtttgactttcaaaatatattttgtattgttaatatcttcacattgtgtgaatactggaagctgcagatctttgctaggacgcaataaatttatatactttttgaggggttcttctggggtgctaatcaggcccctgttatgcttagggggagccctggtgctacttgcttgaagttttcagtgtaagtaccctgatgccttttggaccttgggatcagatcaagagttttggagatcaggtaccaaggaaataaggacagtctagctgcctcaagtgaggggccctttgcatagctctccttccccctcactgaagctgggtagcctattggggttgagagggaaaatgtgaaatctcagaatttatctcccttagaagagagccagtaacttatgtacaaggatgaaagaaaggtcgcagcagtagctttggggaaagggaggaagatatggcacttctccaaccccggaaaacattgcttttgaaaactgctgataaaatatgagccggttattacttctgtttgggagactgtgctctctgtggtgcctctcttggctctactccacagataccagacctcttctaagaggatgagcagaccagctttgaggttgacctgtttctctttgtctgccttcccaaaacaccagcccccaggaagacattaagcagccttaagcttaaattcctactccctcttccaaatttggctcacttgccttagatccaaggcagggaaaggaaaagaaggggggtctctggctttattactcccctaagtctttactctgacttccccaaacccagaaagattttctccacagtgttcatttgaaagaggagtattttgtcccattttccccttcctcattatcaaacagccccagtcttccttgtctctgctaagaaagtagaggcatgatgatctgcctctcaactgccctaagtcctagctaagtatcaggggaaaaaaaaaaaaaaaaagcctaacaaatgggattagactagggctgcaagtagtgaggattttgttgatacctctgctgggatgtgtgctttcccatatcttgccttcaggaattacactgtgccttttccccagggatatgggctctgtctacccagtgctccagtttcccggtaactgctcttgaacattgtggacaagggcaggtcttcatatttttgatcatccctttctcccagtgaaatcccatagcccttacctagagtctagggcacaaagacttcggggaagatacactgagattgacctgaggagacatctacacacaccagtggcagctgccccagggcctgcttccccttcctaagtctgtcatcctctggaagggatgggtggtgctccaatctctggtgcctaaaaacccaagtttatttctctcttaacactggcaataaccagtccacaccactgttgccttttaaaacctcttaataatctcatgctgtgtttgttttgattccaatccaattatcaccagggctgtgtgggtaaatgcttttaaatgctctctcatcttgttcttccccctcaccccccactcttaggtatgtatgatgctaatcttgtccctaagtaagtttcttcctgctccttttgtatcttcctttcttgtctttcctcctaccttttgtctcttgttggagcttgggtcctctatgagtcag

SEQ ID NO: 10417 - DNA, 5714 bp, Homo sapiens
  misc_feature (32)..(32): n is a, c, g, or t
  misc_feature (34)..(34): n is a, c, g, or t
tggtcgatctagaggtccctgttagtcaggcngnctcaaactcctgacctctggtgatcccccacttgggctcccaaagtgctgggattacaggcgtgagcaccacgcccagccacttgaagatttttcttgtttgtgatcaccttctcatactggccttactcagcttagtagagtaagcactgaattgggtaaggtaacctcacttcctaacatgtcagcttcttatcttttcttcctttacctaggtgagaagaaatttgcctgccctgagtgtcctaagcgcttcatgaggagtgaccacctgtcaaaacatatcaagacccaccagaataagaagggaggcccaggtgtagctctgagtgtgggcactttgcccctggacagtggggcaggttcagaaggcagtggcactgccactccttcagcccttattaccaccaatatggtagccatggaggccatctgtccagagggcattgcccgtcttgccaacagtggcatcaacgtcatgcaggtggcagatctgcagtccattaatatcagtggcaatggcttctgagatcaggcacccggggccagagacatatgggccataccccttaaccccgggatgcaaggtagcatgggtccaagagacatggaagagagagccatgaagcattaaaatgcatggtgttgagaagaatcaggagagggatacaagagaggagatggggtcccggcacccatctgtatcatcagtgcctctttgaaggtgggaaacattagtgaaaattctgttggtgccacgctttgatgagcatttgtttgaccccagtttcttcttacacttcttaccccagcctacccttcctgcatttctcttctcagctcttccatgatggattcccccccctttcctaaagccatcatgccttgataaatatatatgatcattgaaatactttttaacaaaaaacagattctatattattatatatatatatatatatatataaagatatatagagatgcattcacaggggttggctgggaggaggaagaccattctgtgaccaaaataccttggtcattttttttatattgccttatttccctatggctgagccttgttgtgacacatcaagcttttctgtagatgttgtcttggcttcccaccagcttaagcgttcatatgctctgcttttagttcatatatacatacataatgtttttcctttcttaattttgtctttttgtttgggatcagcttcttgcactccttccctaactcaactgttgccgtctcatcttctctcatctgatcacttcatgttttgtttttgttactgcctggatgaggcacttctgtcaattttttcaggaccttagttccagcagcagaatggaaaaatccttgaagcccaggctgatgcttgaagtaactgtggagggagtgttcaaaatactactgacgcaggcaccttcttggcgctggagagtcaaaggcatctcccttcattagctgctctgagcatcaagaattagaagtctttcagtggaattgtacaagagtccctttgaagataataatcttggctcagtttgtataaactgtcaaattttcaaataataggtagggggctttcactaggaaaatcatgtgctcagaagaggaaatgactcgtagtcaggttcaggagttagtggagtatttggactttggtactgctgtcttccaaggtagctctaagttttgatgtgtgggcttctgagtttatattctgaaaggaaatacacttcttttgaacatccccactaggttcttttccattgtcaataaggagcatcagccagtgaatctgtttcaggtttccattctgcagaactcctccaaagcatgtgctagtggcaagacagtggttcttatgatgttttcccttaacttttccttgtatgttcttgggtggttcctaagggaaagggaagcacatgatcatgggaatgatagcccagaacaaaaagaaatcttgtcttaccacagtgttttataggagagattgggagaaatcatcctgttttctctgtgacctgatttcagaagagactgatccaaaaattataacggcagggaacctagtgcatttggcactgagatttaaatgcaaccagaattgtcctcaaggcccagccataaaagcattgtctctctcgaccttctggtatcttgttagagagcttttcactgtgaggaagtgtggaaaaatagctctgtgtgtgtgtgtgtgtgtgtgtgtgtgtaatctgttaggttggggataggttttctgctagccaatattaaaagagacctgcaataaaaaaattaccctgatctgatagaaagcaagtgtttttgtatgtgtgggtgaatgtgtgttcatgcccgtatatgtctacacacagatgacaaattatatttgaaatcgttggaaaataaattcagatcaaaatgcctttcaggcccattacctagaaatctatcttaaaacctgggtatgttcctaaggtcatttctttgcttatgctaaattaattacaattatgaatggaggatattctactgtacttttttaaaaagaaactatttttgtgtttgaaagtgaaaccaacatccagatctatagcagagtccttattcttctcataaatctttttactttggctacaaatagatgatggtatgattctattatatattttatataaaatccatccaaattaagttttgggtaagtgtgttgtttaatctgaactatagtaacttaatactctaaacaatagttcactccatttggtcctttctccacagatgtaattatgttttcaactcaggaactatggcaaggaactttccccagatcaaattctattaacgctgagatacaagtcatccatgcacagccactatcataccctttattctcactgaaaggcagaactcagaacctgttattttatgtctgtaatcatgtactttggcatcttttggaggaaaggggcaggataactcactggaatgtacagtattttgctagtgcatttcaaggaatggaatcttctccagtatgaaattaccagatataaaataatgtaatgatgctgaggatataagcttttagaaggtaatttgatggtatttctttctcgaatgaaaagctgctggtttaccctcaaccctattcattagcattaccatgagtgaatttatatctaattatttccacttgccctgttctcttcacaccaaggaagctccagatccagtatcttgtttggcctcaaaacagaagcagcttcttttgtctcccagcagtagtgagccactcagtctcttccacaggaagtttggagcctacattccttgagtcaggagcttattacagaaaaaccccgtttccctgaacttttggctaacagaaattaatttaactgacatgcatattgattctgaaatttttttcctaagtttttttcatttttttgaatgagttttttaaattttttagatgaccaaaacttgcagggcaggggatgcccagaagagtggtgagatagtaaaacacttattccctcatcctttcaggttttcaggttgcccatttatattcatttacatgtcatttgactgtctcactttttacccagaacagtaacaacccacaccgtcttccttcagggatttccaactggcactctgtgggtgctacacagaatgcaatttaatggatatttctcagcctggttcagaataaattgatcctttgatcccagaaagtatatactgaagtgtgggataaagattatgattaggggagggttggagacaaaagctgtaaattactatggctgatttatttctactatatacatatatattttttgcttttgtatatcctatataggaaactaagcattgtattttttttaacaaatctaaaaaagcactatgaactacaggtgtttgactttcaaaatatattttgtattgttaatatcttcacattgtgtgaatactggaagctgcagatctttgctaggacgcaataaatttatatactttttgaggggttcttctggggtgctaatcaggcccctgttatgcttagggggagccctggtgctacttgcttgaagttttcagtgtaagtaccctgatgccttttggaccttgggatcagatcaagagttttggagatcaggtaccaaggaaataaggacagtctagctgcctcaagtgaggggccctttgcatagctctccttccccctcactgaagctgggtagcctattggggttgagagggaaaatgtgaaatctcagaatttatctcccttagaagagagccagtaacttatgtacaaggatgaaagaaaggtcgcagcagtagctttggggaaagggaggaagatatggcacttctccaaccccggaaaacattgcttttgaaaactgctgataaaatatgagccggttattacttctgtttgggagactgtgctctctgtggtgcctctcttggctctactccacagataccagacctcttctaagaggatgagcagaccagctttgaggttgacctgtttctctttgtctgccttcctccctcttccaaatttggctcacttgccttagatccaaggcagggaaaggaaaagaaggggggtctctggctttattactcccctaagtctttactctgacttccccaaacccagaaagattttctccacagtgttcatttgaaagaggagtattttgtcccattttccccttcctcattatcaaacagccccagtcttccttgtctctgctaagaaagtagaggcatgatgatctgcctctcaactgccctaagtcctagctaagtatcaggggaaaaaaaaaaaaaaaaagcctaacaaatgggattagactagggctgcaagtagtgaggattttgttgatacctctgctgggatgtgtgctttcccatatcttgccttcaggaattacactgtgccttttccccagggatatgggctctgtctacccagtgctccagtttcccggtaactgctcttgaacattgtggacaagggcaggtcttcatatttttgatcatccctttctcccagtgaaatcccatagcccttacctagagtctagggcacaaagacttcggggaagatacactgagattgacctgaggagacatctacacacaccagtggcagctgccccagggcctgcttccccttcctaagtctgtcatcctctggaagggatgggtggtgctccaatctctggtgcctaaaaacccaagtttatttctctcttaacactggcaataaccagtccacaccactgttgccttttaaaacctcttaataatctcatgctgtgtttgttttgattccaatccaattatcaccagggctgtgtgggtaaatgcttttaaatgctctctcatcttgttcttccccctcaccccccactcttaggtatgtatgatgctaatcttgtccctaagtaagtttcttcctgctccttttgtatcttcctttcttgtctttcctcctaccttttgtctcttggtgttttgggactttttttttttttttttggccttttgtacaaagattagtttcaatgtagtctgtagcctcctttgtaaaccaattaaaaagttttttaataaaaaaaaatgt

SEQ ID NO: 10418 - DNA, 2744 bp, Homo sapiens
  misc_feature (32)..(32): n is a, c, g, or t
  misc_feature (34)..(34): n is a, c, g, or t
tggtcgatctagaggtccctgttagtcaggcngnctcaaactcctgacctctggtgatcccccacttgggctcccaaagtgctgggattacaggcgtgagcaccacgcccagccacttgaagatttttcttgtttgtgatcaccttctcatactggccttactcagcttagtagagtaagcactgaattgggtaaggtaacctcacttcctaacatgtcagcttcttatcttttcttcctttacctaggtgagaagaaatttgcctgccctgagtgtcctaagcgcttcatgaggagtgaccacctgtcaaaacatatcaagacccaccagaataagaagggaggcccaggtgtagctctgagtgtgggcactttgcccctggacagtggggcaggttcagaaggcagtggcactgccactccttcagcccttattaccaccaatatggtagccatggaggccatctgtccagagggcattgcccgtcttgccaacagtggcatcaacgtcatgcaggtggcagatctgcagtccattaatatcagtggcaatggcttctgagatcaggcacccggggccagagacatatgggccataccccttaaccccgggatgcaaggtagcatgggtccaagagacatggaagagagagccatgaagcattaaaatgcatggtgttgagaagaatcaggagagggatacaagagaggagatggggtcccggcacccatctgtatcatcagtgcctctttgaaggtgggaaacattagtgaaaattctgttggtgccacgctttgatgagcatttgtttgaccccagtttcttcttacacttcttaccccagcctacccttcctgcatttctcttctcagctcttccatgatggattcccccccctttcctaaagccatcatgccttgataaatatatatgatcattgaaatactttttaacaaaaaacagattctatattattatatatatatatatatatatataaagatatatagagatgcattcacaggggttggctgggaggaggaagaccattctgtgaccaaaataccttggtcattttttttatattgccttatttccctatggctgagccttgttgtgacacatcaagcttttctgtagatgttgtcttggcttcccaccagcttaagcgttcatatgctctgcttttagttcatatatacatacataatgtttttcctttcttaattttgtctttttgtttgggatcagcttcttgcactccttccctaactcaactgttgccgtctcatcttctctcatctgatcacttcatgttttgtttttgttactgcctggatgaggcacttctgtcaattttttcaggaccttagttccagcagcagaatggaaaaatccttgaagcccaggctgatgcttgaagtaactgtggagggagtgttcaaaatactactgacgcaggcaccttcttggcgctggagagtcaaaggcatctcccttcattagctgctctgagcatcaagaattagaagtctttcagtggaattgtacaagagtccctttgaagataataatcttggctcagtttgtataaactgtcaaattttcaaataataggtagggggctttcactaggaaaatcatgtgctcagaagaggaaatgactcgtagtcaggttcaggagttagtggagtatttggactttggtactgctgtcttccaaggtagctctaagttttgatgtgtgggcttctgagtttatattctgaaaggaaatacacttcttttgaacatccccactaggttcttttccattgtcaataaggagcatcagccagtgaatctgtttcaggtttccattctgcagaactcctccaaagcatgtgctagtggcaagacagtggttcttatgatgttttcccttaacttttccttgtatgttcttgggtggttcctaagggaaagggaagcacatgatcatgggaatgatagcccagaacaaaaagaaatcttgtcttaccacagtgttttataggagagattgggagaaatcatcctgttttctctgtgacctgatttcagaagagactgatccaaaaattataacggcagggaacctagtgcatttggcactgagatttaaatgcaaccagaattgtcctcaaggcccagccataaaagcattgtctctctcgaccttctggtatcttgttagagagcttttcactgtgaggaagtgtggaaaaatagctctgtgtgtgtgtgtgtgtgtgtgtgtgtgtaatctgttaggttggggataggttttctgctagccaatattaaaagagacctgcaataaaaaaattaccctgatctgatagaaagcaagtgtttttgtatgtgtgggtgaatgtgtgttcatgcccgtatatgtctacacacagatgacaaattatatttgaaatcgttggaaaataaattcagatcaaaatgcctttcaggcccattacctagaaatctatcttaaaacctgggtatgttcctaaggtcatttctttgcttatgctaaattaattacaattatgaatggaggatattctactgtacttttttaaaaagaaactatttttgtgtttgaaagtgaaaccaacatccagatctatagcagagtccttattcttctcataaatctttttactttggctacaaatagatgatggtatgattctattatatattttatataaaatccatccaaatt

SEQ ID NO: 10419 - DNA, 849 bp, Homo sapiens
aacaagatgagagagcatttaaaagcatttacccacacagccctggtgataattggattggaatcaaaacaaacacagcatgagattattaagaggttttaaaaggcaacagtggtgtggactggttattgccagtgttaagagagaaataaacttgggtttttaggcaccaggatatgggctctgtctacccagtgctccagtttcccggtaactgctcttgaacattgtggacaagggcaggtcttcatatttttgatcatccctttctcccagtgaaatcccatagcccttacctagagtctagggcacaaagacttcggggaagatacactgagattgacctgaggagacatctacacacaccagtggcagctgccccagggcctgcttccccttcctaagtctgtcatcctctggaagggatgggtggtgctccaatctctggtgcctaaaaacccaagtttatttctctcttaacactggcaataaccagtccacaccactgttgccttttaaaacctcttaataatctcatgctgtgtttgttttgattccaatccaattatcaccagggctgtgtgggtaaatgcttttaaatgctctctcatcttgttcttccccctcaccccccactcttaggtatgtatgatgctaatcttgtccctaagtaagtttcttcctgctccttttgtatcttcctttcttgtctttcctcctaccttttgtctcttggtgttttgggactttttttttttttttttggccttttgtacaaagattagtttcaatgtagtctgtagcctcctttgtaaaccaattaaaaagttttttaataaaaaaaaatgt

SEQ ID NO: 10420 - DNA, 5736 bp, Homo sapiens
  misc_feature (32)..(32): n is a, c, g, or t
  misc_feature (34)..(34): n is a, c, g, or t
tggtcgatctagaggtccctgttagtcaggcngnctcaaactcctgacctctggtgatcccccacttgggctcccaaagtgctgggattacaggcgtgagcaccacgcccagccacttgaagatttttcttgtttgtgatcaccttctcatactggccttactcagcttagtagagtaagcactgaattgggtaaggtaacctcacttcctaacatgtcagcttcttatcttttcttcctttacctaggtgagaagaaatttgcctgccctgagtgtcctaagcgcttcatgaggagtgaccacctgtcaaaacatatcaagacccaccagaataagaagggaggcccaggtgtagctctgagtgtgggcactttgcccctggacagtggggcaggttcagaaggcagtggcactgccactccttcagcccttattaccaccaatatggtagccatggaggccatctgtccagagggcattgcccgtcttgccaacagtggcatcaacgtcatgcaggtggcagatctgcagtccattaatatcagtggcaatggcttctgagatcaggcacccggggccagagacatatgggccataccccttaaccccgggatgcaaggtagcatgggtccaagagacatggaagagagagccatgaagcattaaaatgcatggtgttgagaagaatcaggagagggatacaagagaggagatggggtcccggcacccatctgtatcatcagtgcctctttgaaggtgggaaacattagtgaaaattctgttggtgccacgctttgatgagcatttgtttgaccccagtttcttcttacacttcttaccccagcctacccttcctgcatttctcttctcagctcttccatgatggattcccccccctttcctaaagccatcatgccttgataaatatatatgatcattgaaatactttttaacaaaaaacagattctatattattatatatatatatatatatatataaagatatatagagatgcattcacaggggttggctgggaggaggaagaccattctgtgaccaaaataccttggtcattttttttatattgccttatttccctatggctgagccttgttgtgacacatcaagcttttctgtagatgttgtcttggcttcccaccagcttaagcgttcatatgctctgcttttagttcatatatacatacataatgtttttcctttcttaattttgtctttttgtttgggatcagcttcttgcactccttccctaactcaactgttgccgtctcatcttctctcatctgatcacttcatgttttgtttttgttactgcctggatgaggcacttctgtcaattttttcaggaccttagttccagcagcagaatggaaaaatccttgaagcccaggctgatgcttgaagtaactgtggagggagtgttcaaaatactactgacgcaggcaccttcttggcgctggagagtcaaaggcatctcccttcattagctgctctgagcatcaagaattagaagtctttcagtggaattgtacaagagtccctttgaagataataatcttggctcagtttgtataaactgtcaaattttcaaataataggtagggggctttcactaggaaaatcatgtgctcagaagaggaaatgactcgtagtcaggttcaggagttagtggagtatttggactttggtactgctgtcttccaaggtagctctaagttttgatgtgtgggcttctgagtttatattctgaaaggaaatacacttcttttgaacatccccactaggttcttttccattgtcaataaggagcatcagccagtgaatctgtttcaggtttccattctgcagaactcctccaaagcatgtgctagtggcaagacagtggttcttatgatgttttcccttaacttttccttgtatgttcttgggtggttcctaagggaaagggaagcacatgatcatgggaatgatagcccagaacaaaaagaaatcttgtcttaccacagtgttttataggagagattgggagaaatcatcctgttttctctgtgacctgatttcagaagagactgatccaaaaattataacggcagggaacctagtgcatttggcactgagatttaaatgcaaccagaattgtcctcaaggcccagccataaaagcattgtctctctcgaccttctggtatcttgttagagagcttttcactgtgaggaagtgtggaaaaatagctctgtgtgtgtgtgtgtgtgtgtgtgtgtgtaatctgttaggttggggataggttttctgctagccaatattaaaagagacctgcaataaaaaaattaccctgatctgatagaaagcaagtgtttttgtatgtgtgggtgaatgtgtgttcatgcccgtatatgtctacacacagatgacaaattatatttgaaatcgttggaaaataaattcagatcaaaatgcctttcaggcccattacctagaaatctatcttaaaacctgggtatgttcctaaggtcatttctttgcttatgctaaattaattacaattatgaatggaggatattctactgtacttttttaaaaagaaactatttttgtgtttgaaagtgaaaccaacatccagatctatagcagagtccttattcttctcataaatctttttactttggctacaaatagatgatggtatgattctattatatattttatataaaatccatccaaattaagttttgggtaagtgtgttgtttaatctgaactatagtaacttaatactctaaacaatagttcactccatttggtcctttctccacagatgtaattatgttttcaactcaggaactatggcaaggaactttccccagatcaaattctattaacgctgagatacaagtcatccatgcacagccactatcataccctttattctcactgaaaggcagaactcagaacctgttattttatgtctgtaatcatgtactttggcatcttttggaggaaaggggcaggataactcactggaatgtacagtattttgctagtgcatttcaaggaatggaatcttctccagtatgaaattaccagatataaaataatgtaatgatgctgaggatataagcttttagaaggtaatttgatggtatttctttctcgaatgaaaagctgctggtttaccctcaaccctattcattagcattaccatgagtgaatttatatctaattatttccacttgccctgttctcttcacaccaaggaagctccagatccagtatcttgtttggcctcaaaacagaagcagcttcttttgtctcccagcagtagtgagccactcagtctcttccacaggaagtttggagcctacattccttgagtcaggagcttattacagaaaaaccccgtttccctgaacttttggctaacagaaattaatttaactgacatgcatattgattctgaaatttttttcctaagtttttttcatttttttgaatgagttttttaaattttttagatgaccaaaacttgcagggcaggggatgcccagaagagtggtgagatagtaaaacacttattccctcatcctttcaggttttcaggttgcccatttatattcatttacatgtcatttgactgtctcactttttacccagaacagtaacaacccacaccgtcttccttcagggatttccaactggcactctgtgggtgctacacagaatgcaatttaatggatatttctcagcctggttcagaataaattgatcctttgatcccagaaagtatatactgaagtgtgggataaagattatgattaggggagggttggagacaaaagctgtaaattactatggctgatttatttctactatatacatatatattttttgcttttgtatatcctatataggaaactaagcattgtattttttttaacaaatctaaaaaagcactatgaactacaggtgtttgactttcaaaatatattttgtattgttaatatcttcacattgtgtgaatactggaagctgcagatctttgctaggacgcaataaatttatatactttttgaggggttcttctggggtgctaatcaggcccctgttatgcttagggggagccctggtgctacttgcttgaagttttcagtgtaagtaccctgatgccttttggaccttgggatcagatcaagagttttggagatcaggtaccaaggaaataaggacagtctagctgcctcaagtgaggggccctttgcatagctctccttccccctcactgaagctgggtagcctattggggttgagagggaaaatgtgaaatctcagaatttatctcccttagaagagagccagtaacttatgtacaaggatgaaagaaaggtcgcagcagtagctttggggaaagggaggaagatatggcacttctccaaccccggaaaacattgcttttgaaaactgctgataaaatatgagccggttattacttctgtttgggagactgtgctctctgtggtgcctctcttggctctactccacagataccagacctcttctaagaggatgagcagaccagctttgaggttgacctgtttctctttgtctgccttcccaaaacaccagcccccaggaagacattaagcagccttaagcttaaattcctactccctcttccaaatttggctcacttgccttagatccaaggcagggaaaggaaaagaaggggggtctctggctttattactccagaaagattttctccacagtgttcatttgaaagaggagtattttgtcccattttccccttcctcattatcaaacagccccagtcttccttgtctctgctaagaaagtagaggcatgatgatctgcctctcaactgccctaagtcctagctaagtatcaggggaaaaaaaaaaaaaaaaagcctaacaaatgggattagactagggctgcaagtagtgaggattttgttgatacctctgctgggatgtgtgctttcccatatcttgccttcaggaattacactgtgccttttccccagggatatgggctctgtctacccagtgctccagtttcccggtaactgctcttgaacattgtggacaagggcaggtcttcatatttttgatcatccctttctcccagtgaaatcccatagcccttacctagagtctagggcacaaagacttcggggaagatacactgagattgacctgaggagacatctacacacaccagtggcagctgccccagggcctgcttccccttcctaagtctgtcatcctctggaagggatgggtggtgctccaatctctggtgcctaaaaacccaagtttatttctctcttaacactggcaataaccagtccacaccactgttgccttttaaaacctcttaataatctcatgctgtgtttgttttgattccaatccaattatcaccagggctgtgtgggtaaatgcttttaaatgctctctcatcttgttcttccccctcaccccccactcttaggtatgtatgatgctaatcttgtccctaagtaagtttcttcctgctccttttgtatcttcctttcttgtctttcctcctaccttttgtctcttggtgttttgggactttttttttttttttttggccttttgtacaaagattagtttcaatgtagtctgtagcctcctttgtaaaccaattaaaaagttttttaataaaaaaaaatgt

SEQ ID NO: 10421 - DNA, 1413 bp, Homo sapiens
agcggacgggctacctgcgcctgggctgccggtgacctgggccgagccctcccggtcggctaagattgctgaggaggcggcgggtagctggcaggcgccgacttccgaaggccgccgtccgggcgaggtgtcctcatgacttctcttgtggaccatgtccgtgatcttttttgcctgcgtggtacgggtaagggatggactgcccctctcagcctctactgatttttaccacacccaagattttttggaatggaggagacggctcaagagtttagccttgcgactggcccagtatccaggtcgaggttctgcagaaggttgtgactttagtatacatttttcttctttcggggacgtggcctgcatggctatctgctcctgccagtgtccagcagccatggccttctgcttcctggagaccctgtggtgggaattcacagcttcctatgacactacctgcattggcctagcctccaggccatacgcttttcttgagtttgacagcatcattcagaaagtgaagtggcattttaactatgtaagttcctctcagatggagtgcagcttggaaaaaattcaggaggagctcaagttgcagcctccagcggttctcactctggaggacacagatgtggcaaatggggtgatgaatggtcacacaccgatgcacttggagcctgctcctaatttccgaatggaaccagtgacagccctgggtatcctctccctcattctcaacatcatgtgtgctgccctgaatctcattcgaggagttcaccttgcagaacattctttacaggttgcccatgaggaaattggaaacattctggcttttcttgttcctttcgtagcctgcattttccagtgttatttgtacctgttctacagtccagccaggactatgaaggtggtgcttatgctgctctttatttgcctgggcaacatgtacctgcacgggctgaggaacctctggcaaatccttttccacataggagtggcttttctgtcttcatatcagatactaacaaggcagcttcaggagaagcagtctgactgtggagtatgaggatgacactgtgatgaatggattctttgattttcttttgaggatcaatctatgtttctctttctgcttctctactttacactccagtttccatccttttcagccaactggactgaaaaaccaggaattggggatgttaaacagttgcagtggaagtcatgaggttgcttgatacccagccttggttctgtgccaagcattactgcaggatctccagccagttcagcacgtttacctaggacagctggatctgggggctcatccagaaagagctttattggaagagagaaaggaaatattttggtcttttaagttgaatgatacagtaaaccacttgattcaataac

SEQ ID NO: 10422 - DNA, 1158 bp, Homo sapiens
agaggagttgtctggagctaagggacatcactttgatggttgctctttcttcagtaacggaggttcctgggagagcaagcgggggagggggggttgaagagtgggagatctggggagcatgcaggatatttggaagttgattttgggggagagctggagagagagctgccttggcaaataggagcgctgaaaggtgttgaggacctagttgaagttgacaatgtatgtagcactgatctgtgtggttgtgagattttgtccagcagcacttagagccaagaagcagattcagagaagacagaaggttggattcttccaggattgtagtgctgccagatgggtgttactatccttctagttatgccagaaagataactgtgcaaggaatataagtatattgggaagaatgtgatggaggtgataaaccctgaactctcagctgatggggaaggaaatgaagactcgatggagcttataaataaaacaaagtagagggacaaatgaactggaagtttctgcaggctagagaaaccatgaaaggaattcagagaatagcagaaggacagatgaaagatcaggtgtctgcatttataacttcagaggtggagctcttctgtggtccagggtgttaccctaggagtggaggactgaagaggactggaagagaaagactctggagttgactgtgaacctggagccaaagtgaacaatgattggagatgagagctaggactttaggtactacatctcacccctgttgtccaatctaccatggtgcctgaaccacaccagttgcaccagtcagagagtgtaaggtcctgttctaaagcactcgcaccacaagttttgagagcccaattccccatatttgtttgtttgttttgttttgttttgtttgttttttgagatggagtttcgctcttgtaggtcaggctggagtgcaatggtgcgatctcggcccactgcagcctcctcctcccaggttcaagtgattctcctgcctcagcctcccaagtagctgggatcacagatgtccaccatcacgcccggctaatttctccggacgtgagaattacaggcttggatctcaaaccgccgcggtgagagccgggaggtgggaagaaagttgggaggcgcgcgcccccgtcacactccctc

SEQ ID NO: 10423 - DNA, 889 bp, Homo sapiens
agaggagttgtctggagctaagggacatcactttgatggttgctctttcttcagtaacggaggttcctgggagagcaagcgggggagggggggttgaagagtgggagatctggggagcatgcaggatatttggaagttgattttgggggagagctggagagagagctgccttggcaaataggagcgctgaaaggtgttgaggacctagttgaagttgacaatgtatgtagcactgatctgtgtggttgtgagattttgtccagcagcacttagagccaagaagcagattcagagaagacagaaggttggattcttccaggattgtagtgctgccagatgggtgttactatccttctagttatgccagaaagataactgtgcaaggaatataagtatattgggaagaatgtgatggaggtgataaaccctgaactctcagctgatggggaaggaaatgaagactcgatggagcttataaataaaacaaagtagagggacaaatgaactggaagtttctgcaggctagagaaaccatgaaaggaattcagagaatagcagaaggacagatgaaagatcaggtgtctgcatttataacttcagaggtggagctcttctgtggtccagggtgttaccctaggagtggaggactgaagaggactggaagagaaagactctggagttgactgtgaacctggagccaaagtgaacaatgattggagatgagagctaggactttaggtactacatctcacccctgttgtccaatctaccatggtgcctgaaccacaccagttgcaccagtcagagagtgtaaggtcctgttctaaagcactccagcctgacctacaagagcgaaactccatctcaaaaaacaaacaaaacaaaacaa

SEQ ID NO: 10424 - DNA, 423 bp, Homo sapiens
taatggaatggtgataggtgagggaaataattttcccattgatacagggtaactcacctctacttggctttgtgtgggaaggaaaaataaatttcacctaagaaattgaaatgttgttcttgcgcctcgtaaaaggttgaagttggagtgtatactccccaaagtctaggaattcctaagccaaggttgaaacatcagtattggtcccagagtgatgacactgctatggtagccagccagagcaaatgcagaaccacactggaagaagtgtgccacaacttgggcttcaggggattcttacaaaaaaaagtcccatagggatgagttctcagcaaaaaggacaaaacacaagaggagacattccacttcttctttgccaaactgaactgccgactctatcgatcccttaccttcaatgagacc

SEQ ID NO: 10425 - DNA, 1554 bp, Homo sapiens
agcggacgggctacctgcgcctgggctgccggtgacctgggccgagccctcccggtcggctaagattgctgaggaggcggcgggtagctggcaggcgccgacttccgaaggccgccgtccgggcgaggtgtcctcatgacttctcttgtggaccatgtccgtgatcttttttgcctgcgtggtacgggtaagggatggactgcccctctcagcctctactgatttttaccacacccaagattttttggaatggaggagacggctcaagagtttagccttgcgactggcccagtatccaggtcgaggttctgcagaaggttgtgactttagtatacatttttcttctttcggggacgtggcctgcatggctatctgctcctgccagtgtccagcagccatggccttctgcttcctggagaccctgtggtgggaattcacagcttcctatgacactacctgcattggcctagcctccaggccatacgcttttcttgagtttgacagcatcattcagaaagtgaagtggcattttaactatgtaagttcctctcagatggagtgcagcttggaaaaaattcaggaggagctcaagttgcagcctccagcggttctcactctggaggacacagatgtggcaaatggggtgatgaatggtcacacaccgatgcacttggagcctgctcctaatttccgaatggaaccagtgacagccctgggtatcctctccctcattctcaacatcatgtgtgctgccctgaatctcattcgaggagttcaccttgcagaacattctttacaggttgcccatgaggaaattggaaacattctggcttttcttgttcctttcgtagcctgcattttccaggatccaaggagctggttctgctggttggaccaaacctcgtgagccagccacccctgacccaaatgaggagagctctgattctcccatccgggagcagtgatgtcaaacttctgctgctggggaaatctcatcagcagggagcctgtggaaaagggcatgtcagtgaaatctgggaatggctggattcggaaacatctgcccatgtgtattgatggcagagctgttgcccacaagcgccttttatttagggtaaaattaacaaatccattctattcctctgacccatgcttagtacatatgacctttaacccttacatttatatgattctggggttgcttcagaagtgttatttcatgaatcattcatatgatttgatcccccaggattctattttgtttaatgggcttttctactaaaagcataaaatactgaggctgatttagtcagggcaaaaccatttactttacatattcgttttcaatacttgctgttcatgttacacaagcttcttacggttttcttgtaacaataaatattttgagtaaataatgggtacattttaacaaactcagtagtacaacctaaacttgtataaaagtgtgtaaaaatgtatagccatttatatcctatgtataaattaaatgaggtggcttcagaaatggcagaataaatctaaagtgtttattaa

SEQ ID NO: 10426 - DNA, 1565 bp, Homo sapiens
atcactctgtcacgcggagcctccccgcctccagacgtcagtccggttgctaccccggcaggaatcgagcttagatcacgaaggctccttctcacctccggacgtgagaattacaggcttggatctcaaaccgccgcggtgtcctcatgacttctcttgtggaccatgtccgtgatcttttttgcctgcgtggtacgggtaagggatggactgcccctctcagcctctactgatttttaccacacccaagattttttggaatggaggagacggctcaagagtttagccttgcgactggcccagtatccaggtcgaggttctgcagaaggttgtgactttagtatacatttttcttctttcggggacgtggcctgcatggctatctgctcctgccagtgtccagcagccatggccttctgcttcctggagaccctgtggtgggaattcacagcttcctatgacactacctgcattggcctagcctccaggccatacgcttttcttgagtttgacagcatcattcagaaagtgaagtggcattttaactatgtaagttcctctcagatggagtgcagcttggaaaaaattcaggaggagctcaagttgcagcctccagcggttctcactctggaggacacagatgtggcaaatggggtgatgaatggtcacacaccgatgcacttggagcctgctcctaatttccgaatggaaccagtgacagccctgggtatcctctccctcattctcaacatcatgtgtgctgccctgaatctcattcgaggagttcaccttgcagaacattctttacaggttgcccatgaggaaattggaaacattctggcttttcttgttcctttcgtagcctgcattttccaggatccaaggagctggttctgctggttggaccaaacctcgtgagccagccacccctgacccaaatgaggagagctctgattctcccatccgggagcagtgatgtcaaacttctgctgctggggaaatctcatcagcagggagcctgtggaaaagggcatgtcagtgaaatctgggaatggctggattcggaaacatctgcccatgtgtattgatggcagagctgttgcccacaagcgccttttatttagggtaaaattaacaaatccattctattcctctgacccatgcttagtacatatgacctttaacccttacatttatatgattctggggttgcttcagaagtgttatttcatgaatcattcatatgatttgatcccccaggattctattttgtttaatgggcttttctactaaaagcataaaatactgaggctgatttagtcagggcaaaaccatttactttacatattcgttttcaatacttgctgttcatgttacacaagcttcttacggttttcttgtaacaataaatattttgagtaaataatgggtacattttaacaaactcagtagtacaacctaaacttgtataaaagtgtgtaaaaatgtatagccatttatatcctatgtataaattaaatgaggtggcttcagaaatggcagaataaatctaaagtgtttattaa

SEQ ID NO: 10427 - DNA, 1857 bp, Homo sapiens
agcggacgggctacctgcgcctgggctgccggtgacctgggccgagccctcccggtcggctaagattgctgaggaggcggcgggtagctggcaggcgccgacttccgaaggccgccgtccgggcgaggtgtcctcatgacttctcttgtggaccatgtccgtgatcttttttgcctgcgtggtacgggtaagggatggactgcccctctcagcctctactgatttttaccacacccaagattttttggaatggaggagacggctcaagagtttagccttgcgactggcccagtatccaggtcgaggttctgcagaaggttgtgactttagtatacatttttcttctttcggggacgtggcctgcatggctatctgctcctgccagtgtccagcagccatggccttctgcttcctggagaccctgtggtgggaattcacagcttcctatgacactacctgcattggcctagcctccaggccatacgcttttcttgagtttgacagcatcattcagaaagtgaagtggcattttaactatgtaagttcctctcagatggagtgcagcttggaaaaaattcaggaggagctcaagttgcagcctccagcggttctcactctggaggacacagatgtggcaaatggggtgatgaatggtcacacaccgatgcacttggagcctgctcctaatttccgaatggaaccagtgacagccctgggtatcctctccctcattctcaacatcatgtgtgctgccctgaatctcattcgaggagttcaccttgcagaacattctttacaggttgcccatgaggaaattggaaacattctggcttttcttgttcctttcgtagcctgcattttccaggatccaaggagctggttctgctggttggaccaaacctcgtgagccagccacccctgacccaaatgaggagagctctgattctcccatccgggagcagtgatgtcaaacttctgctgctggggaaatctcatcagcagggagcctgtggaaaagggcatgtcagtgaaatctgggaatggctggattcggaaacatctgcccatgtgtattgatggcagagctgttgcccacaagcgccttttatttagggtaaaattaacaaatccattctattcctctgacccatgcttagtacatatgacctttaacccttacatttatatgattctggggttgcttcagaagtgttatttcatgaatcattcatatgatttgatcccccaggattctattttgtttaatgggcttttctactaaaagcataaaatactgaggctgatttagtcagggcaaaaccatttactttacatattcgttttcaatacttgctgttcatgttacacaagcttcttacggttttcttgtaacaataaatattttgagtaaataatgggtacattttaacaaactcagtagtacaacctaaacttgtataaaagtgtgtaaaaatgtatagccatttatatcctatgtataaattaaatgaggtggcttcagaaatggcagaataaatctaaagtgtttattaaaaaaaaaaaacaacccacccaacaaaactttttgggccggccacgggcccctagaaaaaaggttttccaacaacccactccgtcgtggcgcggcggggccccaattagggtcctcggtgacccgtgggtccaacagtggtgtcccaaagagaaacccgtgggcacaggacaacgcggcgctgggtctccccaccccaataaaaaaacgccgccgcgggaacaccggcgtcgtctggaacaactcccaaagggaggtgccagaaggccaacaggggaccctacacgggggccccgggaggccgg

SEQ ID NO: 10428 - DNA, 1678 bp, Homo sapiens
agcggacgggctacctgcgcctgggctgccggtgacctgggccgagccctcccggtcggctaagattgctgaggaggcggcgggtagctggcaggcgccgacttccgaaggccgccgtccgggcgaggtgtcctcatgacttctcttgtggaccatgtccgtgatcttttttgcctgcgtggtacgggtaagggatggactgcccctctcagcctctactgatttttaccacacccaagattttttggaatggaggagacggctcaagagtttagccttgcgactggcccagtatccaggtcgaggttctgcagaaggttgtgactttagtatacaactactagacattttaaaggaagcggaagaaagacagtctcaggaataggtcgaactgaagagacaatatacctgcagcaaacagctacaggactgtttaaagccaagcaagtgcagaattcagtttttcttctttcggggacgtggcctgcatggctatctgctcctgccagtgtccagcagccatggccttctgcttcctggagaccctgtggtgggaattcacagcttcctatgacactacctgcattggcctagcctccaggccatacgcttttcttgagtttgacagcatcattcagaaagtgaagtggcattttaactatgtaagttcctctcagatggagtgcagcttggaaaaaattcaggaggagctcaagttgcagcctccagcggttctcactctggaggacacagatgtggcaaatggggtgatgaatggtcacacaccgatgcacttggagcctgctcctaatttccgaatggaaccagtgacagccctgggtatcctctccctcattctcaacatcatgtgtgctgccctgaatctcattcgaggagttcaccttgcagaacattctttacaggttgcccatgaggaaattggaaacattctggcttttcttgttcctttcgtagcctgcattttccaggatccaaggagctggttctgctggttggaccaaacctcgtgagccagccacccctgacccaaatgaggagagctctgattctcccatccgggagcagtgatgtcaaacttctgctgctggggaaatctcatcagcagggagcctgtggaaaagggcatgtcagtgaaatctgggaatggctggattcggaaacatctgcccatgtgtattgatggcagagctgttgcccacaagcgccttttatttagggtaaaattaacaaatccattctattcctctgacccatgcttagtacatatgacctttaacccttacatttatatgattctggggttgcttcagaagtgttatttcatgaatcattcatatgatttgatcccccaggattctattttgtttaatgggcttttctactaaaagcataaaatactgaggctgatttagtcagggcaaaaccatttactttacatattcgttttcaatacttgctgttcatgttacacaagcttcttacggttttcttgtaacaataaatattttgagtaaataatgggtacattttaacaaactcagtagtacaacctaaacttgtataaaagtgtgtaaaaatgtatagccatttatatcctatgtataaattaaatgaggtggcttcagaaatggcagaataaatctaaagtgtttattaa

SEQ ID NO: 10429 - DNA, 1878 bp, Homo sapiens
agcggacgggctacctgcgcctgggctgccggtgacctgggccgagccctcccggtcggctaagattgctgaggaggcggcgggtagctggcaggcgccgacttccgaaggccgccgtccgggcgaggtgtcctcatgacttctcttgtggaccatgtccgtgatcttttttgcctgcgtggtacgggtaagggatggactgcccctctcagcctctactgatttttaccacacccaagattttttggaatggaggagacggctcaagagtttagccttgcgactggcccagtatccaggtcgaggttctgcagaaggttgtgactttagtatacagtgagcagtaccatagcttttaatagtaaggagtgtgttagttccctaaggctgccataacaaatgaccacaaactggcttcaaacaacagaattcgttctctcacagatgtggagaagtctgaggctaattcccccaatagaatatgcatccctcatgcatgaataaataagagtgatcacaggctgtcattgattaagactactagacattttaaaggaagcggaagaaagacagtctcaggaataggtcgaactgaagagacaatatacctgcagcaaacagctacaggactgtttaaagccaagcaagtgcagaattcagtttttcttctttcggggacgtggcctgcatggctatctgctcctgccagtgtccagcagccatggccttctgcttcctggagaccctgtggtgggaattcacagcttcctatgacactacctgcattggcctagcctccaggccatacgcttttcttgagtttgacagcatcattcagaaagtgaagtggcattttaactatgtaagttcctctcagatggagtgcagcttggaaaaaattcaggaggagctcaagttgcagcctccagcggttctcactctggaggacacagatgtggcaaatggggtgatgaatggtcacacaccgatgcacttggagcctgctcctaatttccgaatggaaccagtgacagccctgggtatcctctccctcattctcaacatcatgtgtgctgccctgaatctcattcgaggagttcaccttgcagaacattctttacaggttgcccatgaggaaattggaaacattctggcttttcttgttcctttcgtagcctgcattttccaggatccaaggagctggttctgctggttggaccaaacctcgtgagccagccacccctgacccaaatgaggagagctctgattctcccatccgggagcagtgatgtcaaacttctgctgctggggaaatctcatcagcagggagcctgtggaaaagggcatgtcagtgaaatctgggaatggctggattcggaaacatctgcccatgtgtattgatggcagagctgttgcccacaagcgccttttatttagggtaaaattaacaaatccattctattcctctgacccatgcttagtacatatgacctttaacccttacatttatatgattctggggttgcttcagaagtgttatttcatgaatcattcatatgatttgatcccccaggattctattttgtttaatgggcttttctactaaaagcataaaatactgaggctgatttagtcagggcaaaaccatttactttacatattcgttttcaatacttgctgttcatgttacacaagcttcttacggttttcttgtaacaataaatattttgagtaaataatgggtacattttaacaaactcagtagtacaacctaaacttgtataaaagtgtgtaaaaatgtatagccatttatatcctatgtataaattaaatgaggtggcttcagaaatggcagaataaatctaaagtgtttattaa

SEQ ID NO: 10430 - DNA, 3892 bp, Homo sapiens
agcggacgggctacctgcgcctgggctgccggtgacctgggccgagccctcccggtcggctaagattgctgaggaggcggcgggtagctggcaggcgccgacttccgaaggccgccgtccgggcgaggtgtcctcatgacttctcttgtggaccatgtccgtgatcttttttgcctgcgtggtacgggtaagggatggactgcccctctcagcctctactgatttttaccacacccaagattttttggaatggaggagacggctcaagagtttagccttgcgactggcccagtatccaggtcgaggttctgcagaaggttgtgactttagtatacatttttcttctttcggggacgtggcctgcatggctatctgctcctgccagtgtccagcagccatggccttctgcttcctggagaccctgtggtgggaattcacagcttcctatgacactacctgcattggcctagcctccaggccatacgcttttcttgagtttgacagcatcattcagaaagtgaagtggcattttaactatgtaagttcctctcagatggagtgcagcttggaaaaaattcaggaggagctcaagttgcagcctccagcggttctcactctggaggacacagatgtggcaaatggggtgatgaatggtcacacaccgatgcacttggagcctgctcctaatttccgaatggaaccagtgacagccctgggtatcctctccctcattctcaacatcatgtgtgctgccctgaatctcattcgaggagttcaccttgcagaacattctttacaggttgcccatgaggaaattggaaacattctggcttttcttgttcctttcgtagcctgcattttccagtgttatttgtacctgttctacagtccagccaggactatgaaggtggtgcttatgctgctctttatttgcctgggcaacatgtacctgcacgggctgaggaacctctggcaaatccttttccacataggagtggcttttctgtcttcatatcagatactaacaaggcagcttcaggagaagcagtctgactgtggagtatgaggatgacactgtgatgaatggattctttgattttcttttgaggatcaatctatgtttctctttctgcttctctactttacactccagtttccatccttttcagccaactggactgaaaaaccaggaattggggatgttaaacagttgcagtggaagtcatgaggttgcttgatacccagccttggttctgtgccaagcattactgcaggatctccagccagttcagcacgtttacctaggacagctggatctgggggctcatccagaaagagctttattggaagagagaaaggaaatattttggtcttttaagttgaatgatacagtaaaccacttgattcaataacactggttttagtcattgagagttgtctccaaggaaccactttaaaatccaaatcagctttcagtctaaacataacttgattagttttttttttcagagggtcagtacaggatgaattaaaaacctaaaaatatggttcataaatgtaagctagataaattttgtttacattttttcaatatcttaggttcgatatacctttggaatatttaattatattttggatataaattggacttcatttagggtgagggcaaacttaagctgagaaaatggttaagaaatctgagtttatttaatttatatgtaaccttttatagtggtgggactgtttgggtacagagatgttttatatttatttgcagggtatatccgaatattttaaaaattaattgaataaccagtacttctagatgataagtttgtcagcatgagcagaaatgagaatttcaggattacttacaattgaccacaacctggagtaggtgaatgaacatggattcagtggcactttacagatccgcttgggaggggctgctgtcatcagccttttcagtagagctgagtgcctgttgttttaatgatgatgactactgtaccctgtgtacctgttcccagagcgcctccaaaattaattactcctctgcacctttcccagtcatcttaattagcttgagggcctcattttttatgaacaagagttaagtatctgttaactttttaaagcttgatagagatataattaacacatactctggaaagttactctctttcactgtcaaaaaattgattgatcacagttttccaaaatatggttctggataagatcccttaggtttcccgaaatttcagcctggcttgttttgtaccacgcaggaggtcattttgggagtttgctctttggattgttcttggtagaagtctggaatctgaatagttcaaccacagttgcatggaacactttgagtgttcaactgcattatgtggtcttgataaatttttaaaaatcctattttgatagtttttaaaagtggaaaaccattacaagagttgagtggatagggaatgtaagaatgtagttttagaaaaattcaattatatttggttatcactggtattgtattgttattgagctaccttgttatcattttaagaaaaataagtttatatactgggaactatgttgggaaaatgttgccatagtaactttattttttataatagaattttctatttttgaccaaacataaaatatttggatatgggccaggcatgatggctcatgcctgtattcccagcactttggaaggccaaagcaggagactcggttgaggccagtagtttgagaccagcctggacaacatagtaagattcatctctacaaaaaaaaaaattagccggatgtgatggcacatgcctgtaatcccagcactttgggagtctgaggcaggaggatcccttgagtccaggagtttgaggcttccatgagctataatcacaccactgcaccccagcctgcatgacagagtgaaaccctgtctctaaaaagtctgaatatgaaaattatattggcagcatactcagacataaactccaaagttgtctctacactgatttcacatctgcataattttctgcatacccagcaggtgaattttcagtttttctgggagacaattttgaagagatggtgaaatagaatgggaagttaaggaggggaggtaaaatgttttaaatgagaagaacaaaaaagctttaaaagtcaataacactttgggaagctgaggtgggcagatcacgaggtcaagagatcgagaccatcctggctaacatggtgaaaccccatctctactaaaaatacaaaaattagctgggcacggtggcttgtgcctgtagccccagctactcaggaggctgaggcaggagaatctcttgaacccgggaggtggaggttgcagtgagccgagatcgagccactgcactccagcctggtgacaaagcaagactccgtctcaaaaaaaaaaaaaaaaaaagtcggtaagaacggcttaaaaatggactgttttcttttcctatgtggcattgggttgccatgtagacctgtaccccaggtgctttgggcatctgagcctatgatccatattcagcaggcagtaaagaaacggtccttgaagatgagtccttcctggtaatgcttcctgaccaccgaggcactaccagagatgttatccacaccaggtcgaatgtgtggatattagttaacatctacatggggtgagattgacttttgcaaacaaaagggaaaagatgcactagaaaaacagtacaagtaatgaccacaaaaacattgtttgactgaaatccagctagctaaaagaatcctcagctcactgaaggaagagactgaaaataggaaagaagttctggtgatttcatctgagggaaatccccaggcttaggtttgacttggttcagggttg

SEQ ID NO: 10431 - DNA, 1254 bp, Homo sapiens
cagacattgctcacattccaaatgttttcgtgtagaatattgcacaggtctggggacgctctacctgtgccctgtgagtgttaataatggtggagaaagagtgtagctgtgcccttgagagagaaggtgagggaaagagtgcaccagtcagctgaccgtcagctggctaggctcttcactgagtcctatgtcgcagtgcacaaatcactgcccatcaggcctcagtttcctcatctggtaaatggtgataacatcaatctgcccccccgccaggtgcctgttatgagggtcaaaagtggtagtggagggtaatactgggtgagtccattgtgtgtgggaggagaaaggctttacattcacctggtacatgaaggtttttctgcttcaggcagcacagcacagccatttcttctggcctttacaaaaaggcattttgttatactacagtgtaaacctcatttttttcactccaaaaggtagcagcccctcttcttcccaccctggacctgcctttcactccctgggcacagagcgcatggtaccattgatgtttggtttattccaggatccaaggagctggttctgctggttggaccaaacctcgtgagccagccacccctgacccaaatgaggagagctctgattctcccatccgggagcagtgatgtcaaacttctgctgctggggaaatctcatcagcagggagcctgtggaaaagggcatgtcagtgaaatctgggaatggctggattcggaaacatctgcccatgtgtattgatggcagagctgttgcccacaagcgccttttatttagggtaaaattaacaaatccattctattcctctgacccatgcttagtacatatgacctttaacccttacatttatatgattctggggttgcttcagaagtgttatttcatgaatcattcatatgatttgatcccccaggattctattttgtttaatgggcttttctactaaaagcataaaatactgaggctgatttagtcagggcaaaaccatttactttacatattcgttttcaatacttgctgttcatgttacacaagcttcttacggttttcttgtaacaataaatattttgagtaaataatgggtacattttaacaaactcagtagtacaacctaaacttgtataaaagtgtgtaaaaatgtatagccatttatatcctatgtataaattaaatgaggtggcttcagaaatggcagaataaatctaaagtgtttattaa

SEQ ID NO: 10432 - DNA, 693 bp, Homo sapiens
tctcccacccatgcctgggagtcaagtgttggaccaaacctcgtgagccagccacccctgacccaaatgaggagagctctgattctcccatccgggagcagtgatgtcaaacttctgctgctggggaaatctcatcagcagggagcctgtggaaaagggcatgtcagtgaaatctgggaatggctggattcggaaacatctgcccatgtgtattgatggcagagctgttgcccacaagcgccttttatttagggtaaaattaacaaatccattctattcctctgacccatgcttagtacatatgacctttaacccttacatttatatgattctggggttgcttcagaagtgttatttcatgaatcattcatatgatttgatcccccaggattctattttgtttaatgggcttttctactaaaagcataaaatactgaggctgatttagtcagggcaaaaccatttactttacatattcgttttcaatacttgctgttcatgttacacaagcttcttacggttttcttgtaacaataaatattttgagtaaataatgggtacattttaacaaactcagtagtacaacctaaacttgtataaaagtgtgtaaaaatgtatagccatttatatcctatgtataaattaaatgaggtggcttcagaaatggcagaataaatctaaagtgtttattaa

SEQ ID NO: 10433 - DNA, 654 bp, Homo sapiens
gcgagcttcgaccccacgatattcgggcagcataggaccctttccctttcattaagaaatttgtaactgatttggggagtttagacaaaccgacatcagcagggagcctgtggaaaagggcatgtcagtgaaatctgggaatggctggattcggaaacatctgcccatgtgtattgatggcagagctgttgcccacaagcgccttttatttagggtaaaattaacaaatccattctattcctctgacccatgcttagtacatatgacctttaacccttacatttatatgattctggggttgcttcagaagtgttatttcatgaatcattcatatgatttgatcccccaggattctattttgtttaatgggcttttctactaaaagcataaaatactgaggctgatttagtcagggcaaaaccatttactttacatattcgttttcaatacttgctgttcatgttacacaagcttcttacggttttcttgtaacaataaatattttgagtaaataatgggtacattttaacaaactcagtagtacaacctaaacttgtataaaagtgtgtaaaaatgtatagccatttatatcctatgtataaattaaatgaggtggcttcagaaatggcagaataaatctaaagtgtttattaa

SEQ ID NO: 10434 - DNA, 896 bp, Homo sapiens
agcggacgggctacctgcgcctgggctgccggtgacctgggccgagccctcccggtcggctaagattgctgaggaggcggcgggtagctggcaggcgccgacttccgaaggccgccgtccgggcgaggtgtcctcatgacttctcttgtggaccatgtccgtgatcttttttgcctgcgtggtacgggtaagggatggactgcccctctcagcctctactgatttttaccacacccaagattttttggaatggaggagacggctcaagagtttagccttgcgactggcccagtatccaggtcgaggttctgcagaaggttgtgactttagtatacatttttcttctttcggggacgtggcctgcatggctatctgctcctgccagtgtccagcagccatggccttctgcttcctggagaccctgtggtgggaattcacagcttcctatgacactacctgcattggcctagcctccaggccatacgcttttcttgagtttgacagcatcattcagaaagtgaagtggcattttaactatgtaagttcctctcagatggagtgcagcttggaaaaaattcaggaggagctcaagttgcagcctccagcggttctcactctggaggacacagatgtggcaaatggggtgatgaatggtcacacaccgatgcacttggagcctgctcctaatttccgaatggaaccagtgacagccctgggtatcctctccctcattctcaacatcatgtgtgctgccctgaatctccagccagttcagcacgtttacctaggacagctggatctgggggctcatccagaaagagctttattggaagagagaaaggaaatattttggtcttttaagttgaatgatacagtaaaccacttgattcaataac

SEQ ID NO: 10435 - DNA, 1557 bp, Homo sapiens
cagacattgctcacattccaaatgttttcgtgtagaatattgcacaggtctggggacgctctacctgtgccctgtgagtgttaataatggtggagaaagagtgtagctgtgcccttgagagagaaggtgagggaaagagtgcaccagtcagctgaccgtcagctggctaggctcttcactgagtcctatgtcgcagtgcacaaatcactgcccatcaggcctcagtttcctcatctggtaaatggtgataacatcaatctgcccccccgccaggtgcctgttatgagggtcaaaagtggtagtggagggtaatactgggtgagtccattgtgtgtgggaggagaaaggctttacattcacctggtacatgaaggtttttctgcttcaggcagcacagcacagccatttcttctggcctttacaaaaaggcattttgttatactacagtgtaaacctcatttttttcactccaaaaggtagcagcccctcttcttcccaccctggacctgcctttcactccctgggcacagagcgcatggtaccattgatgtttggtttattccaggatccaaggagctggttctgctggttggaccaaacctcgtgagccagccacccctgacccaaatgaggagagctctgattctcccatccgggagcagtgatgtcaaacttctgctgctggggaaatctcatcagcagggagcctgtggaaaagggcatgtcagtgaaatctgggaatggctggattcggaaacatctgcccatgtgtattgatggcagagctgttgcccacaagcgccttttatttagggtaaaattaacaaatccattctattcctctgacccatgcttagtacatatgacctttaacccttacatttatatgattctggggttgcttcagaagtgttatttcatgaatcattcatatgatttgatcccccaggattctattttgtttaatgggcttttctactaaaagcataaaatactgaggctgatttagtcagggcaaaaccatttactttacatattcgttttcaatacttgctgttcatgttacacaagcttcttacggttttcttgtaacaataaatattttgagtaaataatgggtacattttaacaaactcagtagtacaacctaaacttgtataaaagtgtgtaaaaatgtatagccatttatatcctatgtataaattaaatgaggtggcttcagaaatggcagaataaatctaaagtgtttattaaaaaaaaaaaacaacccacccaacaaaactttttgggccggccacgggcccctagaaaaaaggttttccaacaacccactccgtcgtggcgcggcggggccccaattagggtcctcggtgacccgtgggtccaacagtggtgtcccaaagagaaacccgtgggcacaggacaacgcggcgctgggtctccccaccccaataaaaaaacgccgccgcgggaacaccggcgtcgtctggaacaactcccaaagggaggtgccagaaggccaacaggggaccctacacgggggccccgggaggccgg

SEQ ID NO: 10436 - DNA, 2527 bp, Homo sapiens
agaggagttgtctggagctaagggacatcactttgatggttgctctttcttcagtaacggaggttcctgggagagcaagcgggggagggggggttgaagagtgggagatctggggagcatgcaggatatttggaagttgattttgggggagagctggagagagagctgccttggcaaataggagcgctgaaaggtgttgaggacctagttgaagttgacaatgtatgtagcactgatctgtgtggttgtgagattttgtccagcagcacttagagccaagaagcagattcagagaagacagaaggttggattcttccaggattgtagtgctgccagatgggtgttactatccttctagttatgccagaaagataactgtgcaaggaatataagtatattgggaagaatgtgatggaggtgataaaccctgaactctcagctgatggggaaggaaatgaagactcgatggagcttataaataaaacaaagtagagggacaaatgaactggaagtttctgcaggctagagaaaccatgaaaggaattcagagaatagcagaaggacagatgaaagatcaggtgtctgcatttataacttcagaggtggagctcttctgtggtccagggtgttaccctaggagtggaggactgaagaggactggaagagaaagactctggagttgactgtgaacctggagccaaagtgaacaatgattggagatgagagctaggactttaggtactacatctcacccctgttgtccaatctaccatggtgcctgaaccacaccagttgcaccagtcagagagtgtaaggtcctgttctaaagcactcgcaccacaagttttgagagcccaattccccatatttgtttgtttgttttgttttgttttgtttgttttttgagatggagtttcgctcttgtaggtcaggctggagtgcaatggtgcgatctcggcccactgcagcctcctcctcccaggttcaagtgattctcctgcctcagcctcccaagtagctgggatcacagatgtccaccatcacgcccggctaatttctccggacgtgagaattacaggcttggatctcaaaccgccgcggtgtcctcatgacttctcttgtggaccatgtccgtgatcttttttgcctgcgtggtacgggtaagggatggactgcccctctcagcctctactgatttttaccacacccaagattttttggaatggaggagacggctcaagagtttagccttgcgactggcccagtatccaggtcgaggttctgcagaaggttgtgactttagtatacatttttcttctttcggggacgtggcctgcatggctatctgctcctgccagtgtccagcagccatggccttctgcttcctggagaccctgtggtgggaattcacagcttcctatgacactacctgcattggcctagcctccaggccatacgcttttcttgagtttgacagcatcattcagaaagtgaagtggcattttaactatgtaagttcctctcagatggagtgcagcttggaaaaaattcaggaggagctcaagttgcagcctccagcggttctcactctggaggacacagatgtggcaaatggggtgatgaatggtcacacaccgatgcacttggagcctgctcctaatttccgaatggaaccagtgacagccctgggtatcctctccctcattctcaacatcatgtgtgctgccctgaatctcattcgaggagttcaccttgcagaacattctttacaggttgcccatgaggaaattggaaacattctggcttttcttgttcctttcgtagcctgcattttccaggatccaaggagctggttctgctggttggaccaaacctcgtgagccagccacccctgacccaaatgaggagagctctgattctcccatccgggagcagtgatgtcaaacttctgctgctggggaaatctcatcagcagggagcctgtggaaaagggcatgtcagtgaaatctgggaatggctggattcggaaacatctgcccatgtgtattgatggcagagctgttgcccacaagcgccttttatttagggtaaaattaacaaatccattctattcctctgacccatgcttagtacatatgacctttaacccttacatttatatgattctggggttgcttcagaagtgttatttcatgaatcattcatatgatttgatcccccaggattctattttgtttaatgggcttttctactaaaagcataaaatactgaggctgatttagtcagggcaaaaccatttactttacatattcgttttcaatacttgctgttcatgttacacaagcttcttacggttttcttgtaacaataaatattttgagtaaataatgggtacattttaacaaactcagtagtacaacctaaacttgtataaaagtgtgtaaaaatgtatagccatttatatcctatgtataaattaaatgaggtggcttcagaaatggcagaataaatctaaagtgtttattaa

SEQ ID NO: 10437 - DNA, 1505 bp, Homo sapiens
acttactaaattttccagtacttcttcctatggttcatgatagtaaacacagaaacatataaggaacattattagagttaccagatgttagcccacagggggaccatgtccgtgatcttttttgcctgcgtggtacgggtaagggatggactgcccctctcagcctctactgatttttaccacacccaagattttttggaatggaggagacggctcaagagtttagccttgcgactggcccagtatccaggtcgaggttctgcagaaggttgtgactttagtatacatttttcttctttcggggacgtggcctgcatggctatctgctcctgccagtgtccagcagccatggccttctgcttcctggagaccctgtggtgggaattcacagcttcctatgacactacctgcattggcctagcctccaggccatacgcttttcttgagtttgacagcatcattcagaaagtgaagtggcattttaactatgtaagttcctctcagatggagtgcagcttggaaaaaattcaggaggagctcaagttgcagcctccagcggttctcactctggaggacacagatgtggcaaatggggtgatgaatggtcacacaccgatgcacttggagcctgctcctaatttccgaatggaaccagtgacagccctgggtatcctctccctcattctcaacatcatgtgtgctgccctgaatctcattcgaggagttcaccttgcagaacattctttacaggttgcccatgaggaaattggaaacattctggcttttcttgttcctttcgtagcctgcattttccaggatccaaggagctggttctgctggttggaccaaacctcgtgagccagccacccctgacccaaatgaggagagctctgattctcccatccgggagcagtgatgtcaaacttctgctgctggggaaatctcatcagcagggagcctgtggaaaagggcatgtcagtgaaatctgggaatggctggattcggaaacatctgcccatgtgtattgatggcagagctgttgcccacaagcgccttttatttagggtaaaattaacaaatccattctattcctctgacccatgcttagtacatatgacctttaacccttacatttatatgattctggggttgcttcagaagtgttatttcatgaatcattcatatgatttgatcccccaggattctattttgtttaatgggcttttctactaaaagcataaaatactgaggctgatttagtcagggcaaaaccatttactttacatattcgttttcaatacttgctgttcatgttacacaagcttcttacggttttcttgtaacaataaatattttgagtaaataatgggtacattttaacaaactcagtagtacaacctaaacttgtataaaagtgtgtaaaaatgtatagccatttatatcctatgtataaattaaatgaggtggcttcagaaatggcagaataaatctaaagtgtttattaa

SEQ ID NO: 10438 - DNA, 1576 bp, Homo sapiens
agcggacgggctacctgcgcctgggctgccggtgacctgggccgagccctcccggtcggctaagattgctgaggaggcggcgggtagctggcaggcgccgacttccgaaggccgccgtccgggcgaggtgtcctcatgacttctcttgtggaccatgtccgtgatcttttttgcctgcgtggtacgggtaagggatggactgcccctctcagcctctactgatttttaccacacccaagattttttggaatggaggagacggctcaagagtttagccttgcgactggcccagtatccaggtcgaggttctgcagaaggttgtgactttagtatacatttttcttctttcggggacgtggcctgcatggctatctgctcctgccagtgtccagcagccatggccttctgcttcctggagaccctgtggtgggaattcacagcttcctatgacactacctgcattggcctagcctccaggccatacgcttttcttgagtttgacagcatcattcagaaagtgaagtggcattttaactatgtaagttcctctcagatggagtgcagcttggaaaaaattcaggaggagctcaagttgcagcctccagcggttctcactctggaggacacagatgtggcaaatggggtgatgaatggtcacacaccgatgcacttggagcctgctcctaatttccgaatggaaccagtgacagccctgggtatcctctccctcattctcaacatcatgtgtgctgccctgaatctcattcgaggagttcaccttgcagaacattctttacaggttgcccatgaggaaattggaaacattctggcttttcttgttcctttcgtagcctgcattttccaggatccaaggagctggttctgctggttggaccaaacctcgtgagccagccacccctgacccaaatgaggagagctctgattctcccatccgggagcagtgatgtcaaacttctgctgctggggaaatctcatcagcagggagcctgtggaaaagggcatgtcagtgaaatctgggaatggctggattcggaaacatctgcccatgtgtattgatggcagagctgttgcccacaagcgccttttatttagggtaaaattaacaaatccattctattcctctgacccatgcttagtacatatgacctttaacccttacatttatatgattctggggttgcttcagaagtgttatttcatgaatcattcatatgatttgatcccccaggattctattttgtttaatgggcttttctactaaaagcataaaatactgaggctgatttagtcagggcaaaaccatttactttacatattcgttttcaatacttgctgttcatgttacacaagcttcttacggttttcttgtaacaataaatattttgagtaaataatgggtacattttaacaaactcagtagtacaacctaaacttgtataaaagtgtgtaaaaatgtatagccatttatatcctatgtataaattaaatgaggtggcttcagaaatggcagaataaatctaaagtgtttattaaaatgtgtctttgcacttatgtg

SEQ ID NO: 10439 - DNA, 1572 bp, Homo sapiens
agcggacgggctacctgcgcctgggctgccggtgacctgggccgagccctcccggtcggctaagattgctgaggaggcggcgggtagctggcaggcgccgacttccgaaggccgccgtccgggcgaggtgtcctcatgacttctcttgtggaccatgtccgtgatcttttttgcctgcgtggtacgggtaagggatggactgcccctctcagcctctactgatttttaccacacccaagattttttggaatggaggagacggctcaagagtttagccttgcgactggcccagtatccaggtcgaggttctgcagaaggttgtgactttagtatacatttttcttctttcggggacgtggcctgcatggctatctgctcctgccagtgtccagcagccatggccttctgcttcctggagaccctgtggtgggaattcacagcttcctatgacactacctgcattggcctagcctccaggccatacgcttttcttgagtttgacagcatcattcagaaagtgaagtggcattttaactatgtaagttcctctcagatggagtgcagcttggaaaaaattcaggaggagctcaagttgcagcctccagcggttctcactctggaggacacagatgtggcaaatggggtgatgaatggtcacacaccgatgcacttggagcctgctcctaatttccgaatggaaccagtgacagccctgggtatcctctccctcattctcaacatcatgtgtgctgccctgaatctcattcgaggagttcaccttgcagaacattctttacaggttgcccatgaggaaattggaaacattctggcttttcttgttcctttcgtagcctgcattttccaggatccaaggagctggttctgctggttggaccaaacctcgtgagccagccacccctgacccaaatgaggagagctctgattctcccatccgggagcagtgatgtcaaacttctgctgctggggaaatctcatcagcagggagcctgtggaaaagggcatgtcagtgaaatctgggaatggctggattcggaaacatctgcccatgtgtattgatggcagagctgttgcccacaagcgccttttatttagggtaaaattaacaaatccattctattcctctgacccatgcttagtacatatgacctttaacccttacatttatatgattctggggttgcttcagaagtgttatttcatgaatcattcatatgatttgatcccccaggattctattttgtttaatgggcttttctactaaaagcataaaatactgaggctgatttagtcagggcaaaaccatttactttacatattcgttttcaatacttgctgttcatgttacacaagcttcttacggttttcttgtaacaataaatattttgagtaaataatgggtacattttaacaaactcagtagtacaacctaaacttgtataaaagtgtgtaaaaatgtatagccatttatatcctatgtataaattaaatgagttctcgcaatgccgattaatctaagcgttttcacacacaaacaacaacaacaaaaaaaac

SEQ ID NO: 10440 - DNA, 1647 bp, Homo sapiens
agcggacgggctacctgcgcctgggctgccggtgacctgggccgagccctcccggtcggctaagattgctgaggaggcggcgggtagctggcaggcgccgacttccgaaggccgccgtccgggcgaggtgtcctcatgacttctcttgtggaccatgtccgtgatcttttttgcctgcgtggtacgggtaagggatggactgcccctctcagcctctactgatttttaccacacccaagattttttggaatggaggagacggctcaagagtttagccttgcgactggcccagtatccaggtcgaggttctgcagaaggttgtgactttagtatacaagacaaggtcttgccatgttgcccaggctggtcttaaactcctaggctcaagtgatcctcccgccttggccttccaaagccctgggattatagtttttcttctttcggggacgtggcctgcatggctatctgctcctgccagtgtccagcagccatggccttctgcttcctggagaccctgtggtgggaattcacagcttcctatgacactacctgcattggcctagcctccaggccatacgcttttcttgagtttgacagcatcattcagaaagtgaagtggcattttaactatgtaagttcctctcagatggagtgcagcttggaaaaaattcaggaggagctcaagttgcagcctccagcggttctcactctggaggacacagatgtggcaaatggggtgatgaatggtcacacaccgatgcacttggagcctgctcctaatttccgaatggaaccagtgacagccctgggtatcctctccctcattctcaacatcatgtgtgctgccctgaatctcattcgaggagttcaccttgcagaacattctttacaggttgcccatgaggaaattggaaacattctggcttttcttgttcctttcgtagcctgcattttccaggatccaaggagctggttctgctggttggaccaaacctcgtgagccagccacccctgacccaaatgaggagagctctgattctcccatccgggagcagtgatgtcaaacttctgctgctggggaaatctcatcagcagggagcctgtggaaaagggcatgtcagtgaaatctgggaatggctggattcggaaacatctgcccatgtgtattgatggcagagctgttgcccacaagcgccttttatttagggtaaaattaacaaatccattctattcctctgacccatgcttagtacatatgacctttaacccttacatttatatgattctggggttgcttcagaagtgttatttcatgaatcattcatatgatttgatcccccaggattctattttgtttaatgggcttttctactaaaagcataaaatactgaggctgatttagtcagggcaaaaccatttactttacatattcgttttcaatacttgctgttcatgttacacaagcttcttacggttttcttgtaacaataaatattttgagtaaataatgggtacattttaacaaactcagtagtacaacctaaacttgtataaaagtgtgtaaaaatgtatagccatttatatcctatgtataaattaaatgaggtggcttcagaaatggcagaataaatctaaagtgtttattaa

SEQ ID NO: 10441 - DNA, 1770 bp, Homo sapiens
agcggacgggctacctgcgcctgggctgccggtgacctgggccgagccctcccggtcggctaagattgctgaggaggcggcgggtagctggcaggcgccgacttccgaaggccgccgtccgggcgaggtgtcctcatgacttctcttgtggaccatgtccgtgatcttttttgcctgcgtggtacgggtaagggatggactgcccctctcagcctctactgatttttaccacacccaagattttttggaatggaggagacggctcaagagtttagccttgcgactggcccagtatccaggtcgaggttctgcagaaggttgtgactttagtatacaatgtggagaagtctgaggctaattcccccaatagaatatgcatccctcatgcatgaataaataagagtgatcacaggctgtcattgattaagactactagacattttaaaggaagcggaagaaagacagtctcaggaataggtcgaactgaagagacaatatacctgcagcaaacagctacaggactgtttaaagccaagcaagtgcagaattcagtttttcttctttcggggacgtggcctgcatggctatctgctcctgccagtgtccagcagccatggccttctgcttcctggagaccctgtggtgggaattcacagcttcctatgacactacctgcattggcctagcctccaggccatacgcttttcttgagtttgacagcatcattcagaaagtgaagtggcattttaactatgtaagttcctctcagatggagtgcagcttggaaaaaattcaggaggagctcaagttgcagcctccagcggttctcactctggaggacacagatgtggcaaatggggtgatgaatggtcacacaccgatgcacttggagcctgctcctaatttccgaatggaaccagtgacagccctgggtatcctctccctcattctcaacatcatgtgtgctgccctgaatctcattcgaggagttcaccttgcagaacattctttacaggttgcccatgaggaaattggaaacattctggcttttcttgttcctttcgtagcctgcattttccaggatccaaggagctggttctgctggttggaccaaacctcgtgagccagccacccctgacccaaatgaggagagctctgattctcccatccgggagcagtgatgtcaaacttctgctgctggggaaatctcatcagcagggagcctgtggaaaagggcatgtcagtgaaatctgggaatggctggattcggaaacatctgcccatgtgtattgatggcagagctgttgcccacaagcgccttttatttagggtaaaattaacaaatccattctattcctctgacccatgcttagtacatatgacctttaacccttacatttatatgattctggggttgcttcagaagtgttatttcatgaatcattcatatgatttgatcccccaggattctattttgtttaatgggcttttctactaaaagcataaaatactgaggctgatttagtcagggcaaaaccatttactttacatattcgttttcaatacttgctgttcatgttacacaagcttcttacggttttcttgtaacaataaatattttgagtaaataatgggtacattttaacaaactcagtagtacaacctaaacttgtataaaagtgtgtaaaaatgtatagccatttatatcctatgtataaattaaatgaggtggcttcagaaatggcagaataaatctaaagtgtttattaa

SEQ ID NO: 10442 - DNA, 2171 bp, Homo sapiens
taatggaatggtgataggtgagggaaataattttcccattgatacagggtaactcacctctacttggctttgtgtgggaaggaaaaataaatttcacctaagaaattgaaatgttgttcttgcgcctcgtaaaaggttgaagttggagtgtatactccccaaagtctaggaattcctaagccaaggttgaaacatcagtattggtcccagagtgatgacactgctatggtagccagccagagcaaatgcagaaccacactggaagaagtgtgccacaacttgggcttcaggggattcttacaaaaaaaagtcccatagggatgagttctcagcaaaaaggacaaaacacaagaggagacattccacagtgagtgggagtcagtagacacacagataggtgacctagaacccctgtaccctgaacttgaaatgattgcatgacagcccaaaagggagtagaaaaagaagaaaagccctgtatttattttatgagaccaaaataacctaaataccacaatcagatgaagacagtataagaaaggaaaattataggccagtcttatttgcatagacacaaaagtcccaattaaaatgttagcaaactaaatccagcagttgtatgtttatgaatatgtaggaacttagatccaacaagggcttattttaggatgccaggatcatttaacattaggaaatctgttgatgtagattaaagaagaaaaacgttttctcaatagatgtggagaagtctgaggctaattcccccaatagaatatgcatccctcatgcatgaataaataagagtgatcacaggctgtcattgattaagactactagacattttaaaggaagcggaagaaagacagtctcaggaataggtcgaactgaagagacaatatacctgcagcaaacagctacaggactgtttaaagccaagcaagtgcagaattcagtttttcttctttcggggacgtggcctgcatggctatctgctcctgccagtgtccagcagccatggccttctgcttcctggagaccctgtggtgggaattcacagcttcctatgacactacctgcattggcctagcctccaggccatacgcttttcttgagtttgacagcatcattcagaaagtgaagtggcattttaactatgtaagttcctctcagatggagtgcagcttggaaaaaattcaggaggagctcaagttgcagcctccagcggttctcactctggaggacacagatgtggcaaatggggtgatgaatggtcacacaccgatgcacttggagcctgctcctaatttccgaatggaaccagtgacagccctgggtatcctctccctcattctcaacatcatgtgtgctgccctgaatctcattcgaggagttcaccttgcagaacattctttacaggttgcccatgaggaaattggaaacattctggcttttcttgttcctttcgtagcctgcattttccaggatccaaggagctggttctgctggttggaccaaacctcgtgagccagccacccctgacccaaatgaggagagctctgattctcccatccgggagcagtgatgtcaaacttctgctgctggggaaatctcatcagcagggagcctgtggaaaagggcatgtcagtgaaatctgggaatggctggattcggaaacatctgcccatgtgtattgatggcagagctgttgcccacaagcgccttttatttagggtaaaattaacaaatccattctattcctctgacccatgcttagtacatatgacctttaacccttacatttatatgattctggggttgcttcagaagtgttatttcatgaatcattcatatgatttgatcccccaggattctattttgtttaatgggcttttctactaaaagcataaaatactgaggctgatttagtcagggcaaaaccatttactttacatattcgttttcaatacttgctgttcatgttacacaagcttcttacggttttcttgtaacaataaatattttgagtaaataatgggtacattttaacaaactcagtagtacaacctaaacttgtataaaagtgtgtaaaaatgtatagccatttatatcctatgtataaattaaatgaggtggcttcagaaatggcagaataaatctaaagtgtttattaa

SEQ ID NO: 10443 - DNA, 1460 bp, Homo sapiens
  misc_feature (383)..(383): n is a, c, g, or t
gctgactgcgtgcggagcgatgcgcacagaatttgacgaaactgtactgaaacggcttgcacgagttgtaccattgaagtatagggccagatatcgcaacggctagggtactactaaaggttgtgacctatagatttactgtgtatgcttcctttctgggaacgttggacctcgacactagctcattctgcctcagtgccctaagcagtcaaacccgagagcaatagtggccctccttgcttgtcctggaaaaccgcgtgcttcgatgtggcaagtccagagggtacctgtatgatcatctcagctgacatctgagcacctaagtcgcctcgcaaggacacatgtaacaaccttagtgttcgtctggaaggtgtgtcgatcangctaatcagttcagtagatagattagccatagagcatattataactaatagataaagttaccatcatcaagatggaagatgcaagcacttggaaaaaattcaggaggagctcaagttgcagcctccagcggttctcactctggaggacacagatgtggcaaatggggtgatgaatggtcacacaccgatgcacttggagcctgctcctaatttccgaatggaaccagtgacagccctgggtatcctctccctcattctcaacatcatgtgtgctgccctgaatctcattcgaggagttcaccttgcagaacattctttacaggttgcccatgaggaaattggaaacattctggcttttcttgttcctttcgtagcctgcattttccaggatccaaggagctggttctgctggttggaccaaacctcgtgagccagccacccctgacccaaatgaggagagctctgattctcccatccgggagcagtgatgtcaaacttctgctgctggggaaatctcatcagcagggagcctgtggaaaagggcatgtcagtgaaatctgggaatggctggattcggaaacatctgcccatgtgtattgatggcagagctgttgcccacaagcgccttttatttagggtaaaattaacaaatccattctattcctctgacccatgcttagtacatatgacctttaacccttacatttatatgattctggggttgcttcagaagtgttatttcatgaatcattcatatgatttgatcccccaggattctattttgtttaatgggcttttctactaaaagcataaaatactgaggctgatttagtcagggcaaaaccatttactttacatattcgttttcaatacttgctgttcatgttacacaagcttcttacggttttcttgtaacaataaatattttgagtaaataatgggtacattttaacaaactcagtagtacaacctaaacttgtataaaagtgtgtaaaaatgtatagccatttatatcctatgtataaattaaatgaggtggcttcagaaatggcagaataaatctaaagtgtttattaa

SEQ ID NO: 10444 - DNA, 2265 bp, Homo sapiens
agaggagttgtctggagctaagggacatcactttgatggttgctctttcttcagtaacggaggttcctgggagagcaagcgggggagggggggttgaagagtgggagatctggggagcatgcaggatatttggaagttgattttgggggagagctggagagagagctgccttggcaaataggagcgctgaaaggtgttgaggacctagttgaagttgacaatgtatgtagcactgatctgtgtggttgtgagattttgtccagcagcacttagagccaagaagcagattcagagaagacagaaggttggattcttccaggattgtagtgctgccagatgggtgttactatccttctagttatgccagaaagataactgtgcaaggaatataagtatattgggaagaatgtgatggaggtgataaaccctgaactctcagctgatggggaaggaaatgaagactcgatggagcttataaataaaacaaagtagagggacaaatgaactggaagtttctgcaggctagagaaaccatgaaaggaattcagagaatagcagaaggacagatgaaagatcaggtgtctgcatttataacttcagaggtggagctcttctgtggtccagggtgttaccctaggagtggaggactgaagaggactggaagagaaagactctggagttgactgtgaacctggagccaaagtgaacaatgattggagatgagagctaggactttaggtactacatctcacccctgttgtccaatctaccatggtgcctgaaccacaccagttgcaccagtcagagagtgtaaggtcctgttctaaagcactcgcaccacaagttttgagagcccaattccccatatttgtttgtttgttttgttttgttttgtttgttttttgagatggagtttcgctcttgtaggtcaggctggagtgcaatggtgcgatctcggcccactgcagcctcctcctcccaggttcaagtgattctcctgcctcagcctcccaagtagctgggatcacagatgtccaccatcacgcccggctaatttctccggacgtgagaattacaggcttggatctcaaaccgccgcggtgtcctcatgacttctcttgtggaccatgtccgtgatcttttttgcctgcgtggtacgggtaagggatggactgcccctctcagcctctactgatttttaccacacccaagattttttggaatggaggagacggctcaagagtttagccttgcgactggcccagtatccaggtcgaggttctgcagaaggttgtgactttagtatacaatgtggagaagtctgaggctaattcccccaatagaatatgcatccctcatgcatgaataaataagagtgatcacaggctgtcattgattaagactactagacattttaaaggaagcggaagaaagacagtctcaggaataggtcgaactgaagagacaatatacctgcagcaaacagctacaggactgtttaaagccaagcaagtgcagaattcagtttttcttctttcggggacgtggcctgcatggctatctgctcctgccagtgtccagcagccatggccttctgcttcctggagaccctgtggtgggaattcacagcttcctatgacactacctgcattggcctagcctccaggccatacgcttttcttgagtttgacagcatcattcagaaagtgaagtggcattttaactatgtaagttcctctcagatggagtgcagcttggaaaaaattcaggaggagctcaagttgcagcctccagcggttctcactctggaggacacagatgtggcaaatggggtgatgaatggtcacacaccgatgcacttggagcctggtcctaatttccgaatggaaccagtgaaagggccgaggattccctgccccaatgtccaacctcaggtgtgcggcccgagattcaaacgagaggggccaccgggcacacacctcttaaggggtgccgcagagaaaggggaccaagcggggatcaagagccccggagaacgggaattccacataacagggaaggccgctcggtgtgcacacacggtggggaccccgggcagaagagaagagaactcaccacggcgggaaggaaaaacacgggggagaacacatcagcgggccgaggaggaacaaagatgagaagagaaccaactgctgaaagtaacagccgcagcataaatacagcacgacccaccacactcgcaagtgaactgactagcaagacaga

SEQ ID NO: 10445 - DNA, 3699 bp, Homo sapiens
  misc_feature (1299)..(1299): n is a, c, g, or t
ggtaattggcacggcgcgcgcgcaccccttccgcgcagccccctgacctgcagcctccggacctcgctgcagcgcggacccggcccgcccgcccggctgcgaggctcctggctgcacatgacgtcccggtgtttggctggcgcagcaggtcctccgggccaccggccaccttcccaagcagcaaaggtggaggcggctccagttacatggaggagatgtacttcgcctggttggaaaacccccagagtgtccacaagtcctgggacagcttcttcagggaagccagcgaggaagccttttctggctctgctcagccacggcccccttctgttgtccatgagagcaggtctgcagtctcaagtcggaccaagaccagcaaattggtggaggaccacctggctgtgcagtccctgatccgggcctaccagatccggggtcaccatgtggcccagctggaccccctgggcattctggatgcagacctggactcctttgtgccctcagacttgatcacaaccattgataaactggccttctatgaccttcaggaggctgaccttgataaggagttccagctgccgacaaccaccttcattgggggctctgaaaacaccctttctctgcgggagatcattcggcgcctggagaacacctactgccagcacattggcctggagttcatgttcatcaacgatgtggagcagtgccagtggatccggcagaagtttgagacccctggtgtgatgcagttctccagcgaggagaagcggaccctgctggcccggctagtgcgctccatgaggtttgaagacttcctggcccggaaatggtcctcagagaagcggtttggcctggagggctgtgaagtgatgattcctgccctcaagaccatcatcgacaaatccagcgagatggggattgagaatgtcatcttggggatgccacacaggggaaggctgaacgtgctggccaacgtgatccgcaaggacctggagcagatcttctgccagtttgaccccaagctggaggcggcggacgagggctccggggatgtcaagtaccacctgggcatgtaccatgagaggatcaaccgcgtcaccaaccggaacatcactctgtcgctggttgccaacccctcccacctggaggcagtggaccctgtggtgcaggggaagacaaaggcagagcagttctaccgtggagatgcccagggcaagaaggtcatgtccatcctggttcatggggacgccgcctttgctggccagggcgtggtatatgagaccttccacctgagcgacntgccctcctacacgaccaatggtaccgtgcacgtcgtcgtcaacaaccagattggattcaccacagacccccgaatggcccgctcctcaccatacccgaccgacgtggcccgggtggtcaatgcgcctatcttccatgtgaatgccgatgacccagaggctgtgatatatgtgtgcagtgtggcagccgaatggagaaacactttcaacaaagatgttgtcgtggacctggtctgttaccgccggcgtggccacaatgagatggacgagcccatgttcacccagccgctcatgtacaagcagatccacagacaggtgcctgtgctgaagaagtacgcagacaagctgattgccgagggcacagtcaccctgcaggagtttgaggaagaaattgccaaatacgaccggatctgtgaggaggcttatggcaggtccaaggataaaaagattctgcatataaagcactggttggactccccctggcctggcttcttcaacgtagatggggagcccaagagcatgacatgcccagccacggggatccctgaggacatgctcacccacatcggcagtgtggccagctctgtgcccctggaggactttaagatccacactggcctctctcgcattctgcggggccgtgcggacatgaccaagaaccggacggtggactgggcgttggcagagtacatggcctttggctccctgctgaaggaaggcatccacgtgcggctcagcgggcaggatgtggagaggggcacattcagtcaccggcaccatgttctccatgaccaggaggttgaccgcaggacgtgtgtgcctatgaatcatctctggcctgaccaggccccgtacaccgtgtgcaacagctccctctcggagtacggagtcctgggctttgagctgggctatgccatggccagccccaatgccctggtcctctgggaggcccagtttggggacttccacaacacggcccagtgcatcatcgaccagttcatcagcaccggccaggccaagtgggtgcggcataatggcattgtgctgctgctgccccatggcatggaaggcatgggcccagagcactcgtcagcgaggcccgaaaggttcctgcagatgagcaatgatgactcggatgcctaccctgcattcaccaaggacttcgaggtgagccagctctatgactgcaactggatcgtggtcaactgctccacaccggccaactacttccacgtgctgcgccggcagatcctgctgcccttccgcaagccgctgattatcttcacacctaaatctctgctgaggcacccagaggccaagtccagctttgaccaaatggtatccgggaccagcttccagcgggtgattcctgaagatggggccgcagcacgggcccctgagcaggtgcagcggctcatcttctgcacgggaaaggtgtactatgacctggtgaaggagcggagcagccaggacctggaggagaaagtggccatcacgcgcctggagcagatctctccattccccttcgacctgatcaagcaggaggcagagaagtacccaggtgcggagctggcctggtgtcaggaggagcacaagaacatgggctactatgactacatcagcccacgcttcatgaccatcctgaggcgcgcacggcccatatggtatgttggccgggacccagcggctgcaccagccacaggaaacaggaacactcacctggtgtcactgaagaagtttctggatactgccttcaatctccaggcctttgagggcaagacattttagagctgggcaaaacctgtgtaggtctcgctgtgggtttgctggggaccaagggggtgatgaaaaggggaggggcggagctcctgcccaagagaggggctgtggggccccaggataaaacagacacagtgacagggccaagagccagcactgctggccttggtgtcatgccagaatctaccaggactgagggagccagaggagtcctgtaggcaggctactgtgctggagcatcccccagctgctcccatcttgctggaatttcttgggcggcttctccacctgtatctcaagacagacacccgggggcctgtgtctgtggccgctcccatcccggcagccctggctgctgctcgccccaccctcgcttatctgtagattcaaagcgatgttctcttctgtgctcttagaagtagggagttcagcagtaacagccaggtgaagcgaacctgctgggtgatttgtttgcgctctgttttatggggcattcctgcgagatgtgtcagcttctgtatgaaatgcagccacagctcatgtgtaccaaagtagaaaaccaaatcacagagaaataaaaacatgcttcagagagaaaaaatgttttcatttcatgttgtaa

SEQ ID NO: 10446 - DNA, 545 bp, Homo sapiens
ccagcccatcgcgcgcgtaccacccggctagtccagggtcctgcgcagaggagcgggtgctcgcgaatgagtcagctgaggctgctgccgtcccgtcttggggtacaggctgcgaggctcctggctgcacatgacgtcccggtgtttggctggcgcagcaggtcctccgggccaccggccaccttcccaagcagcaaaggtggaggcggctccagttacatggaggagatgtacttcgcctgtgtctgtggccgctcccatcccggcagccctggctgctgctcgccccaccctcgcttatctgtagattcaaagcgatgttctcttctgtgctcttagaagtagggagttcagcagtaacagccaggtgaagcgaacctgctgggtgatttgtttgcgctctgttttatggggcattcctgcgagatgtgtcagcttctgtatgaaatgcagccacagctcatgtgtaccaaagtagaaaaccaaatcacagagaaataaaaacatgcttcagagagaaaaaatgttttcatttcatgttgtaa

SEQ ID NO: 10447 - DNA, 657 bp, Homo sapiens
ggtaattggcacggcgcgcgcgcaccccttccgcgcagccccctgacctgcagcctccggacctcgctgcagcgcggacccggcccgcccgcccgaatgagtcagctgaggctgctgccgtcccgtcttggggtacaggctgcgaggctcctggctgcacatgacgtcccggtgtttggctggcgcagcaggtcctccgggccaccggccaccttcccaagcagcaaaggtggaggcggctccagttacatggaggagatgtacttcgcctggttggaaaacccccagagtgtccacaagtcctgggacagcttcttcagggaagccagcgaggaagccttttctggctctgctcagccacggcccccttctgttgtccatgagagcaggtctgcagtctcaagtcggaccaagaccagcaaattggtggaggaccacctggctgtgcagtccctgatccgggcctaccaggtgaggggcagctgaggcacagcctgggaggctgcactggctcctggggtgtggccaggcactgaagggaaggggtctcagctccaacatcatctccccagagagcccttctccttgtcctctactgagcggcacctactcctctagccagtctttgccacatcaccattcagagcacttaccacc

SEQ ID NO: 10448 - DNA, 3395 bp, Homo sapiens
  misc_feature (1342)..(1342): n is a, c, g, or t
ggtaattggcacggcgcgcgcgcaccccttccgcgcagccccctgacctgcagcctccggacctcgctgcagcgcggacccggcccgcccgcccgaatgagtcagctgaggctgctgccgtcccgtcttggggtacaggctgcgaggctcctggctgcacatgacgtcccggtgtttggctggcgcagcaggtcctccgggccaccggccaccttcccaagcagcaaaggtggaggcggctccagttacatggaggagatgtacttcgcctggttggaaaacccccagagtgtccacaagtcctgggacagcttcttcagggaagccagcgaggaagccttttctggctctgctcagccacggcccccttctgttgtccatgagagcaggtctgcagtctcaagtcggaccaagaccagcaaattggtggaggaccacctggctgtgcagtccctgatccgggcctaccagatccggggtcaccatgtggcccagctggaccccctgggcattctggatgcagacctggactcctttgtgccctcagacttgatcacaaccattgataaactggccttctatgaccttcaggaggctgaccttgataaggagttccagctgccgacaaccaccttcattgggggctctgaaaacaccctttctctgcgggagatcattcggcgcctggagaacacctactgccagcacattggcctggagttcatgttcatcaacgatgtggagcagtgccagtggatccggcagaagtttgagacccctggtgtgatgcagttctccagcgaggagaagcggaccctgctggcccggctagtgcgctccatgaggtttgaagacttcctggcccggaaatggtcctcagagaagcggtttggcctggagggctgtgaagtgatgattcctgccctcaagaccatcatcgacaaatccagcgagatggggattgagaatgtcatcttggggatgccacacaggggaaggctgaacgtgctggccaacgtgatccgcaaggacctggagcagatcttctgccagtttgaccccaagctggaggcggcggacgagggctccggggatgtcaagtaccacctgggcatgtaccatgagaggatcaaccgcgtcaccaaccggaacatcactctgtcgctggttgccaacccctcccacctggaggcagtggaccctgtggtgcaggggaagacaaaggcagagcagttctaccgtggagatgcccagggcaagaaggtcatgtccatcctggttcatggggacgccgcctttgctggccagggcgtggtatatgagaccttccacctgagcgacntgccctcctacacgaccaatggtaccgtgcacgtcgtcgtcaacaaccagattggattcaccacagacccccgaatggcccgctcctcaccatacccgaccgacgtggcccgggtggtcaatgcgcctatcttccatgtgaatgccgatgacccagaggctgtgatatatgtgtgcagtgtggcagccgaatggagaaacactttcaacaaagatgttgtcgtggacctggtctgttaccgccggcgtggccacaatgagatggacgagcccatgttcacccagccgctcatgtacaagcagatccacagacaggtgcctgtgctgaagaagtacgcagacaagctgattgccgagggcacagtcaccctgcaggagtttgaggaagaaattgccaaatacgaccggatctgtgaggaggcttatggcaggtccaaggataaaaagattctgcatataaagcactggttggactccccctggcctggcttcttcaacgtagatggggagcccaagagcatgacatgcccagccacggggatccctgaggacatgctcacccacatcggcagtgtggccagctctgtgcccctggaggactttaagatccacactggcctctctcgcattctgcggggccgtgcggacatgaccaagaaccggacggtggactgggcgttggcagagtacatggcctttggctccctgctgaaggaaggcatccacgtgcggctcagcgggcaggatgtggagaggggcacattcaggaggttgaccgcaggacgtgtgtgcctatgaatcatctctggcctgaccaggccccgtacaccgtgtgcaacagctccctctcggagtacggagtcctgggctttgagctgggctatgccatggccagccccaatgccctggtcctctgggaggcccagtttggggacttccacaacacggcccagtgcatcatcgaccagttcatcagcaccggccaggccaagtgggtgcggcataatggcattgtgctgctgctgccccatggcatggaaggcatgggcccagagcactcgtcagcgaggcccgaaaggttcctgcagatgagcaatgatgactcggatgcctaccctgcattcaccaaggacttcgaggtgagccagctctatgactgcaactggatcgtggtcaactgctccacaccggccaactacttccacgtgctgcgccggcagatcctgctgcccttccgcaagccgctgattatcttcacacctaaatctctgctgaggcacccagaggccaagtccagctttgaccaaatggtatccggtatgttggccgggacccagcggctgcaccagccacaggaaacaggaacactcacctggtgtcactgaagaagtttctggatactgccttcaatctccaggcctttgagggcaagacattttagagctgggcaaaacctgtgtaggtctcgctgtgggtttgctggggaccaagggggtgatgaaaaggggaggggcggagctcctgcccaagagaggggctgtggggccccaggataaaacagacacagtgacagggccaagagccagcactgctggccttggtgtcatgccagaatctaccaggactgagggagccagaggagtcctgtaggcaggctactgtgctggagcatcccccagctgctcccatcttgctggaatttcttgggcggcttctccacctgtatctcaagacagacacccgggggcctgtgtctgtggccgctcccatcccggcagccctggctgctgctcgccccaccctcgcttatctgtagattcaaagcgatgttctcttctgtgctcttagaagtagggagttcagcagtaacagccaggtgaagcgaacctgctgggtgatttgtttgcgctctgttttatggggcattcctgcgagatgtgtcagcttctgtatgaaatgcagccacagctcatgtgtaccaaagtagaaaaccaaatcacagagaaataaaaacatgcttcagagagaaaaaatgttttcatttcatgttgtaa

SEQ ID NO: 10449 - DNA, 1013 bp, Homo sapiens
ggtaattggcacggcgcgcgcgcaccccttccgcgcagccccctgacctgcagcctccggacctcgctgcagcgcggacccggcccgcccgcccgaatgagtcagctgaggctgctgccgtcccgtcttggggtacaggctgcgaggctcctggctgcacatgacgtcccggtgtttggctggcgcagcaggtcctccgggccaccggccaccttcccaagcagcaaaggtggaggcggctccagttacatggaggagatgtacttcgcctggttggaaaacccccagagtgtccacaagtcctgggacagcttcttcagggaagccagcgaggaagccttttctggctctgctcagccacggcccccttctgttgtccatgagagcaggtctgcagtctcaagtcggaccaagaccagcaaattggtggaggaccacctggctgtgcagtccctgatccgggcctaccagatccggggtcaccatgtggcccagctggaccccctgggcattctggatgcagacctggactcctttgtgccctcagacttgatcacaaccattgataaactggccttctatgaccttcaggaggctgaccttgataaggagttccagctgccgacaaccaccttcattgggggctctgaaaacaccctttctctgcgggagatcattcggcgcctggagaacacctactgccagcacattggcctggagttcatgttcatcaacgatgtggagcagtgccagtggatccggcagaagtttgagacccctggtgtgatgcagttctccagcgaggagaagcggaccctgctggcccggctagtgcgctccatgaggtttgaagacttcctggcccggaaatggtcctcagagaagcggtttggcctggagggctgtgaagtgatgattcctgccctcaagaccatcatcgacaaatccagcgagatggggattgagaatgtcatcttggggatgccacacaggtgggtccccctccctgctgt

SEQ ID NO: 10450 - DNA, 3742 bp, Homo sapiens
  misc_feature (1342)..(1342): n is a, c, g, or t
ggtaattggcacggcgcgcgcgcaccccttccgcgcagccccctgacctgcagcctccggacctcgctgcagcgcggacccggcccgcccgcccgaatgagtcagctgaggctgctgccgtcccgtcttggggtacaggctgcgaggctcctggctgcacatgacgtcccggtgtttggctggcgcagcaggtcctccgggccaccggccaccttcccaagcagcaaaggtggaggcggctccagttacatggaggagatgtacttcgcctggttggaaaacccccagagtgtccacaagtcctgggacagcttcttcagggaagccagcgaggaagccttttctggctctgctcagccacggcccccttctgttgtccatgagagcaggtctgcagtctcaagtcggaccaagaccagcaaattggtggaggaccacctggctgtgcagtccctgatccgggcctaccagatccggggtcaccatgtggcccagctggaccccctgggcattctggatgcagacctggactcctttgtgccctcagacttgatcacaaccattgataaactggccttctatgaccttcaggaggctgaccttgataaggagttccagctgccgacaaccaccttcattgggggctctgaaaacaccctttctctgcgggagatcattcggcgcctggagaacacctactgccagcacattggcctggagttcatgttcatcaacgatgtggagcagtgccagtggatccggcagaagtttgagacccctggtgtgatgcagttctccagcgaggagaagcggaccctgctggcccggctagtgcgctccatgaggtttgaagacttcctggcccggaaatggtcctcagagaagcggtttggcctggagggctgtgaagtgatgattcctgccctcaagaccatcatcgacaaatccagcgagatggggattgagaatgtcatcttggggatgccacacaggggaaggctgaacgtgctggccaacgtgatccgcaaggacctggagcagatcttctgccagtttgaccccaagctggaggcggcggacgagggctccggggatgtcaagtaccacctgggcatgtaccatgagaggatcaaccgcgtcaccaaccggaacatcactctgtcgctggttgccaacccctcccacctggaggcagtggaccctgtggtgcaggggaagacaaaggcagagcagttctaccgtggagatgcccagggcaagaaggtcatgtccatcctggttcatggggacgccgcctttgctggccagggcgtggtatatgagaccttccacctgagcgacntgccctcctacacgaccaatggtaccgtgcacgtcgtcgtcaacaaccagattggattcaccacagacccccgaatggcccgctcctcaccatacccgaccgacgtggcccgggtggtcaatgcgcctatcttccatgtgaatgccgatgacccagaggctgtgatatatgtgtgcagtgtggcagccgaatggagaaacactttcaacaaagatgttgtcgtggacctggtctgttaccgccggcgtggccacaatgagatggacgagcccatgttcacccagccgctcatgtacaagcagatccacagacaggtgcctgtgctgaagaagtacgcagacaagctgattgccgagggcacagtcaccctgcaggagtttgaggaagaaattgccaaatacgaccggatctgtgaggaggcttatggcaggtccaaggataaaaagattctgcatataaagcactggttggactccccctggcctggcttcttcaacgtagatggggagcccaagagcatgacatgcccagccacggggatccctgaggacatgctcacccacatcggcagtgtggccagctctgtgcccctggaggactttaagatccacactggcctctctcgcattctgcggggccgtgcggacatgaccaagaaccggacggtggactgggcgttggcagagtacatggcctttggctccctgctgaaggaaggcatccacgtgcggctcagcgggcaggatgtggagaggggcacattcagtcaccggcaccatgttctccatgaccaggaggttgaccgcaggacgtgtgtgcctatgaatcatctctggcctgaccaggccccgtacaccgtgtgcaacagctccctctcggagtacggagtcctgggctttgagctgggctatgccatggccagccccaatgccctggtcctctgggaggcccagtttggggacttccacaacacggcccagtgcatcatcgaccagttcatcagcaccggccaggccaagtgggtgcggcataatggcattgtgctgctgctgccccatggcatggaaggcatgggcccagagcactcgtcagcgaggcccgaaaggttcctgcagatgagcaatgatgactcggatgcctaccctgcattcaccaaggacttcgaggtgagccagctctatgactgcaactggatcgtggtcaactgctccacaccggccaactacttccacgtgctgcgccggcagatcctgctgcccttccgcaagccgctgattatcttcacacctaaatctctgctgaggcacccagaggccaagtccagctttgaccaaatggtatccgggaccagcttccagcgggtgattcctgaagatggggccgcagcacgggcccctgagcaggtgcagcggctcatcttctgcacgggaaaggtgtactatgacctggtgaaggagcggagcagccaggacctggaggagaaagtggccatcacgcgcctggagcagatctctccattccccttcgacctgatcaagcaggaggcagagaagtacccaggtgcggagctggcctggtgtcaggaggagcacaagaacatgggctactatgactacatcagcccacgcttcatgaccatcctgaggcgcgcacggcccatatggtatgttggccgggacccagcggctgcaccagccacaggaaacaggaacactcacctggtgtcactgaagaagtttctggatactgccttcaatctccaggcctttgagggcaagacattttagagctgggcaaaacctgtgtaggtctcgctgtgggtttgctggggaccaagggggtgatgaaaaggggaggggcggagctcctgcccaagagaggggctgtggggccccaggataaaacagacacagtgacagggccaagagccagcactgctggccttggtgtcatgccagaatctaccaggactgagggagccagaggagtcctgtaggcaggctactgtgctggagcatcccccagctgctcccatcttgctggaatttcttgggcggcttctccacctgtatctcaagacagacacccgggggcctgtgtctgtggccgctcccatcccggcagccctggctgctgctcgccccaccctcgcttatctgtagattcaaagcgatgttctcttctgtgctcttagaagtagggagttcagcagtaacagccaggtgaagcgaacctgctgggtgatttgtttgcgctctgttttatggggcattcctgcgagatgtgtcagcttctgtatgaaatgcagccacagctcatgtgtaccaaagtagaaaaccaaatcacagagaaataaaaacatgcttcagagagaaaaaatgttttcatttcatgttgtaa

SEQ ID NO: 10451 - DNA, 3714 bp, Homo sapiens
  misc_feature (1342)..(1342): n is a, c, g, or t
ggtaattggcacggcgcgcgcgcaccccttccgcgcagccccctgacctgcagcctccggacctcgctgcagcgcggacccggcccgcccgcccgaatgagtcagctgaggctgctgccgtcccgtcttggggtacaggctgcgaggctcctggctgcacatgacgtcccggtgtttggctggcgcagcaggtcctccgggccaccggccaccttcccaagcagcaaaggtggaggcggctccagttacatggaggagatgtacttcgcctggttggaaaacccccagagtgtccacaagtcctgggacagcttcttcagggaagccagcgaggaagccttttctggctctgctcagccacggcccccttctgttgtccatgagagcaggtctgcagtctcaagtcggaccaagaccagcaaattggtggaggaccacctggctgtgcagtccctgatccgggcctaccagatccggggtcaccatgtggcccagctggaccccctgggcattctggatgcagacctggactcctttgtgccctcagacttgatcacaaccattgataaactggccttctatgaccttcaggaggctgaccttgataaggagttccagctgccgacaaccaccttcattgggggctctgaaaacaccctttctctgcgggagatcattcggcgcctggagaacacctactgccagcacattggcctggagttcatgttcatcaacgatgtggagcagtgccagtggatccggcagaagtttgagacccctggtgtgatgcagttctccagcgaggagaagcggaccctgctggcccggctagtgcgctccatgaggtttgaagacttcctggcccggaaatggtcctcagagaagcggtttggcctggagggctgtgaagtgatgattcctgccctcaagaccatcatcgacaaatccagcgagatggggattgagaatgtcatcttggggatgccacacaggggaaggctgaacgtgctggccaacgtgatccgcaaggacctggagcagatcttctgccagtttgaccccaagctggaggcggcggacgagggctccggggatgtcaagtaccacctgggcatgtaccatgagaggatcaaccgcgtcaccaaccggaacatcactctgtcgctggttgccaacccctcccacctggaggcagtggaccctgtggtgcaggggaagacaaaggcagagcagttctaccgtggagatgcccagggcaagaaggtcatgtccatcctggttcatggggacgccgcctttgctggccagggcgtggtatatgagaccttccacctgagcgacntgccctcctacacgaccaatggtaccgtgcacgtcgtcgtcaacaaccagattggattcaccacagacccccgaatggcccgctcctcaccatacccgaccgacgtggcccgggtggtcaatgcgcctatcttccatgtgaatgccgatgacccagaggctgtgatatatgtgtgcagtgtggcagccgaatggagaaacactttcaacaaagatgttgtcgtggacctggtctgttaccgccggcgtggccacaatgagatggacgagcccatgttcacccagccgctcatgtacaagcagatccacagacaggtgcctgtgctgaagaagtacgcagacaagctgattgccgagggcacagtcaccctgcaggagtttgaggaagaaattgccaaatacgaccggatctgtgaggaggcttatggcaggtccaaggataaaaagattctgcatataaagcactggttggactccccctggcctggcttcttcaacgtagatggggagcccaagagcatgacatgcccagccacggggatccctgaggacatgctcacccacatcggcagtgtggccagctctgtgcccctggaggactttaagatccacactggcctctctcgcattctgcggggccgtgcggacatgaccaagaaccggacggtggactgggcgttggcagagtacatggcctttggctccctgctgaaggaaggcatccacgtgcggctcagcgggcaggatgtggagaggggcacattcaggaggttgaccgcaggacgtgtgtgcctatgaatcatctctggcctgaccaggccccgtacaccgtgtgcaacagctccctctcggagtacggagtcctgggctttgagctgggctatgccatggccagccccaatgccctggtcctctgggaggcccagtttggggacttccacaacacggcccagtgcatcatcgaccagttcatcagcaccggccaggccaagtgggtgcggcataatggcattgtgctgctgctgccccatggcatggaaggcatgggcccagagcactcgtcagcgaggcccgaaaggttcctgcagatgagcaatgatgactcggatgcctaccctgcattcaccaaggacttcgaggtgagccagctctatgactgcaactggatcgtggtcaactgctccacaccggccaactacttccacgtgctgcgccggcagatcctgctgcccttccgcaagccgctgattatcttcacacctaaatctctgctgaggcacccagaggccaagtccagctttgaccaaatggtatccgggaccagcttccagcgggtgattcctgaagatggggccgcagcacgggcccctgagcaggtgcagcggctcatcttctgcacgggaaaggtgtactatgacctggtgaaggagcggagcagccaggacctggaggagaaagtggccatcacgcgcctggagcagatctctccattccccttcgacctgatcaagcaggaggcagagaagtacccaggtgcggagctggcctggtgtcaggaggagcacaagaacatgggctactatgactacatcagcccacgcttcatgaccatcctgaggcgcgcacggcccatatggtatgttggccgggacccagcggctgcaccagccacaggaaacaggaacactcacctggtgtcactgaagaagtttctggatactgccttcaatctccaggcctttgagggcaagacattttagagctgggcaaaacctgtgtaggtctcgctgtgggtttgctggggaccaagggggtgatgaaaaggggaggggcggagctcctgcccaagagaggggctgtggggccccaggataaaacagacacagtgacagggccaagagccagcactgctggccttggtgtcatgccagaatctaccaggactgagggagccagaggagtcctgtaggcaggctactgtgctggagcatcccccagctgctcccatcttgctggaatttcttgggcggcttctccacctgtatctcaagacagacacccgggggcctgtgtctgtggccgctcccatcccggcagccctggctgctgctcgccccaccctcgcttatctgtagattcaaagcgatgttctcttctgtgctcttagaagtagggagttcagcagtaacagccaggtgaagcgaacctgctgggtgatttgtttgcgctctgttttatggggcattcctgcgagatgtgtcagcttctgtatgaaatgcagccacagctcatgtgtaccaaagtagaaaaccaaatcacagagaaataaaaacatgcttcagagagaaaaaatgttttcatttcatgttgtaa

SEQ ID NO: 10452 - DNA, 3366 bp, Homo sapiens
  misc_feature (966)..(966): n is a, c, g, or t
ggtaattggcacggcgcgcgcgcaccccttccgcgcagccccctgacctgcagcctccggacctcgctgcagcgcggacccggcccgcccgcccgatccggggtcaccatgtggcccagctggaccccctgggcattctggatgcagacctggactcctttgtgccctcagacttgatcacaaccattgataaactggccttctatgaccttcaggaggctgaccttgataaggagttccagctgccgacaaccaccttcattgggggctctgaaaacaccctttctctgcgggagatcattcggcgcctggagaacacctactgccagcacattggcctggagttcatgttcatcaacgatgtggagcagtgccagtggatccggcagaagtttgagacccctggtgtgatgcagttctccagcgaggagaagcggaccctgctggcccggctagtgcgctccatgaggtttgaagacttcctggcccggaaatggtcctcagagaagcggtttggcctggagggctgtgaagtgatgattcctgccctcaagaccatcatcgacaaatccagcgagatggggattgagaatgtcatcttggggatgccacacaggggaaggctgaacgtgctggccaacgtgatccgcaaggacctggagcagatcttctgccagtttgaccccaagctggaggcggcggacgagggctccggggatgtcaagtaccacctgggcatgtaccatgagaggatcaaccgcgtcaccaaccggaacatcactctgtcgctggttgccaacccctcccacctggaggcagtggaccctgtggtgcaggggaagacaaaggcagagcagttctaccgtggagatgcccagggcaagaaggtcatgtccatcctggttcatggggacgccgcctttgctggccagggcgtggtatatgagaccttccacctgagcgacntgccctcctacacgaccaatggtaccgtgcacgtcgtcgtcaacaaccagattggattcaccacagacccccgaatggcccgctcctcaccatacccgaccgacgtggcccgggtggtcaatgcgcctatcttccatgtgaatgccgatgacccagaggctgtgatatatgtgtgcagtgtggcagccgaatggagaaacactttcaacaaagatgttgtcgtggacctggtctgttaccgccggcgtggccacaatgagatggacgagcccatgttcacccagccgctcatgtacaagcagatccacagacaggtgcctgtgctgaagaagtacgcagacaagctgattgccgagggcacagtcaccctgcaggagtttgaggaagaaattgccaaatacgaccggatctgtgaggaggcttatggcaggtccaaggataaaaagattctgcatataaagcactggttggactccccctggcctggcttcttcaacgtagatggggagcccaagagcatgacatgcccagccacggggatccctgaggacatgctcacccacatcggcagtgtggccagctctgtgcccctggaggactttaagatccacactggcctctctcgcattctgcggggccgtgcggacatgaccaagaaccggacggtggactgggcgttggcagagtacatggcctttggctccctgctgaaggaaggcatccacgtgcggctcagcgggcaggatgtggagaggggcacattcagtcaccggcaccatgttctccatgaccaggaggttgaccgcaggacgtgtgtgcctatgaatcatctctggcctgaccaggccccgtacaccgtgtgcaacagctccctctcggagtacggagtcctgggctttgagctgggctatgccatggccagccccaatgccctggtcctctgggaggcccagtttggggacttccacaacacggcccagtgcatcatcgaccagttcatcagcaccggccaggccaagtgggtgcggcataatggcattgtgctgctgctgccccatggcatggaaggcatgggcccagagcactcgtcagcgaggcccgaaaggttcctgcagatgagcaatgatgactcggatgcctaccctgcattcaccaaggacttcgaggtgagccagctctatgactgcaactggatcgtggtcaactgctccacaccggccaactacttccacgtgctgcgccggcagatcctgctgcccttccgcaagccgctgattatcttcacacctaaatctctgctgaggcacccagaggccaagtccagctttgaccaaatggtatccgggaccagcttccagcgggtgattcctgaagatggggccgcagcacgggcccctgagcaggtgcagcggctcatcttctgcacgggaaaggtgtactatgacctggtgaaggagcggagcagccaggacctggaggagaaagtggccatcacgcgcctggagcagatctctccattccccttcgacctgatcaagcaggaggcagagaagtacccaggtgcggagctggcctggtgtcaggaggagcacaagaacatgggctactatgactacatcagcccacgcttcatgaccatcctgaggcgcgcacggcccatatggtatgttggccgggacccagcggctgcaccagccacaggaaacaggaacactcacctggtgtcactgaagaagtttctggatactgccttcaatctccaggcctttgagggcaagacattttagagctgggcaaaacctgtgtaggtctcgctgtgggtttgctggggaccaagggggtgatgaaaaggggaggggcggagctcctgcccaagagaggggctgtggggccccaggataaaacagacacagtgacagggccaagagccagcactgctggccttggtgtcatgccagaatctaccaggactgagggagccagaggagtcctgtaggcaggctactgtgctggagcatcccccagctgctcccatcttgctggaatttcttgggcggcttctccacctgtatctcaagacagacacccgggggcctgtgtctgtggccgctcccatcccggcagccctggctgctgctcgccccaccctcgcttatctgtagattcaaagcgatgttctcttctgtgctcttagaagtagggagttcagcagtaacagccaggtgaagcgaacctgctgggtgatttgtttgcgctctgttttatggggcattcctgcgagatgtgtcagcttctgtatgaaatgcagccacagctcatgtgtaccaaagtagaaaaccaaatcacagagaaataaaaacatgcttcagagagaaaaaatgttttcatttcatgttgtaa

SEQ ID NO: 10453 - DNA, 416 bp, Homo sapiens
ttagcacatggacgatgctcaggaaatgctgctagacactgagcgctgaataagtttcataaatacctgcaagtattgcatcaggggatcaatagttaagatttaaaaaaattaacatgaattcgaagcaatataaaagtataattattctgagagagttttttcagttgaaactttgattacattttaaatgtgttttggatatttcttgtcttaggaatgtctttatcgtgaatctaatttttccagtgaattttgaaatacaaattcaattccacaggatgcaagcttctggatttaatttggttaataaattatctggtgatatcttcctttggtaaggtttggtagaagcatggcatgcaggaatgtgatgcactttaagtcttgtgttggttggatttcttaaaaaaaaa

SEQ ID NO: 10454 - DNA, 480 bp, Homo sapiens
agaccctctattgttgctaacataatttctgccagaaatgaagctgctaatttactctggaggagaaagcatagcttttctttaggtcaggtaaaaaaaaggacaagagagatgagatcagtgtattgaactttcctctgaattctttgcttttctttcctcaaataatgacagcccaagaatgccctttaactcccctggtataaatatcactgagtcttgtaaaacattgcttccctgaatcttagatatttgaggcaagaaagtaacttctttaatgttatcattaactttatatgtaagaaataaagccattttctgccaattggaaatacccatgattaaataaaacaagacacctttgacatgactagcctcctttgccatcaggaatcctgccgtttattgttttaatattgtttgttcttcagaaatgaagttaatagtgatcaaaaagaaaaattaaaatgtttaagctac

SEQ ID NO: 10455 - DNA, 609 bp, Homo sapiens
gtatgtgctacacaggacatttgctgggagaaatgatggtagtcttactgaaattctagatgcaaaacctatgtattcactggtgttcataatttagaatgtgactacacatgttaatacttactctaagtgttttactgaatttcccccccacatttttaaatgtttaaataagcattaaataaatttaaataagctttaaaagtcaaatagctagtagaagggcccagagtagcaaaaccagaaagagacacctgcttctcacatctgtttgttcagatgtctcttgacctttttgctagggggacgttgttagattatttcatgcggaacaagagaagtttttgacttgtgatgaatatgagaaaaaacagcacattttccttcgtacgaccttgcgccaatcagctacttctgctactagttctaaagcactctgggaaatagaggtggttcatcatgacccatgccgtgggggtgcaggacagtggaacagcttgttcagatttaagcatcttgcaactggaaactatttagctgcagagcttaatcctgattatcgagatgcccaaaatgaaggaaaaaatgtggtgagtagaactggctttt

SEQ ID NO: 10456 - DNA, 12856 bp, Homo sapiens
gcggccgcacgcgcccgctcccccgccggggtcccccgccgcccctccagcgccgcccagcgtcgcgtccccgcgcgggccggtgcggcggcagcagaggcttcccgggtggcccggcctcccgagggtcgccccgccccggcccagctccgcccccggccgctgctccctgattggccgcccccccacctctccagggctcctctcctcctcctcgcccaatgggcaccggcacctggtccaaaaattcccctgaggggaccgagggggctcggccacttccagctcccgccggcggctgtgacggccgcagcgggtcgcagagcagggagtggacacgagagtggggagcggagagggaaggaggaggaggaggagcaaaggtgttggagagaaaacttcagaaaggaacaggaaacctgccggggagcgcggcggcggctgcggcttctctgggcgcctgggctgcgctcttcgcggggtgtcccgagctggcgcttggccccggtctggcttccccggcgcgcaccacggctgagcgcgacgctcagtggctcgggccgtgcctccgccgtggctcttggccgctgtagtcccgcgatccgatccgcttctgccgcggcggctccctggagagagggcggcgagggcgcagggaagaagagggacgtccactgtggaacatgaagcagcatgaagcagcatgactgagaaaatgtccagcttcctctacataggggacatcgtgtccctgtacgcggagggctcggtcaacggcttcatcagcaccttggggttagtggatgacagatgtgtggtgcacccagaggccggggaccttgccaaccctcccaagaagttcagagactgccttttcaaggtgtgccctatgaacagatattctgcccagaagcaatattggaaagcaaagcaagccaaacaagggaaccacaccgaggcagccttgctgaagaaactacagcacgctgcagaactggaacaaaaacaaaatgaatcggagaataagaaactgttgggagaaattgtaaaatacagtaatgttatacaactactgcatataaaaagcaacaaatatcttactgtcaacaagagattacctgctttactggagaagaatgccatgcgtgtgtccttggatgctgcaggaaatgaagggtcttggttttatattcatccattctggaaactgagaagcgagggtgacaatattgttgtaggagataaagttgttttgatgcctgtgaatgcagggcagccactacatgccagcaacatagagcttcttgataacccagggtgtaaagaggtgaatgctgtcaattgcaacaccagctggaaaatcactttattcatgaaatatagttcctatcgagaggatgtattaaaaggaggggacgttgttagattatttcatgcggaacaagagaagtttttgacttgtgatgaatatgagaaaaaacagcacattttccttcgtacgaccttgcgccaatcagctacttctgctactagttctaaagcactctgggaaatagaggtggttcatcatgacccatgccgtgggggtgcaggacagtggaacagcttgttcagatttaagcatcttgcaactggaaactatttagctgcagagcttaatcctgattatcgagatgcccaaaatgaaggaaaaaatgtgagagatggagtccctccaacttcaaagaaaaaacgccaggcaggggagaagatcatgtatactttggtttcagtcccgcatggcaatgacattgcatccctttttgaactagatgccacaactcttcagagagctgactgcctggttccaaggaactcatatgttcggttaaggcatttatgcaccaacacatgggtaaccagtactagtatccccatagacacagatgaagagaggcctgttatgttaaagattggaacctgccaaaccaaagaagataaagaagcgttcgcaatcgtgtctgttccactgtctgaagttcgagacttagactttgccaatgatgccaataaagtactagcgaccacagttaaaaagctagaaaacggcacaataactcagaatgaaaggaggtttgtaaccaaattattggaagatctcatattctttgttgctgatgtgcctaataatggacaagaagttctggatgtggttatcactaagccaaaccgagagcgtcaaaaattgatgagggaacaaaacatactggcacaggtatttggaattcttaaagcaccctttaaagagaaagcaggagaaggctcgatgctgagacttgaagatctgggggatcaaagatatgcaccctacaagtacatgctgcggctctgttaccgcgtcctgagacactcgcagcaggattaccggaaaaatcaggaatatattgctaagaatttctgtgtcatgcagtcccagattggctatgatattttggcagaagatactatcacagctttgttgcacaacaacagaaaactactagagaaacatatcacagcaaaagaaatagaaacatttgtcagtttactcaggagaaatcgggagccaaggtttttggattatttgtcagatctgtgtgtgtctaataccactgctatccctgtaactcaagaactcatctgtaaatttatgttgagtccaggcaatgcagacattctcattcaaactaaggtggtctcaatgcaagcagacaaccccatggagagctccatcctttcagatgacattgatgatgaagaagtttggctctattggattgacagcaacaaggaacctcatggcaaagctatcaggcaccttgctcaagaggcaaaagaaggcaccaaagctgacttagaagttcttacctattacaggtaccagctaaacctctttgcaaggatgtgcttggatcgccagtatctggccataaaccagatttctacacagctgtctgtagacctgatcctgcggtgtgtgtcggatgagagcctgccgttcgacctccgagcgtccttctgtcgcctcatgctccacatgcacgttgaccgggatccccaggagtccgtggtgcctgttcgctatgccaggctctggacagaaatccccacaaagatcacaattcatgaatatgattctataacagactcttccagaaatgatatgaagaggaaatttgccctgacaatggaatttgttgaagaatatttgaaagaagttgtaaaccagccctttccttttggggataaagaaaaaaataaactgacatttgaggtggtccacttggctcggaatcttatatactttggattttatagtttcagtgagttattaaggctaacaagaacacttctggctattttagacattgtacaggcccccatgtcatcatactttgaaagattaagcaaatttcaagatggaggaaacaatgtgatgagaaccattcatggggtgggagagatgatgacccagatggtactcagtagaggctccatcttccccatgagcgtgccggatgtgccacccagcatccacccgagcaagcaagggagccccaccgagcatgaggatgtgactgtgatggacaccaagctgaagatcattgagattttgcagtttatcctgagtgtcagactggattataggatctcatatatgctgtcaatatataagaaggagtttggagaggacaatgacaatgcggagacatctgccagtggatctccagacactttactaccatcagctattgttcctgatatagatgaaattgcagctcaggcagaaactatgtttgcgggaagaaaagaaaaaaatccagttcaacttgacgatgaaggaggcaggacgtttttacgggtcctcattcatctgatcatgcacgactacccgcctttgctgtctggagccctgcagctgttgtttaagcacttcagccagagggcagaggttttacaggcatttaagcaggtgcaattactggtgtctaatcaagacgtagataactacaagcaaatcaaggcagatctagaccagcttcgactgacagtagaaaagtctgagctatgggtggagaagagcagcaactatgagaatggagaaataggggaaagtcaagtgaaaggtggtgaagagccaattgaggaatcaaacattttaagtccagtgcaggatggaacaaagaaacctcagattgacagcaacaagagcaataactaccggattgtaaaggagattttgatcaggctaagtaaactctgtgtgcagaataaaaagtgtcggaatcaacatcaacgattactgaaaaatatgggggcgcattcggtggtgttggatcttctgcagataccctatgaaaagaatgatgaaaagatgaatgaagtaatgaatctagcccatacatttctgcagaatttctgtcgaggaaatccacagaatcaagttcttcttcataaacatctgaatttgtttttaactccaggtctccttgaagcagaaaccatgcggcacatcttcatgaacaattaccatctgtgcaacgaaattagcgagagagttgtacaacactttgtgcactgcattgagacacatggccgccacgtggagtacctgaggtttttgcaaacaattgtaaaagcagatggtaaatatgtgaagaaatgccaggatatggtaatgacagagttgataaatgggggtgaagacgtgctgatattttacaatgatagagcatcatttccaatccttctccatatgatgtgttcagagagagaccgaggggatgagagtggccccttagcctaccacatcaccctggtggagttgctggcagcatgcacagaggggaaaaatgtctacactgaaatcaagtgtaattcccttctcccgctggacgacatagtgagggtggtgacccatgacgactgcatccctgaggttaaaattgcttatgtgaactttgttaatcactgttatgttgacactgaagtggaaatgaaagaaatctatacaagtaaccacatttggaaattatttgagaacttcttggtggatatggcaagggtttgcaacacaactacagacaggaaacatgcagacatctttttggaaaagtgtgttactgagtcaataatgaatattgtgagcggcttctttaattctcccttttcagacaatagtaccagcctccagacacatcagccagtttttattcagctactgcaatctgccttcagaatttacaattgcacctggccaaacccagcgcagaaagcctcagtggaatcctgtatcagaactttggctgaagtggcaaaaaatcgtggaattgccattccagtggatttggacagccaagttaatactcttttcatgaagagccattcaaatatggtgcagagagcagcaatgggttggagactatcagctcgctctgggccacgctttaaggaagctcttggagggcctgcttgggattacagaaatattattgaaaagttacaggatgtagtggcctccttggagcaccagttcagcccaatgatgcaggctgaattctcagtgttggttgatgtattgtacagtccagaactgctgttccctgagggaagcgatgcaagaataagatgtggcgctttcatgtcgaagttgattaatcatacaaagaaactaatggagaaagaagaaaaactgtgcattaaaattcttcagacattacgagaaatgttagagaagaaagacagctttgtggaagagggtaacacattaagaaagatacttctgaatcgatactttaaaggtgattatagtattggtgtgaatggacacctatcaggagcctactccaaaactgcacaggtgggaggaagcttttctggacaagattcagataagatggggatatcaatgtcagacattcagtgtctgctggataaagaaggtgcatcagaacttgtcatcgatgttatagtgaacaccaaaaatgacagaattttttcagaaggcattttcctcggcattgccttgcttgaaggaggaaatacacaaacacagtattctttctaccagcagttgcatgaacaaaaaaagtcagaaaaattctttaaagttctctatgatcgaatgaaggctgctcagaaagaaataagatcaacagtgacagttaataccatagatttaggtaacaaaaaaagggacgatgacaatgaattgatgacatctggtccacgaatgagagtaagagattcaacactacatttaaaagagggaatgaaagggcaattaacagaagcttcttcagcaacatccaaagcatattgtgtatacagaagagaaatggatccagaaatagacattatgtgcacaggaccagaagcgggaaacactgaggaaaaatccgcagaggaagtaacaatgagtcccgcaattgccatcatgcagccaatactgagatttcttcagttactgtgtgagaatcacaaccgggaattgcagaacttcttgaggaatcaaaacaacaaaacaaattacaacctagtctgtgagacccttcagtttctggactgcatttgtggaagtacaaccggtggcctgggcctgttgggtctctacatcaatgagaagaatgtagcgctggtcaaccagaacctggagagcttgactgagtattgccagggcccttgccatgaaaatcagacctgtatcgctacacatgagtctaatgggattgatatcatcattgctttgattctgaatgacataaaccctcttggtaaataccgaatggacctggtgctccagctaaagaacaatgcatctaaacttttgctggccattatggaaagcagacatgacagtgagaatgcagaaagaattctttttaacatgagacccagagaactggtggatgtgatgaagaatgcctataaccaaggattggaatgtgaccatggggatgatgagggtggagatgatggtgtttctccaaaagatgttggacacaatatctatattctggcccatcagttggcccgccacaataaactgttgcagcagatgctcaaaccaggatcggatccagatgaaggagatgaagccttaaagtattatgccaaccacactgcacagattgagattgtccggcatgataggaccatggaacaaatagtttttcctgtccccaatatatgtgaatacctcactcgagaatccaagtgccgtgtgttcaatacaactgaaagggatgaacaaggaagtaaagtgaatgactttttccagcaaacagaagatctctacaatgaaatgaagtggcagaagaaaatcaggaataaccctgcactgttctggttctcgaggcacatctctctctgggggagcatttccttcaacctggctgtgttcatcaatttagctgttgctctcttctacccatttggggatgatggagatgaaggtacactttctccattgttctcggttcttctttggatagcagttgcgatctgcacatctatgctgtttttcttctccaagcctgtgggtattcggccgtttcttgtatcaataatgctcagatcaatatatacaataggtcttgggcctacattaatacttcttggtgcagctaatctttgtaataaaattgtttttctggtgagttttgttggaaatcgtggcacgttcacccgtgggtaccgagcagtcatcctggatatggcctttctctatcacgtggcgtatgtcctggtttgcatgctgggcctttttgtccatgaattcttctatagcttcctgctttttgatttggtgtacagggaagagactttgctgaatgtcataaaaagtgtcacacgaaatggccgctctattattctaactgcagtcctggctctcatcctcgtctacctgttttccattattgggttcctttttttgaaggatgacttcactatggaagttgataggctgaaaaaccgaactcctgttacaggcagtcatcaagtgcctactatgactttaactaccatgatggaagcatgtgccaaggagaactgttcacccacaattccagcttcaaatacagctgatgaagagtatgaagatggaattgaaaggacgtgtgacactctccttatgtgcattgtcaccgtgctgaaccagggcctcaggaatggcggtggtgtgggggatgtgctaagaaggccatcgaaagatgagcccttgtttgctgcccgagtggtttatgaccttcttttttatttcattgttatcattattgttctgaacttgatttttggtgttatcatcgatacttttgctgatctcagaagcgaaaaacagaaaaaagaagaaattctaaagacaacttgtttcatctgtggacttgagagagacaagtttgataataaaacggtttcatttgaggagcacattaagtcagaacacaatatgtggcattatttgtacttcatagtcctggtgaaagttaaagacccaacagaatacactggacctgaaagttatgtggctcaaatgattgtggagaagaatttggattggtttcctcggatgcgagccatgtccctcgttagcaatgaaggcgacagtgagcaaaatgaaattcggagccttcaggagaagttggaatcgaccatgagtctggtcaaacagctgtcgggtcagctggcggagctcaaggagcagatgacagaacaaaggaagaataagcagagactgggcttcctcggatcaaacacaccccatgtgaatcatcacatgccaccacactgataccatggggggaagccgtgactagcctttcatcagtgtcctgcctgatcactgaataaagaactgagatggaggggagtgaacagtgcctattgttgaaaagttaaaaacaaccaagtgccaagatgttgagtgggttagctccgagaacaatttataactgtgttttcatggttgcgaagacctaacctcaaatgcatctgctagaaagcgtacatcacacattcgcaatgcatcaggaagaaaaggcttgcccaaaaggctggagagggcagggagcggcaggatggaaggagacacggggcagggagaactctcttctgctaaatcgataggagtcagttttgtcttaaatgctgactacagccactgacatggttggctggaatttctttcttttaattgtggcatataggtttgtgacacaagaagtcatactttggtggctaagttttactaaggaaaataactgaaaagattaaaagtgagagctgaaaagagaaatgataatgcttccaaactgtagctgtcacagggcaatttctttatttataacatgaagcacaatggatttacagctctaggaacttagtactttggagcttttgcctctcacactgacaacataacaggatgtgattgccttctctgggattcagacaggctctgtcaatgtggagcacaaaaggagattttcatataacttgttaaaaacatgttctaagtcatgtataggctaagattttaagaagatctgggggaataaaaagccaacagtaagccccaggaaagggttttttgagaccatatgtatgctattaaaatatattgagattaatacatgaaaatgcttaaaagtgataggaattattgagaaacttatgatggtggcattgccttttataaacatggagtgaaagccatttgactcaacgtttgctgtgcttaaagaattgcttcaggacccgagcgtttttatgtatgctgttcctgcagttaggaaaaaaaaatccaagaaatgtattgaatactcaagaaaatgccacatttcaattacatatttaaaactgtatctgtaagggcttttcaaaatgtagcaagataaaaatctcttattcaaattgtttttgtattaaatcatgcactcagaatttgtcgagggagagaataacctggtgtgttcaggttattcttagagactacacatttggaatagcagagcaaaatatggataatgaaagtgttgggaaaaaagtgatgtgacagggagtgaagacacttgataccagactctgggagatactctgcaagttgacctggcctctcccccacaggaacaaaacactgcctccagagtctttaaattctcagttatcaacgccaaggtttaaggtctagatagggtttgctatagggtttgctctgacaatttttaaagcttttggattgttctaacatagcttaagctattggttcctaaaaatcccaaatcaagatctatgtagaatataaaggaagcctgaaccaatccttccacatactgttaagatgtagacttggaacaaagctgttgggacccagagcaatgaatttttgaactgaagctactggtactccccagcaccacctcatactaagaattcctcactctgacatgacagtattttttctgaccaggagctgaaagaccctgacattcatgatccaaagatataagaaattttgatatgtctgcatgcagcacagaactttgaacctaggaggcagtcaataaatacatgagaaattcagctgtcattcagttactcttaattctttataaaactttaaatgataccacatatttgtttgtttaaaatggctttcccaaaatcaaagtagactaaagcagccatctttaaaatccaggatcatcaatgctattaacagtatcaggtaaaaagtacactttaaaatattttaatcaggcagagttttatggatagagaatagaagagaaaggtagtaaatattgaacatattccaatataggaacctatctctgttttagtacaaaatatttctgacatctgaactagaggtcaagagaataaattcatttgtatacatctgagcaacctgtctttcagatgataaagtatctagccttttctgacaccataatagttcattttgtagggaataagccattaggtgtatataattgctttctagaaatgacctaatgtccccaaccactttgtagtggcagatcactgtttcacagcatattttctcccaaggaaagtattcaaaagagactgcaactaacaagactcttatttcatcaaaatttaaatatttctgagttgtatttttaatgcctctttcttttctgcctaaatgcttagaaattataaagcaaaaaaaaaaaaaaaacagcaacaaaaaatcgaagcagacaaaaaaggcacttttcagaacatcaaattcctaatgaagaagaggagaagataatggggaaatttgacatttgatataaatttatatttgttatgtgtatgtttgttaatgcaactggaatatttgacttaggtgagtatcagttaacatccttgtatttatatagtgacatcaaaataaatgcaatcatcttgaactttgatgttaagggagattttgaaaaaatatttagttatttcaaattcatattggttcaaaagtatcagtttctgctgaataatatttttaatttcaaaagggttttgttccctctgtgctccattctgaggctcaagagcttaatgcaagtatgttttctgagttaaaataacacttttagatgagaaaatgcttgtatcatacagggctataatataaataaataaattgtatgtatgcaaaatttatcatattttctaccccttaaaaaattaagttagaaataagcttattttcttgcacatcaatatttttctgttggtaaagaggacacaatttctagtagattgttaataacatcaggaagatatttctttcgtcagaactaattgtgtgcttattcccatattctcagctcataactccctgttttggctgctctctttattttacaattgtttcattgcaaacagcaaggcagtatagcccacactcagccactagcccccagtccccaggactgagaatgagtggggaggctggggagttggtgagagaaggtggagatagggatttctgcttcccagtactctatcattagagaaaaggaggggtaaatattagctaagaagaagaaaaaagcttattcttcagggacccagtagattggacgtaagcaagtaaatattgcacaggcatcatgatgtaatagttgatggaccccagagatacccctcacccatgcagagaacaaagctgtgtggaagagcaactaccataagatggtgtgttccttccagcggctgttaaagccatcctgaataacaaatcagctattcctacctacagacccattccaatatgctgtgatacacgacacggtgcaccgcagaggagacagacatcttcagcacaaacacagatgcctgcaggagcttggcaagtcactaaattgcatgaaattgtgaggtgcacaccaaatgcagggatgggggaggccgtgggaagctctgtattctcaaaatttgacagctaattccggtttttagaaaatgcctgaggccagtagaggccctctagtcactcactgctgctgtttctgatataattattgagaaagctatctcacttaatagaagaaaacacgcactatcaaaaccagatagcctaacgtgcatgtgaaaatcgagaaagctgaaaacaaatccaggtacccttctctgaactggagtgtttccacagacttgaataatttatgaaattatcacaccagtatttctcatatcaccaagaagactttctctcctgcagtagaggattgttatatttgcctaaaaaacacgattccaatatatgacaagggcagataatttataagtgaatgttaataaaattggatgtgtataa

SEQ ID NO: 10457 - DNA, 11941 bp, Homo sapiens
gcggccgcacgcgcccgctcccccgccggggtcccccgccgcccctccagcgccgcccagcgtcgcgtccccgcgcgggccggtgcggcggcagcagaggcttcccgggtggcccggcctcccgagggtcgccccgccccggcccagctccgcccccggccgctgctccctgattggccgcccccccacctctccagggctcctctcctcctcctcgcccaatgggcaccggcacctggtccaaaaattcccctgaggggaccgagggggctcggccacttccagctcccgccggcggctgtgacggccgcagcgggtcgcagagcagggagtggacacgagagtggggagcggagagggaaggaggaggaggaggagcaaaggtgttggagagaaaacttcagaaaggaacaggaaacctgccggggagcgcggcggcggctgcggcttctctgggcgcctgggctgcgctcttcgcggggtgtcccgagctggcgcttggccccggtctggcttccccggcgcgcaccacggctgagcgcgacgctcagtggctcgggccgtgcctccgccgtggctcttggccgctgtagtcccgcgatccgatccgcttctgccgcggcggctccctggagagagggcggcgagggcgcagggaagaagagggacgtccactgtggaacatgaagcagcatgaagcagcatgactgagaaaatgtccagcttcctctacataggggacatcgtgtccctgtacgcggagggctcggtcaacggcttcatcagcaccttggggttagtggatgacagatgtgtggtgcacccagaggccggggaccttgccaaccctcccaagaagttcagagactgccttttcaaggtgtgccctatgaacagatattctgcccagaagcaatattggaaagcaaagcaagccaaacaagggaaccacaccgaggcagccttgctgaagaaactacagcacgctgcagaactggaacaaaaacaaaatgaatcggagaataagaaactgttgggagaaattgtaaaatacagtaatgttatacaactactgcatataaaaagcaacaaatatcttactgtcaacaagagattacctgctttactggagaagaatgccatgcgtgtgtccttggatgctgcaggaaatgaagggtcttggttttatattcatccattctggaaactgagaagcgagggtgacaatattgttgtaggagataaagttgttttgatgcctgtgaatgcagggcagccactacatgccagcaacatagagcttcttgataacccagggtgtaaagaggtgaatgctgtcaattgcaacaccagctggaaaatcactttattcatgaaatatagttcctatcgagaggatgtattaaaaggaggggacgttgttagattatttcatgcggaacaagagaagtttttgacttgtgatgaatatgagaaaaaacagcacattttccttcgtacgaccttgcgccaatcagctacttctgctactagttctaaagcactctgggaaatagaggtggttcatcatgacccatgccgtgggggtgcaggacagtggaacagcttgttcagatttaagcatcttgcaactggaaactatttagctgcagagcttaatcctgattatcgagatgcccaaaatgaaggaaaaaatgtgagagatggagtccctccaacttcaaagaaaaaacgccaggcaggggagaagatcatgtatactttggtttcagtcccgcatggcaatgacattgcatccctttttgaactagatgccacaactcttcagagagctgactgcctggttccaaggaactcatatgttcggttaaggcatttatgcaccaacacatgggtaaccagtactagtatccccatagacacagatgaagagaggcctgttatgttaaagattggaacctgccaaaccaaagaagataaagaagcgttcgcaatcgtgtctgttccactgtctgaagttcgagacttagactttgccaatgatgccaataaagtactagcgaccacagttaaaaagctagaaaacggcacaataactcagaatgaaaggaggtttgtaaccaaattattggaagatctcatattctttgttgctgatgtgcctaataatggacaagaagttctggatgtggttatcactaagccaaaccgagagcgtcaaaaattgatgagggaacaaaacatactggcacaggtatttggaattcttaaagcaccctttaaagagaaagcaggagaaggctcgatgctgagacttgaagatctgggggatcaaagatatgcaccctacaagtacatgctgcggctctgttaccgcgtcctgagacactcgcagcaggattaccggaaaaatcaggaatatattgctaagaatttctgtgtcatgcagtcccagattggctatgatattttggcagaagatactatcacagctttgttgcacaacaacagaaaactactagagaaacatatcacagcaaaagaaatagaaacatttgtcagtttactcaggagaaatcgggagccaaggtttttggattatttgtcagatctgtgtgtgtctaataccactgctatccctgtaactcaagaactcatctgtaaatttatgttgagtccaggcaatgcagacattctcattcaaactaaggtggtctcaatgcaagcagacaaccccatggagagctccatcctttcagatgacattgatgatgaagaagtttggctctattggattgacagcaacaaggaacctcatggcaaagctatcaggcaccttgctcaagaggcaaaagaaggcaccaaagctgacttagaagttcttacctattacaggtaccagctaaacctctttgcaaggatgtgcttggatcgccagtatctggccataaaccagatttctacacagctgtctgtagacctgatcctgcggtgtgtgtcggatgagagcctgccgttcgacctccgagcgtccttctgtcgcctcatgctccacatgcacgttgaccgggatccccaggagtccgtggtgcctgttcgctatgccaggctctggacagaaatccccacaaagatcacaattcatgaatatgattctataacagactcttccagaaatgatatgaagaggaaatttgccctgacaatggaatttgttgaagaatatttgaaagaagttgtaaaccagccctttccttttggggataaagaaaaaaataaactgacatttgaggtggtccacttggctcggaatcttatatactttggattttatagtttcagtgagttattaaggctaacaagaacacttctggctattttagacattgtacaggcccccatgtcatcatactttgaaagattaagcaaatttcaagatggaggaaacaatgtgatgagaaccattcatggggtgggagagatgatgacccagatggtactcagtagaggctccatcttccccatgagcgtgccggatgtgccacccagcatccacccgagcaagcaagggagccccaccgagcatgaggatgtgactgtgatggacaccaagctgaagatcattgagattttgcagtttatcctgagtgtcagactggattataggatctcatatatgctgtcaatatataagaaggagtttggagaggacaatgacaatgcggagacatctgccagtggatctccagacactttactaccatcagctattgttcctgatatagatgaaattgcagctcaggcagaaactatgtttgcgggaagaaaagaaaaaaatccagttcaacttgacgatgaaggaggcaggacgtttttacgggtcctcattcatctgatcatgcacgactacccgcctttgctgtctggagccctgcagctgttgtttaagcacttcagccagagggcagaggttttacaggcatttaagcaggtgcaattactggtgtctaatcaagacgtagataactacaagcaaatcaaggcagatctagaccagcttcgactgacagtagaaaagtctgagctatgggtggagaagagcagcaactatgagaatggagaaataggggaaagtcaagtgaaaggtggtgaagagccaattgaggaatcaaacattttaagtccagtgcaggatggaacaaagaaacctcagattgacagcaacaagagcaataactaccggattgtaaaggagattttgatcaggctaagtaaactctgtgtgcagaataaaaagtgtcggaatcaacatcaacgattactgaaaaatatgggggcgcattcggtggtgttggatcttctgcagataccctatgaaaagaatgatgaaaagatgaatgaagtaatgaatctagcccatacatttctgcagaatttctgtcgaggaaatccacagaatcaagttcttcttcataaacatctgaatttgtttttaactccaggtctccttgaagcagaaaccatgcggcacatcttcatgaacaattaccatctgtgcaacgaaattagcgagagagttgtacaacactttgtgcactgcattgagacacatggccgccacgtggagtacctgaggtttttgcaaacaattgtaaaagcagatggtaaatatgtgaagaaatgccaggatatggtaatgacagagttgataaatgggggtgaagacgtgctgatattttacaatgatagagcatcatttccaatccttctccatatgatgtgttcagagagagaccgaggggatgagagtggccccttagcctaccacatcaccctggtggagttgctggcagcatgcacagaggggaaaaatgtctacactgaaatcaagtgtaattcccttctcccgctggacgacatagtgagggtggtgacccatgacgactgcatccctgaggttaaaattgcttatgtgaactttgttaatcactgttatgttgacactgaagtggaaatgaaagaaatctatacaagtaaccacatttggaaattatttgagaacttcttggtggatatggcaagggtttgcaacacaactacagacaggaaacatgcagacatctttttggaaaagtgtgttactgagtcaataatgaatattgtgagcggcttctttaattctcccttttcagacaatagtaccagcctccagacacatcagccagtttttattcagctactgcaatctgccttcagaatttacaattgcacctggccaaacccagcgcagaaagcctcagtggaatcctgtatcagaactttggctgaagtggcaaaaaatcgtggaattgccattccagtggatttggacagccaagttaatactcttttcatgaagagccattcaaatatggtgcagagagcagcaatgggttggagactatcagctcgctctgggccacgctttaaggaagctcttggagggcctgcttgggattacagaaatattattgaaaagttacaggatgtagtggcctccttggagcaccagttcagcccaatgatgcaggctgaattctcagtgttggttgatgtattgtacagtccagaactgctgttccctgagggaagcgatgcaagaataagatgtggcgctttcatgtcgaagttgattaatcatacaaagaaactaatggagaaagaagaaaaactgtgcattaaaattcttcagacattacgagaaatgttagagaagaaagacagctttgtggaagagggtaacacattaagaaagatacttctgaatcgatactttaaaggtgattatagtattggtgtgaatggacacctatcaggagcctactccaaaactgcacaggtgggaggaagcttttctggacaagattcagataagatggggatatcaatgtcagacattcagtgtctgctggataaagaaggtgcatcagaacttgtcatcgatgttatagtgaacaccaaaaatgacagaattttttcagaaggcattttcctcggcattgccttgcttgaaggaggaaatacacaaacacagtattctttctaccagcagttgcatgaacaaaaaaagtcagaaaaattctttaaagttctctatgatcgaatgaaggctgctcagaaagaaataagatcaacagtgacagttaataccatagatttaggtaacaaaaaaagggacgatgacaatgaattgatgacatctggtccacgaatgagagtaagagattcaacactacatttaaaagagggaatgaaagggcaattaacagaagcttcttcagcaacatccaaagcatattgtgtatacagaagagaaatggatccagaaatagacattatgtgcacaggaccagaagcgggaaacactgaggaaaaatccgcagaggaagtaacaatgagtcccgcaattgccatcatgcagccaatactgagatttcttcagttactgtgtgagaatcacaaccgggaattgcagaacttcttgaggaatcaaaacaacaaaacaaattacaacctagtctgtgagacccttcagtttctggactgcatttgtggaagtacaaccggtggcctgggcctgttgggtctctacatcaatgagaagaatgtagcgctggtcaaccagaacctggagagcttgactgagtattgccagggcccttgccatgaaaatcagacctgtatcgctacacatgagtctaatgggattgatatcatcattgctttgattctgaatgacataaaccctcttggtaaataccgaatggacctggtgctccagctaaagaacaatgcatctaaacttttgctggccattatggaaagcagacatgacagtgagaatgcagaaagaattctttttaacatgagacccagagaactggtggatgtgatgaagaatgcctataaccaaggattggaatgtgaccatggggatgatgagggtggagatgatggtgtttctccaaaagatgttggacacaatatctatattctggcccatcagttggcccgccacaataaactgttgcagcagatgctcaaaccaggatcggatccagatgaaggagatgaagccttaaagtattatgccaaccacactgcacagattgagattgtccggcatgataggaccatggaacaaatagtttttcctgtccccaatatatgtgaatacctcactcgagaatccaagtgccgtgtgttcaatacaactgaaagggatgaacaaggaagtaaagtgaatgactttttccagcaaacagaagatctctacaatgaaatgaagtggcagaagaaaatcaggaataaccctgcactgttctggttctcgaggcacatctctctctgggggagcatttccttcaacctggctgtgttcatcaatttagctgttgctctcttctacccatttggggatgatggagatgaaggtacactttctccattgttctcggttcttctttggatagcagttgcgatctgcacatctatgctgtttttcttctccaagcctgtgggtattcggccgtttcttgtatcaataatgctcagatcaatatatacaataggtcttgggcctacattaatacttcttggtgcagctaatctttgtaataaaattgtttttctggtgagttttgttggaaatcgtggcacgttcacccgtgggtaccgagcagtcatcctggatatggcctttctctatcacgtggcgtatgtcctggtttgcatgctgggcctttttgtccatgaattcttctatagcttcctgctttttgatttggtgtacagggaagagactttgctgaatgtcataaaaagtgtcacacgaaatggccgctctattattctaactgcagtcctggctctcatcctcgtctacctgttttccattattgggttcctttttttgaaggatgacttcactatggaagttgataggctgaaaaaccgaactcctgttacaggcagtcatcaagtgcctactatgactttaactaccatgatggaagcatgtgccaaggagaactgttcacccacaattccagcttcaaatacagctgatgaagagtatgaagatggaattgaaaggacgtgtgacactctccttatgtgcattgtcaccgtgctgaaccagggcctcaggaatggcggtggtgtgggggatgtgctaagaaggccatcgaaagatgagcccttgtttgctgcccgagtggtttatgaccttcttttttatttcattgttatcattattgttctgaacttgatttttggtgttatcatcgatacttttgctgatctcagaagcgaaaaacagaaaaaagaagaaattctaaagacaacttgtttcatctgtggacttgagagagacaagtttgataataaaacggtttcatttgaggagcacattaagtcagaacacaatatgtggcattatttgtacttcatagtcctggtgaaagttaaagacccaacagaatacactggacctgaaagttatgtggctcaaatgattgtggagaagaatttggattggtttcctcggatgcgagccatgtccctcgttagcaatgaaggcgacagtgagcaaaatgaaattcggagccttcaggagaagttggaatcgaccatgagtctggtcaaacagctgtcgggtcagctggcggagctcaaggagcagatgacagaacaaaggaagaataagcagagactgggcttcctcggatcaaacacaccccatgtgaatcatcacatgccaccacactgataccatggggggaagccgtgactagcctttcatcagtgtcctgcctgatcactgaataaagaactgagatggaggggagtgaacagtgcctattgttgaaaagttaaaaacaaccaagtgccaagatgttgagtgggttagctccgagaacaatttataactgtgttttcatggttgcgaagacctaacctcaaatgcatctgctagaaagcgtacatcacacattcgcaatgcatcaggaagaaaaggcttgcccaaaaggctggagagggcagggagcggcaggatggaaggagacacggggcagggagaactctcttctgctaaatcgataggagtcagttttgtcttaaatgctgactacagccactgacatggttggctggaatttctttcttttaattgtggcatataggtttgtgacacaagaagtcatactttggtggctaagttttactaaggaaaataactgaaaagattaaaagtgagagctgaaaagagaaatgataatgcttccaaactgtagctgtcacagggcaatttctttatttataacatgaagcacaatggatttacagctctaggaacttagtactttggagcttttgcctctcacactgacaacataacaggatgtgattgccttctctgggattcagacaggctctgtcaatgtggagcacaaaaggagattttcatataacttgttaaaaacatgttctaagtcatgtataggctaagattttaagaagatctgggggaataaaaagccaacagtaagccccaggaaagggttttttgagaccatatgtatgctattaaaatatattgagattaatacatgaaaatgcttaaaagtgataggaattattgagaaacttatgatggtggcattgccttttataaacatggagtgaaagccatttgactcaacgtttgctgtgcttaaagaattgcttcaggacccgagcgtttttatgtatgctgttcctgcagttaggaaaaaaaaatccaagaaatgtattgaatactcaagaaaatgccacatttcaattacatatttaaaactgtatctgtaagggcttttcaaaatgtagcaagataaaaatctcttattcaaattgtttttgtattaaatcatgcactcagaatttgtcgagggagagaataacctggtgtgttcaggttattcttagagactacacatttggaatagcagagcaaaatatggataatgaaagtgttgggaaaaaagtgatgtgacagggagtgaagacacttgataccagactctgggagatactctgcaagttgacctggcctctcccccacaggaacaaaacactgcctccagagtctttaaattctcagttatcaacgccaaggtttaaggtctagatagggtttgctatagggtttgctctgacaatttttaaagcttttggattgttctaacatagcttaagctattggttcctaaaaatcccaaatcaagatctatgtagaatataaaggaagcctgaaccaatccttccacatactgttaagatgtagacttggaacaaagctgttgggacccagagcaatgaatttttgaactgaagctactggtactccccagcaccacctcatactaagaattcctcactctgacatgacagtattttttctgaccaggagctgaaagaccctgacattcatgatccaaagatataagaaattttgatatgtctgcatgcagcacagaactttgaacctaggaggcagtcaataaatacatgagaaattcagctgtcattcagttactcttaattctttataaaactttaaatgataccacatatttgtttgtttaaaatggctttcccaaaatcaaagtagactaaagcagccatctttaaaatccaggatcatcaatgctattaacagtatcaggtaaaaagtacactttaaaatattttaatcaggcagagttttatggatagagaatagaagagaaaggtagtaaatattgaacatattccaatataggaacctatctctgttttagtacaaaatatttctgacatctgaactagaggtcaagagaataaattcatttgtatacatctgagcaacctgtctttcagatgataaagtatctagccttttctgacaccataatagttcattttgtagggaataagccattaggtgtatataattgctttctagaaatgacctaatgtccccaaccactttgtagtggcagatcactgtttcacagcatattttctcccaaggaaagtattcaaaagagactgcaactaacaagactcttatttcatcaaaatttaaatatttctgagttgtatttttaatgcctctttcttttctgcctaaatgcttagaaattataaagcaaaaaaaaaaaaaaaacagcaacaaaaaatcgaagcagacaaaaaaggcacttttcagaacatcaaattcctaatgaagaagaggagaagataatggggaaatttgacatttgatataaatttatatttgttatgtgtatgtttgttaatgcaactggaatatttgacttagacccattccaatatgctgtgatacacgacacggtgcaccgcagaggagacagacatcttcagcacaaacacagatgcctgcaggagcttggcaagtcactaaattgcatgaaattgtgaggtgcacaccaaatgcagggatgggggaggccgtgggaagctctgtattctcaaaatttgacagctaattccggtttttagaaaatgcctgaggccagtagaggccctctagtcactcactgctgctgtttctgatataattattgagaaagctatctcacttaatagaagaaaacacgcactatcaaaaccagatagcctaacgtgcatgtgaaaatcgagaaagctgaaaacaaatccaggtacccttctctgaactggagtgtttccacagacttgaataatttatgaaattatcacaccagtatttctcatatcaccaagaagactttctctcctgcagtagaggattgttatatttgcctaaaaaacacgattccaatatatgacaagggcagataatttataagtgaatgttaataaaattggatgtgtataa

SEQ ID NO: 10458 - DNA, 11693 bp, Homo sapiens
gcggccgcacgcgcccgctcccccgccggggtcccccgccgcccctccagcgccgcccagcgtcgcgtccccgcgcgggccggtgcggcggcagcagaggcttcccgggtggcccggcctcccgagggtcgccccgccccggcccagctccgcccccggccgctgctccctgattggccgcccccccacctctccagggctcctctcctcctcctcgcccaatgggcaccggcacctggtccaaaaattcccctgaggggaccgagggggctcggccacttccagctcccgccggcggctgtgacggccgcagcgggtcgcagagcagggagtggacacgagagtggggagcggagagggaaggaggaggaggaggagcaaaggtgttggagagaaaacttcagaaaggaacaggaaacctgccggggagcgcggcggcggctgcggcttctctgggcgcctgggctgcgctcttcgcggggtgtcccgagctggcgcttggccccggtctggcttccccggcgcgcaccacggctgagcgcgacgctcagtggctcgggccgtgcctccgccgtggctcttggccgctgtagtcccgcgatccgatccgcttctgccgcggcggctccctggagagagggcggcgagggcgcagggaagaagagggacgtccactgtggaacatgaagcagcatgaagcagcatgactgagaaaatgtccagcttcctctacataggggacatcgtgtccctgtacgcggagggctcggtcaacggcttcatcagcaccttggggttagtggatgacagatgtgtggtgcacccagaggccggggaccttgccaaccctcccaagaagttcagagactgccttttcaaggtgtgccctatgaacagatattctgcccagaagcaatattggaaagcaaagcaagccaaacaagggaaccacaccgaggcagccttgctgaagaaactacagcacgctgcagaactggaacaaaaacaaaatgaatcggagaataagaaactgttgggagaaattgtaaaatacagtaatgttatacaactactgcatataaaaagcaacaaatatcttactgtcaacaagagattacctgctttactggagaagaatgccatgcgtgtgtccttggatgctgcaggaaatgaagggtcttggttttatattcatccattctggaaactgagaagcgagggtgacaatattgttgtaggagataaagttgttttgatgcctgtgaatgcagggcagccactacatgccagcaacatagagcttcttgataacccagggtgtaaagaggtgaatgctgtcaattgcaacaccagctggaaaatcactttattcatgaaatatagttcctatcgagaggatgtattaaaaggaggggacgttgttagattatttcatgcggaacaagagaagtttttgacttgtgatgaatatgagaaaaaacagcacattttccttcgtacgaccttgcgccaatcagctacttctgctactagttctaaagcactctgggaaatagaggtggttcatcatgacccatgccgtgggggtgcaggacagtggaacagcttgttcagatttaagcatcttgcaactggaaactatttagctgcagagcttaatcctgattatcgagatgcccaaaatgaaggaaaaaatgtgagagatggagtccctccaacttcaaagaaaaaacgccaggcaggggagaagatcatgtatactttggtttcagtcccgcatggcaatgacattgcatccctttttgaactagatgccacaactcttcagagagctgactgcctggttccaaggaactcatatgttcggttaaggcatttatgcaccaacacatgggtaaccagtactagtatccccatagacacagatgaagagaggcctgttatgttaaagattggaacctgccaaaccaaagaagataaagaagcgttcgcaatcgtgtctgttccactgtctgaagttcgagacttagactttgccaatgatgccaataaagtactagcgaccacagttaaaaagctagaaaacggcacaataactcagaatgaaaggaggtttgtaaccaaattattggaagatctcatattctttgttgctgatgtgcctaataatggacaagaagttctggatgtggttatcactaagccaaaccgagagcgtcaaaaattgatgagggaacaaaacatactggcacaggtatttggaattcttaaagcaccctttaaagagaaagcaggagaaggctcgatgctgagacttgaagatctgggggatcaaagatatgcaccctacaagtacatgctgcggctctgttaccgcgtcctgagacactcgcagcaggattaccggaaaaatcaggaatatattgctaagaatttctgtgtcatgcagtcccagattggctatgatattttggcagaagatactatcacagctttgttgcacaacaacagaaaactactagagaaacatatcacagcaaaagaaatagaaacatttgtcagtttactcaggagaaatcgggagccaaggtttttggattatttgtcagatctgtgtgtgtctaataccactgctatccctgtaactcaagaactcatctgtaaatttatgttgagtccaggcaatgcagacattctcattcaaactaaggtggtctcaatgcaagcagacaaccccatggagagctccatcctttcagatgacattgatgatgaagaagtttggctctattggattgacagcaacaaggaacctcatggcaaagctatcaggcaccttgctcaagaggcaaaagaaggcaccaaagctgacttagaagttcttacctattacaggtaccagctaaacctctttgcaaggatgtgcttggatcgccagtatctggccataaaccagatttctacacagctgtctgtagacctgatcctgcggtgtgtgtcggatgagagcctgccgttcgacctccgagcgtccttctgtcgcctcatgctccacatgcacgttgaccgggatccccaggagtccgtggtgcctgttcgctatgccaggctctggacagaaatccccacaaagatcacaattcatgaatatgattctataacagactcttccagaaatgatatgaagaggaaatttgccctgacaatggaatttgttgaagaatatttgaaagaagttgtaaaccagccctttccttttggggataaagaaaaaaataaactgacatttgaggtggtccacttggctcggaatcttatatactttggattttatagtttcagtgagttattaaggctaacaagaacacttctggctattttagacattgtacaggcccccatgtcatcatactttgaaagattaagcaaatttcaagatggaggaaacaatgtgatgagaaccattcatggggtgggagagatgatgacccagatggtactcagtagaggctccatcttccccatgagcgtgccggatgtgccacccagcatccacccgagcaagcaagggagccccaccgagcatgaggatgtgactgtgatggacaccaagctgaagatcattgagattttgcagtttatcctgagtgtcagactggattataggatctcatatatgctgtcaatatataagaaggagtttggagaggacaatgacaatgcggagacatctgccagtggatctccagacactttactaccatcagctattgttcctgatatagatgaaattgcagctcaggcagaaactatgtttgcgggaagaaaagaaaaaaatccagttcaacttgacgatgaaggaggcaggacgtttttacgggtcctcattcatctgatcatgcacgactacccgcctttgctgtctggagccctgcagctgttgtttaagcacttcagccagagggcagaggttttacaggcatttaagcaggtgcaattactggtgtctaatcaagacgtagataactacaagcaaatcaaggcagatctagaccagcttcgactgacagtagaaaagtctgagctatgggtggagaagagcagcaactatgagaatggagaaataggggaaagtcaagtgaaaggtggtgaagagccaattgaggaatcaaacattttaagtccagtgcaggatggaacaaagaaacctcagattgacagcaacaagagcaataactaccggattgtaaaggagattttgatcaggctaagtaaactctgtgtgcagaataaaaagtgtcggaatcaacatcaacgattactgaaaaatatgggggcgcattcggtggtgttggatcttctgcagataccctatgaaaagaatgatgaaaagatgaatgaagtaatgaatctagcccatacatttctgcagaatttctgtcgaggaaatccacagaatcaagttcttcttcataaacatctgaatttgtttttaactccaggtctccttgaagcagaaaccatgcggcacatcttcatgaacaattaccatctgtgcaacgaaattagcgagagagttgtacaacactttgtgcactgcattgagacacatggccgccacgtggagtacctgaggtttttgcaaacaattgtaaaagcagatggtaaatatgtgaagaaatgccaggatatggtaatgacagagttgataaatgggggtgaagacgtgctgatattttacaatgatagagcatcatttccaatccttctccatatgatgtgttcagagagagaccgaggggatgagagtggccccttagcctaccacatcaccctggtggagttgctggcagcatgcacagaggggaaaaatgtctacactgaaatcaagtgtaattcccttctcccgctggacgacatagtgagggtggtgacccatgacgactgcatccctgaggttaaaattgcttatgtgaactttgttaatcactgttatgttgacactgaagtggaaatgaaagaaatctatacaagtaaccacatttggaaattatttgagaacttcttggtggatatggcaagggtttgcaacacaactacagacaggaaacatgcagacatctttttggaaaagtgtgttactgagtcaataatgaatattgtgagcggcttctttaattctcccttttcagacaatagtaccagcctccagacacatcagccagtttttattcagctactgcaatctgccttcagaatttacaattgcacctggccaaacccagcgcagaaagcctcagtggaatcctgtatcagaactttggctgaagtggcaaaaaatcgtggaattgccattccagtggatttggacagccaagttaatactcttttcatgaagagccattcaaatatggtgcagagagcagcaatgggttggagactatcagctcgctctgggccacgctttaaggaagctcttggagggcctgcttgggattacagaaatattattgaaaagttacaggatgtagtggcctccttggagcaccagttcagcccaatgatgcaggctgaattctcagtgttggttgatgtattgtacagtccagaactgctgttccctgagggaagcgatgcaagaataagatgtggcgctttcatgtcgaagttgattaatcatacaaagaaactaatggagaaagaagaaaaactgtgcattaaaattcttcagacattacgagaaatgttagagaagaaagacagctttgtggaagagggtaacacattaagaaagatacttctgaatcgatactttaaaggtgattatagtattggtgtgaatggacacctatcaggagcctactccaaaactgcacaggtgggaggaagcttttctggacaagattcagataagatggggatatcaatgtcagacattcagtgtctgctggataaagaaggtgcatcagaacttgtcatcgatgttatagtgaacaccaaaaatgacagaattttttcagaaggcattttcctcggcattgccttgcttgaaggaggaaatacacaaacacagtattctttctaccagcagttgcatgaacaaaaaaagtcagaaaaattctttaaagttctctatgatcgaatgaaggctgctcagaaagaaataagatcaacagtgacagttaataccatagatttaggtaacaaaaaaagggacgatgacaatgaattgatgacatctggtccacgaatgagagtaagagattcaacactacatttaaaagagggaatgaaagggcaattaacagaagcttcttcagcaacatccaaagcatattgtgtatacagaagagaaatggatccagaaatagacattatgtgcacaggaccagaagcgggaaacactgaggaaaaatccgcagaggaagtaacaatgagtcccgcaattgccatcatgcagccaatactgagatttcttcagttactgtgtgagaatcacaaccgggaattgcagaacttcttgaggaatcaaaacaacaaaacaaattacaacctagtctgtgagacccttcagtttctggactgcatttgtggaagtacaaccggtggcctgggcctgttgggtctctacatcaatgagaagaatgtagcgctggtcaaccagaacctggagagcttgactgagtattgccagggcccttgccatgaaaatcagacctgtatcgctacacatgagtctaatgggattgatatcatcattgctttgattctgaatgacataaaccctcttggtaaataccgaatggacctggtgctccagctaaagaacaatgcatctaaacttttgctggccattatggaaagcagacatgacagtgagaatgcagaaagaattctttttaacatgagacccagagaactggtggatgtgatgaagaatgcctataaccaaggattggaatgtgaccatggggatgatgagggtggagatgatggtgtttctccaaaagatgttggacacaatatctatattctggcccatcagttggcccgccacaataaactgttgcagcagatgctcaaaccaggatcggatccagatgaaggagatgaagccttaaagtattatgccaaccacactgcacagattgagattgtccggcatgataggaccatggaacaaatagtttttcctgtccccaatatatgtgaatacctcactcgagaatccaagtgccgtgtgttcaatacaactgaaagggatgaacaaggaagtaaagtgaatgactttttccagcaaacagaagatctctacaatgaaatgaagtggcagaagaaaatcaggaataaccctgcactgttctggttctcgaggcacatctctctctgggggagcatttccttcaacctggctgtgttcatcaatttagctgttgctctcttctacccatttggggatgatggagatgaaggtacactttctccattgttctcggttcttctttggatagcagttgcgatctgcacatctatgctgtttttcttctccaagcctgtgggtattcggccgtttcttgtatcaataatgctcagatcaatatatacaataggtcttgggcctacattaatacttcttggtgcagctaatctttgtaataaaattgtttttctggtgagttttgttggaaatcgtggcacgttcacccgtgggtaccgagcagtcatcctggatatggcctttctctatcacgtggcgtatgtcctggtttgcatgctgggcctttttgtccatgaattcttctatagcttcctgctttttgatttggtgtacagggaagagactttgctgaatgtcataaaaagtgtcacacgaaatggccgctctattattctaactgcagtcctggctctcatcctcgtctacctgttttccattattgggttcctttttttgaaggatgacttcactatggaagttgataggctgaaaaaccgaactcctgttacaggcagtcatcaagtgcctactatgactttaactaccatgatggaagcatgtgccaaggagaactgttcacccacaattccagcttcaaatacagctgatgaagagtatgaagatggaattgaaaggacgtgtgacactctccttatgtgcattgtcaccgtgctgaaccagggcctcaggaatggcggtggtgtgggggatgtgctaagaaggccatcgaaagatgagcccttgtttgctgcccgagtggtttatgaccttcttttttatttcattgttatcattattgttctgaacttgatttttggtgttatcatcgatacttttgctgatctcagaagcgaaaaacagaaaaaagaagaaattctaaagacaacttgtttcatctgtggacttgagagagacaagtttgataataaaacggtttcatttgaggagcacattaagtcagaacacaatatgtggcattatttgtacttcatagtcctggtgaaagttaaagacccaacagaatacactggacctgaaagttatgtggctcaaatgattgtggagaagaatttggattggtttcctcggatgcgagccatgtccctcgttagcaatgaaggcgacagtgagcaaaatgaaattcggagccttcaggagaagttggaatcgaccatgagtctggtcaaacagctgtcgggtcagctggcggagctcaaggagcagatgacagaacaaaggaagaataagcagagactgggcttcctcggatcaaacacaccccatgtgaatcatcacatgccaccacactgataccatggggggaagccgtgactagcctttcatcagtgtcctgcctgatcactgaataaagaactgagatggaggggagtgaacagtgcctattgttgaaaagttaaaaacaaccaagtgccaagatgttgagtgggttagctccgagaacaatttataactgtgttttcatggttgcgaagacctaacctcaaatgcatctgctagaaagcgtacatcacacattcgcaatgcatcaggaagaaaaggcttgcccaaaaggctggagagggcagggagcggcaggatggaaggagacacggggcagggagaactctcttctgctaaatcgataggagtcagttttgtcttaaatgctgactacagccactgacatggttggctggaatttctttcttttaattgtggcatataggtttgtgacacaagaagtcatactttggtggctaagttttactaaggaaaataactgaaaagattaaaagtgagagctgaaaagagaaatgataatgcttccaaactgtagctgtcacagggcaatttctttatttataacatgaagcacaatggatttacagctctaggaacttagtactttggagcttttgcctctcacactgacaacataacaggatgtgattgccttctctgggattcagacaggctctgtcaatgtggagcacaaaaggagattttcatataacttgttaaaaacatgttctaagtcatgtataggctaagattttaagaagatctgggggaataaaaagccaacagtaagccccaggaaagggttttttgagaccatatgtatgctattaaaatatattgagattaatacatgaaaatgcttaaaagtgataggaattattgagaaacttatgatggtggcattgccttttataaacatggagtgaaagccatttgactcaacgtttgctgtgcttaaagaattgcttcaggacccgagcgtttttatgtatgctgttcctgcagttaggaaaaaaaaatccaagaaatgtattgaatactcaagaaaatgccacatttcaattacatatttaaaactgtatctgtaagggcttttcaaaatgtagcaagataaaaatctcttattcaaattgtttttgtattaaatcatgcactcagaatttgtcgagggagagaataacctggtgtgttcaggttattcttagagactacacatttggaatagcagagcaaaatatggataatgaaagtgttgggaaaaaagtgatgtgacagggagtgaagacacttgataccagactctgggagatactctgcaagttgacctggcctctcccccacaggaacaaaacactgcctccagagtctttaaattctcagttatcaacgccaaggtttaaggtctagatagggtttgctatagggtttgctctgacaatttttaaagcttttggattgttctaacatagcttaagctattggttcctaaaaatcccaaatcaagatctatgtagaatataaaggaagcctgaaccaatccttccacatactgttaagatgtagacttggaacaaagctgttgggacccagagcaatgaatttttgaactgaagctactggtactccccagcaccacctcatactaagaattcctcactctgacatgacagtattttttctgaccaggagctgaaagaccctgacattcatgatccaaagatataagaaattttgatatgtctgcatgcagcacagaactttgaacctaggaggcagtcaataaatacatgagaaattcagctgtcattcagttactcttaattctttataaaactttaaatgataccacatatttgtttgtttaaaatggctttcccaaaatcaaagtagactaaagcagccatctttaaaatccaggatcatcaatgctattaacagtatcaggtaaaaagtacactttaaaatattttaatcaggcagagttttatggatagagaatagaagagaaaggtagtaaatattgaacatattccaatataggaacctatctctgttttagtacaaaatatttctgacatctgaactagaggtcaagagaataaattcatttgtatacatctgagcaacctgtctttcagatgataaagtatctagccttttctgacaccataatagttcattttgtagggaataagccattaggtgtatataattgctttctagaaatgacctaatgtccccaaccactttgtagtggcagatcactgtttcacagcatattttctcccaaggaaagtattcaaaagagactgcaactaacaagactcttatttcatcaaaatttaaatatttctgagttgtatttttaatgcctctttcttttctgcctaaatgcttagaaattataaagcaaaaaaaaaaaaaaaacagcaacaaaaaatcgaagcagacaaaaaaggcacttttcagaacatcaaattcctaatgaagaagaggagaagataatggggaaatttgacatttgatataaatttatatttgttatgtgtatgtttgttaatgcaactggaatatttgacttaggtgagtatcagttaacatccttgtatttatatagtgacatcaaaataaatgcaatcatcttgaactttgatgttaagggagattttgaaaaaatatttagttatttcaaattcatattggttcaaaagtatcagtttctgctgaataatatttttaatttcaaaagggttttgttccctctgtgctccattctgaggctcaagagcttaatgcaagtatgttttctgagttaaaataacacttttagatgagaaaatgcttgtatcatacagggctataatataaataaataaattgtatgtatgcaaaa

SEQ ID NO: 10459 - DNA, 11446 bp, Homo sapiens
gcggccgcacgcgcccgctcccccgccggggtcccccgccgcccctccagcgccgcccagcgtcgcgtccccgcgcgggccggtgcggcggcagcagaggcttcccgggtggcccggcctcccgagggtcgccccgccccggcccagctccgcccccggccgctgctccctgattggccgcccccccacctctccagggctcctctcctcctcctcgcccaatgggcaccggcacctggtccaaaaattcccctgaggggaccgagggggctcggccacttccagctcccgccggcggctgtgacggccgcagcgggtcgcagagcagggagtggacacgagagtggggagcggagagggaaggaggaggaggaggagcaaaggtgttggagagaaaacttcagaaaggaacaggaaacctgccggggagcgcggcggcggctgcggcttctctgggcgcctgggctgcgctcttcgcggggtgtcccgagctggcgcttggccccggtctggcttccccggcgcgcaccacggctgagcgcgacgctcagtggctcgggccgtgcctccgccgtggctcttggccgctgtagtcccgcgatccgatccgcttctgccgcggcggctccctggagagagggcggcgagggcgcagggaagaagagggacgtccactgtggaacatgaagcagcatgaagcagcatgactgagaaaatgtccagcttcctctacataggggacatcgtgtccctgtacgcggagggctcggtcaacggcttcatcagcaccttggggttagtggatgacagatgtgtggtgcacccagaggccggggaccttgccaaccctcccaagaagttcagagactgccttttcaaggtgtgccctatgaacagatattctgcccagaagcaatattggaaagcaaagcaagccaaacaagggaaccacaccgaggcagccttgctgaagaaactacagcacgctgcagaactggaacaaaaacaaaatgaatcggagaataagaaactgttgggagaaattgtaaaatacagtaatgttatacaactactgcatataaaaagcaacaaatatcttactgtcaacaagagattacctgctttactggagaagaatgccatgcgtgtgtccttggatgctgcaggaaatgaagggtcttggttttatattcatccattctggaaactgagaagcgagggtgacaatattgttgtaggagataaagttgttttgatgcctgtgaatgcagggcagccactacatgccagcaacatagagcttcttgataacccagggtgtaaagaggtgaatgctgtcaattgcaacaccagctggaaaatcactttattcatgaaatatagttcctatcgagaggatgtattaaaaggaggggacgttgttagattatttcatgcggaacaagagaagtttttgacttgtgatgaatatgagaaaaaacagcacattttccttcgtacgaccttgcgccaatcagctacttctgctactagttctaaagcactctgggaaatagaggtggttcatcatgacccatgccgtgggggtgcaggacagtggaacagcttgttcagatttaagcatcttgcaactggaaactatttagctgcagagcttaatcctgattatcgagatgcccaaaatgaaggaaaaaatgtgagagatggagtccctccaacttcaaagaaaaaacgccaggcaggggagaagatcatgtatactttggtttcagtcccgcatggcaatgacattgcatccctttttgaactagatgccacaactcttcagagagctgactgcctggttccaaggaactcatatgttcggttaaggcatttatgcaccaacacatgggtaaccagtactagtatccccatagacacagatgaagagaggcctgttatgttaaagattggaacctgccaaaccaaagaagataaagaagcgttcgcaatcgtgtctgttccactgtctgaagttcgagacttagactttgccaatgatgccaataaagtactagcgaccacagttaaaaagctagaaaacggcacaataactcagaatgaaaggaggtttgtaaccaaattattggaagatctcatattctttgttgctgatgtgcctaataatggacaagaagttctggatgtggttatcactaagccaaaccgagagcgtcaaaaattgatgagggaacaaaacatactggcacaggtatttggaattcttaaagcaccctttaaagagaaagcaggagaaggctcgatgctgagacttgaagatctgggggatcaaagatatgcaccctacaagtacatgctgcggctctgttaccgcgtcctgagacactcgcagcaggattaccggaaaaatcaggaatatattgctaagaatttctgtgtcatgcagtcccagattggctatgatattttggcagaagatactatcacagctttgttgcacaacaacagaaaactactagagaaacatatcacagcaaaagaaatagaaacatttgtcagtttactcaggagaaatcgggagccaaggtttttggattatttgtcagatctgtgtgtgtctaataccactgctatccctgtaactcaagaactcatctgtaaatttatgttgagtccaggcaatgcagacattctcattcaaactaaggtggtctcaatgcaagcagacaaccccatggagagctccatcctttcagatgacattgatgatgaagaagtttggctctattggattgacagcaacaaggaacctcatggcaaagctatcaggcaccttgctcaagaggcaaaagaaggcaccaaagctgacttagaagttcttacctattacaggtaccagctaaacctctttgcaaggatgtgcttggatcgccagtatctggccataaaccagatttctacacagctgtctgtagacctgatcctgcggtgtgtgtcggatgagagcctgccgttcgacctccgagcgtccttctgtcgcctcatgctccacatgcacgttgaccgggatccccaggagtccgtggtgcctgttcgctatgccaggctctggacagaaatccccacaaagatcacaattcatgaatatgattctataacagactcttccagaaatgatatgaagaggaaatttgccctgacaatggaatttgttgaagaatatttgaaagaagttgtaaaccagccctttccttttggggataaagaaaaaaataaactgacatttgaggtggtccacttggctcggaatcttatatactttggattttatagtttcagtgagttattaaggctaacaagaacacttctggctattttagacattgtacaggcccccatgtcatcatactttgaaagattaagcaaatttcaagatggaggaaacaatgtgatgagaaccattcatggggtgggagagatgatgacccagatggtactcagtagaggctccatcttccccatgagcgtgccggatgtgccacccagcatccacccgagcaagcaagggagccccaccgagcatgaggatgtgactgtgatggacaccaagctgaagatcattgagattttgcagtttatcctgagtgtcagactggattataggatctcatatatgctgtcaatatataagaaggagtttggagaggacaatgacaatgcggagacatctgccagtggatctccagacactttactaccatcagctattgttcctgatatagatgaaattgcagctcaggcagaaactatgtttgcgggaagaaaagaaaaaaatccagttcaacttgacgatgaaggaggcaggacgtttttacgggtcctcattcatctgatcatgcacgactacccgcctttgctgtctggagccctgcagctgttgtttaagcacttcagccagagggcagaggttttacaggcatttaagcaggtgcaattactggtgtctaatcaagacgtagataactacaagcaaatcaaggcagatctagaccagcttcgactgacagtagaaaagtctgagctatgggtggagaagagcagcaactatgagaatggagaaataggggaaagtcaagtgaaaggtggtgaagagccaattgaggaatcaaacattttaagtccagtgcaggatggaacaaagaaacctcagattgacagcaacaagagcaataactaccggattgtaaaggagattttgatcaggctaagtaaactctgtgtgcagaataaaaagtgtcggaatcaacatcaacgattactgaaaaatatgggggcgcattcggtggtgttggatcttctgcagataccctatgaaaagaatgatgaaaagatgaatgaagtaatgaatctagcccatacatttctgcagaatttctgtcgaggaaatccacagaatcaagttcttcttcataaacatctgaatttgtttttaactccaggtctccttgaagcagaaaccatgcggcacatcttcatgaacaattaccatctgtgcaacgaaattagcgagagagttgtacaacactttgtgcactgcattgagacacatggccgccacgtggagtacctgaggtttttgcaaacaattgtaaaagcagatggtaaatatgtgaagaaatgccaggatatggtaatgacagagttgataaatgggggtgaagacgtgctgatattttacaatgatagagcatcatttccaatccttctccatatgatgtgttcagagagagaccgaggggatgagagtggccccttagcctaccacatcaccctggtggagttgctggcagcatgcacagaggggaaaaatgtctacactgaaatcaagtgtaattcccttctcccgctggacgacatagtgagggtggtgacccatgacgactgcatccctgaggttaaaattgcttatgtgaactttgttaatcactgttatgttgacactgaagtggaaatgaaagaaatctatacaagtaaccacatttggaaattatttgagaacttcttggtggatatggcaagggtttgcaacacaactacagacaggaaacatgcagacatctttttggaaaagtgtgttactgagtcaataatgaatattgtgagcggcttctttaattctcccttttcagacaatagtaccagcctccagacacatcagccagtttttattcagctactgcaatctgccttcagaatttacaattgcacctggccaaacccagcgcagaaagcctcagtggaatcctgtatcagaactttggctgaagtggcaaaaaatcgtggaattgccattccagtggatttggacagccaagttaatactcttttcatgaagagccattcaaatatggtgcagagagcagcaatgggttggagactatcagctcgctctgggccacgctttaaggaagctcttggagggcctgcttgggattacagaaatattattgaaaagttacaggatgtagtggcctccttggagcaccagttcagcccaatgatgcaggctgaattctcagtgttggttgatgtattgtacagtccagaactgctgttccctgagggaagcgatgcaagaataagatgtggcgctttcatgtcgaagttgattaatcatacaaagaaactaatggagaaagaagaaaaactgtgcattaaaattcttcagacattacgagaaatgttagagaagaaagacagctttgtggaagagggtaacacattaagaaagatacttctgaatcgatactttaaaggtgattatagtattggtgtgaatggacacctatcaggagcctactccaaaactgcacaggtgggaggaagcttttctggacaagattcagataagatggggatatcaatgtcagacattcagtgtctgctggataaagaaggtgcatcagaacttgtcatcgatgttatagtgaacaccaaaaatgacagaattttttcagaaggcattttcctcggcattgccttgcttgaaggaggaaatacacaaacacagtattctttctaccagcagttgcatgaacaaaaaaagtcagaaaaattctttaaagttctctatgatcgaatgaaggctgctcagaaagaaataagatcaacagtgacagttaataccatagatttaggtaacaaaaaaagggacgatgacaatgaattgatgacatctggtccacgaatgagagtaagagattcaacactacatttaaaagagggaatgaaagggcaattaacagaagcttcttcagcaacatccaaagcatattgtgtatacagaagagaaatggatccagaaatagacattatgtgcacaggaccagaagcgggaaacactgaggaaaaatccgcagaggaagtaacaatgagtcccgcaattgccatcatgcagccaatactgagatttcttcagttactgtgtgagaatcacaaccgggaattgcagaacttcttgaggaatcaaaacaacaaaacaaattacaacctagtctgtgagacccttcagtttctggactgcatttgtggaagtacaaccggtggcctgggcctgttgggtctctacatcaatgagaagaatgtagcgctggtcaaccagaacctggagagcttgactgagtattgccagggcccttgccatgaaaatcagacctgtatcgctacacatgagtctaatgggattgatatcatcattgctttgattctgaatgacataaaccctcttggtaaataccgaatggacctggtgctccagctaaagaacaatgcatctaaacttttgctggccattatggaaagcagacatgacagtgagaatgcagaaagaattctttttaacatgagacccagagaactggtggatgtgatgaagaatgcctataaccaaggattggaatgtgaccatggggatgatgagggtggagatgatggtgtttctccaaaagatgttggacacaatatctatattctggcccatcagttggcccgccacaataaactgttgcagcagatgctcaaaccaggatcggatccagatgaaggagatgaagccttaaagtattatgccaaccacactgcacagattgagattgtccggcatgataggaccatggaacaaatagtttttcctgtccccaatatatgtgaatacctcactcgagaatccaagtgccgtgtgttcaatacaactgaaagggatgaacaaggaagtaaagtgaatgactttttccagcaaacagaagatctctacaatgaaatgaagtggcagaagaaaatcaggaataaccctgcactgttctggttctcgaggcacatctctctctgggggagcatttccttcaacctggctgtgttcatcaatttagctgttgctctcttctacccatttggggatgatggagatgaaggtacactttctccattgttctcggttcttctttggatagcagttgcgatctgcacatctatgctgtttttcttctccaagcctgtgggtattcggccgtttcttgtatcaataatgctcagatcaatatatacaataggtcttgggcctacattaatacttcttggtgcagctaatctttgtaataaaattgtttttctggtgagttttgttggaaatcgtggcacgttcacccgtgggtaccgagcagtcatcctggatatggcctttctctatcacgtggcgtatgtcctggtttgcatgctgggcctttttgtccatgaattcttctatagcttcctgctttttgatttggtgtacagggaagagactttgctgaatgtcataaaaagtgtcacacgaaatggccgctctattattctaactgcagtcctggctctcatcctcgtctacctgttttccattattgggttcctttttttgaaggatgacttcactatggaagttgataggctgaaaaaccgaactcctgttacaggcagtcatcaagtgcctactatgactttaactaccatgatggaagcatgtgccaaggagaactgttcacccacaattccagcttcaaatacagctgatgaagagtatgaagatggaattgaaaggacgtgtgacactctccttatgtgcattgtcaccgtgctgaaccagggcctcaggaatggcggtggtgtgggggatgtgctaagaaggccatcgaaagatgagcccttgtttgctgcccgagtggtttatgaccttcttttttatttcattgttatcattattgttctgaacttgatttttggtgttatcatcgatacttttgctgatctcagaagcgaaaaacagaaaaaagaagaaattctaaagacaacttgtttcatctgtggacttgagagagacaagtttgataataaaacggtttcatttgaggagcacattaagtcagaacacaatatgtggcattatttgtacttcatagtcctggtgaaagttaaagacccaacagaatacactggacctgaaagttatgtggctcaaatgattgtggagaagaatttggattggtttcctcggatgcgagccatgtccctcgttagcaatgaaggcgacagtgagcaaaatgaaattcggagccttcaggagaagttggaatcgaccatgagtctggtcaaacagctgtcgggtcagctggcggagctcaaggagcagatgacagaacaaaggaagaataagcagagactgggcttcctcggatcaaacacaccccatgtgaatcatcacatgccaccacactgataccatggggggaagccgtgactagcctttcatcagtgtcctgcctgatcactgaataaagaactgagatggaggggagtgaacagtgcctattgttgaaaagttaaaaacaaccaagtgccaagatgttgagtgggttagctccgagaacaatttataactgtgttttcatggttgcgaagacctaacctcaaatgcatctgctagaaagcgtacatcacacattcgcaatgcatcaggaagaaaaggcttgcccaaaaggctggagagggcagggagcggcaggatggaaggagacacggggcagggagaactctcttctgctaaatcgataggagtcagttttgtcttaaatgctgactacagccactgacatggttggctggaatttctttcttttaattgtggcatataggtttgtgacacaagaagtcatactttggtggctaagttttactaaggaaaataactgaaaagattaaaagtgagagctgaaaagagaaatgataatgcttccaaactgtagctgtcacagggcaatttctttatttataacatgaagcacaatggatttacagctctaggaacttagtactttggagcttttgcctctcacactgacaacataacaggatgtgattgccttctctgggattcagacaggctctgtcaatgtggagcacaaaaggagattttcatataacttgttaaaaacatgttctaagtcatgtataggctaagattttaagaagatctgggggaataaaaagccaacagtaagccccaggaaagggttttttgagaccatatgtatgctattaaaatatattgagattaatacatgaaaatgcttaaaagtgataggaattattgagaaacttatgatggtggcattgccttttataaacatggagtgaaagccatttgactcaacgtttgctgtgcttaaagaattgcttcaggacccgagcgtttttatgtatgctgttcctgcagttaggaaaaaaaaatccaagaaatgtattgaatactcaagaaaatgccacatttcaattacatatttaaaactgtatctgtaagggcttttcaaaatgtagcaagataaaaatctcttattcaaattgtttttgtattaaatcatgcactcagaatttgtcgagggagagaataacctggtgtgttcaggttattcttagagactacacatttggaatagcagagcaaaatatggataatgaaagtgttgggaaaaaagtgatgtgacagggagtgaagacacttgataccagactctgggagatactctgcaagttgacctggcctctcccccacaggaacaaaacactgcctccagagtctttaaattctcagttatcaacgccaaggtttaaggtctagatagggtttgctatagggtttgctctgacaatttttaaagcttttggattgttctaacatagcttaagctattggttcctaaaaatcccaaatcaagatctatgtagaatataaaggaagcctgaaccaatccttccacatactgttaagatgtagacttggaacaaagctgttgggacccagagcaatgaatttttgaactgaagctactggtactccccagcaccacctcatactaagaattcctcactctgacatgacagtattttttctgaccaggagctgaaagaccctgacattcatgatccaaagatataagaaattttgatatgtctgcatgcagcacagaactttgaacctaggaggcagtcaataaatacatgagaaattcagctgtcattcagttactcttaattctttataaaactttaaatgataccacatatttgtttgtttaaaatggctttcccaaaatcaaagtagactaaagcagccatctttaaaatccaggatcatcaatgctattaacagtatcaggtaaaaagtacactttaaaatattttaatcaggcagagttttatggatagagaatagaagagaaaggtagtaaatattgaacatattccaatataggaacctatctctgttttagtacaaaatatttctgacatctgaactagaggtcaagagaataaattcatttgtatacatctgagcaacctgtctttcagatgataaagtatctagccttttctgacaccataatagttcattttgtagggaataagccattaggtgtatataattgctttctagaaatgacctaatgtccccaaccactttgtagtggcagatcactgtttcacagcatattttctcccaaggaaagtattcaaaagagactgcaactaacaagactcttatttcatcaaaatttaaatatttctgagttgtatttttaatgcctctttcttttctgcctaaatgcttagaaattataaagcaaaaaaaaaaaaaaaacagcaacaaaaaatcgaagcagacaaaaaaggcacttttcagaacatcaaattcctaatgaagaagaggagaagataatggggaaatttgacatttgatataaatttatatttgttatgtgtatgtttgttaatgcaactggaatatttgacttaggtgagtatcagttaacatccttgtatttatatagtgacatcaaaataaatgcaatcatcttga

SEQ ID NO: 10460 - DNA, 12797 bp, Homo sapiens
gcggccgcacgcgcccgctcccccgccggggtcccccgccgcccctccagcgccgcccagcgtcgcgtccccgcgcgggccggtgcggcggcagcagaggcttcccgggtggcccggcctcccgagggtcgccccgccccggcccagctccgcccccggccgctgctccctgattggccgcccccccacctctccagggctcctctcctcctcctcgcccaatgggcaccggcacctggtccaaaaattcccctgaggggaccgagggggctcggccacttccagctcccgccggcggctgtgacggccgcagcgggtcgcagagcagggagtggacacgagagtggggagcggagagggaaggaggaggaggaggagcaaaggtgttggagagaaaacttcagaaaggaacaggaaacctgccggggagcgcggcggcggctgcggcttctctgggcgcctgggctgcgctcttcgcggggtgtcccgagctggcgcttggccccggtctggcttccccggcgcgcaccacggctgagcgcgacgctcagtggctcgggccgtgcctccgccgtggctcttggccgctgtagtcccgcgatccgatccgcttctgccgcggcggctccctggagagagggcggcgagggcgcagggaagaagagggacgtccactgtggaacatgaagcagcatgaagcagcatgactgagaaaatgtccagcttcctctacataggggacatcgtgtccctgtacgcggagggctcggtcaacggcttcatcagcaccttggggttagtggatgacagatgtgtggtgcacccagaggccggggaccttgccaaccctcccaagaagttcagagactgccttttcaaggtgtgccctatgaacagatattctgcccagaagcaatattggaaagcaaagcaagccaaacaagggaaccacaccgaggcagccttgctgaagaaactacagcacgctgcagaactggaacaaaaacaaaatgaatcggagaataagaaactgttgggagaaattgtaaaatacagtaatgttatacaactactgcatataaaaagcaacaaatatcttactgtcaacaagagattacctgctttactggagaagaatgccatgcgtgtgtccttggatgctgcaggaaatgaagggtcttggttttatattcatccattctggaaactgagaagcgagggtgacaatattgttgtaggagataaagttgttttgatgcctgtgaatgcagggcagccactacatgccagcaacatagagcttcttgataacccagggtgtaaagaggtgaatgctgtcaattgcaacaccagctggaaaatcactttattcatgaaatatagttcctatcgagaggatgtattaaaaggaggggacgttgttagattatttcatgcggaacaagagaagtttttgacttgtgatgaatatgagaaaaaacagcacattttccttcgtacgaccttgcgccaatcagctacttctgctactagttctaaagcactctgggaaatagaggtggttcatcatgacccatgccgtgggggtgcaggacagtggaacagcttgttcagatttaagcatcttgcaactggaaactatttagctgcagagcttaatcctgattatcgagatgcccaaaatgaaggaaaaaatgtgagagatggagtccctccaacttcaaagaaaaaacgccaggcaggggagaagatcatgtatactttggtttcagtcccgcatggcaatgacattgcatccctttttgaactagatgccacaactcttcagagagctgactgcctggttccaaggaactcatatgttcggttaaggcatttatgcaccaacacatgggtaaccagtactagtatccccatagacacagatgaagagaggcctgttatgttaaagattggaacctgccaaaccaaagaagataaagaagcgttcgcaatcgtgtctgttccactgtctgaagttcgagacttagactttgccaatgatgccaataaagtactagcgaccacagttaaaaagctagaaaacggcacaataactcagaatgaaaggaggtttgtaaccaaattattggaagatctcatattctttgttgctgatgtgcctaataatggacaagaagttctggatgtggttatcactaagccaaaccgagagcgtcaaaaattgatgagggaacaaaacatactggcacaggtatttggaattcttaaagcaccctttaaagagaaagcaggagaaggctcgatgctgagacttgaagatctgggggatcaaagatatgcaccctacaagtacatgctgcggctctgttaccgcgtcctgagacactcgcagcaggattaccggaaaaatcaggaatatattgctaagaatttctgtgtcatgcagtcccagattggctatgatattttggcagaagatactatcacagctttgttgcacaacaacagaaaactactagagaaacatatcacagcaaaagaaatagaaacatttgtcagtttactcaggagaaatcgggagccaaggtttttggattatttgtcagatctgtgtgtgtctaataccactgctatccctgtaactcaagaactcatctgtaaatttatgttgagtccaggcaatgcagacattctcattcaaactaaggtggtctcaatgcaagcagacaaccccatggagagctccatcctttcagatgacattgatgatgaagaagtttggctctattggattgacagcaacaaggaacctcatggcaaagctatcaggcaccttgctcaagaggcaaaagaaggcaccaaagctgacttagaagttcttacctattacaggtaccagctaaacctctttgcaaggatgtgcttggatcgccagtatctggccataaaccagatttctacacagctgtctgtagacctgatcctgcggtgtgtgtcggatgagagcctgccgttcgacctccgagcgtccttctgtcgcctcatgctccacatgcacgttgaccgggatccccaggagtccgtggtgcctgttcgctatgccaggctctggacagaaatccccacaaagatcacaattcatgaatatgattctataacagactcttccagaaatgatatgaagaggaaatttgccctgacaatggaatttgttgaagaatatttgaaagaagttgtaaaccagccctttccttttggggataaagaaaaaaataaactgacatttgaggtggtccacttggctcggaatcttatatactttggattttatagtttcagtgagttattaaggctaacaagaacacttctggctattttagacattgtacaggcccccatgtcatcatactttgaaagattaagcaaatttcaagatggaggaaacaatgtgatgagaaccattcatggggtgggagagatgatgacccagatggtactcagtagaggctccatcttccccatgagcgtgccggatgtgccacccagcatccacccgagcaagcaagggagccccaccgagcatgaggatgtgactgtgatggacaccaagctgaagatcattgagattttgcagtttatcctgagtgtcagactggattataggatctcatatatgctgtcaatatataagaaggagtttggagaggacaatgacaatgcggagacatctgccagtggatctccagacactttactaccatcagctattgttcctgatatagatgaaattgcagctcaggcagaaactatgtttgcgggaagaaaagaaaaaaatccagttcaacttgacgatgaaggaggcaggacgtttttacgggtcctcattcatctgatcatgcacgactacccgcctttgctgtctggagccctgcagctgttgtttaagcacttcagccagagggcagaggttttacaggcatttaagcaggtgcaattactggtgtctaatcaagacgtagataactacaagcaaatcaaggcagatctagaccagcttcgactgacagtagaaaagtctgagctatgggtggagaagagcagcaactatgagaatggagaaataggggaaagtcaagtgaaaggtggtgaagagccaattgaggaatcaaacattttaagtccagtgcaggatggaacaaagaaacctcagattgacagcaacaagagcaataactaccggattgtaaaggagattttgatcaggctaagtaaactctgtgtgcagaataaaaagtgtcggaatcaacatcaacgattactgaaaaatatgggggcgcattcggtggtgttggatcttctgcagataccctatgaaaagaatgatgaaaagatgaatgaagtaatgaatctagcccatacatttctgcagaatttctgtcgaggaaatccacagaatcaagttcttcttcataaacatctgaatttgtttttaactccaggtctccttgaagcagaaaccatgcggcacatcttcatgaacaattaccatctgtgcaacgaaattagcgagagagttgtacaacactttgtgcactgcattgagacacatggccgccacgtggagtacctgaggtttttgcaaacaattgtaaaagcagatggtaaatatgtgaagaaatgccaggatatggtaatgacagagttgataaatgggggtgaagacgtgctgatattttacaatgatagagcatcatttccaatccttctccatatgatgtgttcagagagagaccgaggggatgagagtggccccttagcctaccacatcaccctggtggagttgctggcagcatgcacagaggggaaaaatgtctacactgaaatcaagtgtaattcccttctcccgctggacgacatagtgagggtggtgacccatgacgactgcatccctgaggttaaaattgcttatgtgaactttgttaatcactgttatgttgacactgaagtggaaatgaaagaaatctatacaagtaaccacatttggaaattatttgagaacttcttggtggatatggcaagggtttgcaacacaactacagacaggaaacatgcagacatctttttggaaaagtgtgttactgagtcaataatgaatattgtgagcggcttctttaattctcccttttcagacaatagtaccagcctccagacacatcagccagtttttattcagctactgcaatctgccttcagaatttacaattgcacctggccaaacccagcgcagaaagcctcagtggaatcctgtatcagaactttggctgaagtggcaaaaaatcgtggaattgccattccagtggatttggacagccaagttaatactcttttcatgaagagccattcaaatatggtgcagagagcagcaatgggttggagactatcagctcgctctgggccacgctttaaggaagctcttggagggcctgcttgggattacagaaatattattgaaaagttacaggatgtagtggcctccttggagcaccagttcagcccaatgatgcaggctgaattctcagtgttggttgatgtattgtacagtccagaactgctgttccctgagggaagcgatgcaagaataagatgtggcgctttcatgtcgaagttgattaatcatacaaagaaactaatggagaaagaagaaaaactgtgcattaaaattcttcagacattacgagaaatgttagagaagaaagacagctttgtggaagagggtaacacattaagaaagatacttctgaatcgatactttaaaggtgattatagtattggtgtgaatggacacctatcaggagcctactccaaaactgcacaggtgggaggaagcttttctggacaagattcagataagatggggatatcaatgtcagacattcagtgtctgctggataaagaaggtgcatcagaacttgtcatcgatgttatagtgaacaccaaaaatgacagaattttttcagaaggcattttcctcggcattgccttgcttgaaggaggaaatacacaaacacagtattctttctaccagcagttgcatgaacaaaaaaagtcagaaaaattctttaaagttctctatgatcgaatgaaggctgctcagaaagaaataagatcaacagtgacagttaataccatagatttaggtaacaaaaaaagggacgatgacaatgaattgatgacatctggtccacgaatgagagtaagagattcaacactacatttaaaagagggaatgaaagggcaattaacagaagcttcttcagcaacatccaaagcatattgtgtatacagaagagaaatggatccagaaatagacattatgtgcacaggaccagaagcgggaaacactgaggaaaaatccgcagaggaagtaacaatgagtcccgcaattgccatcatgcagccaatactgagatttcttcagttactgtgtgagaatcacaaccgggaattgcagaacttcttgaggaatcaaaacaacaaaacaaattacaacctagtctgtgagacccttcagtttctggactgcatttgtggaagtacaaccggtggcctgggcctgttgggtctctacatcaatgagaagaatgtagcgctggtcaaccagaacctggagagcttgactgagtattgccagggcccttgccatgaaaatcagacctgtatcgctacacatgagtctaatgggattgatatcatcattgctttgattctgaatgacataaaccctcttggtaaataccgaatggacctggtgctccagctaaagaacaatgcatctaaacttttgctggccattatggaaagcagacatgacagtgagaatgcagaaagaattctttttaacatgagacccagagaactggtggatgtgatgaagaatgcctataaccaaggattggaatgtgaccatggggatgatgagggtggagatgatggtgtttctccaaaagatgttggacacaatatctatattctggcccatcagttggcccgccacaataaactgttgcagcagatgctcaaaccaggatcggatccagatgaaggagatgaagccttaaagtattatgccaaccacactgcacagattgagattgtccggcatgataggaccatggaacaaatagtttttcctgtccccaatatatgtgaatacctcactcgagaatccaagtgccgtgtgttcaatacaactgaaagggatgaacaaggaagtaaagtgaatgactttttccagcaaacagaagatctctacaatgaaatgaagtggcagaagaaaatcaggaataaccctgcactgttctggttctcgaggcacatctctctctgggggagcatttccttcaacctggctgtgttcatcaatttagctgttgctctcttctacccatttggggatgatggagatgaaggtacactttctccattgttctcggttcttctttggatagcagttgcgatctgcacatctatgctgtttttcttctccaagcctgtgggtattcggccgtttcttgtatcaataatgctcagatcaatatatacaataggtcttgggcctacattaatacttcttggtgcagctaatctttgtaataaaattgtttttctggtgagttttgttggaaatcgtggcacgttcacccgtgggtaccgagcagtcatcctggatatggcctttctctatcacgtggcgtatgtcctggtttgcatgctgggcctttttgtccatgaattcttctatagcttcctgctttttgatttggtgtacagggaagagactttgctgaatgtcataaaaagtgtcacacgaaatggccgctctattattctaactgcagtcctggctctcatcctcgtctacctgttttccattattgggttcctttttttgaaggatgacttcactatggaagttgataggctgaaaaaccgaactcctgttacaggcagtcatcaagtgcctactatgactttaactaccatgatggaagcatgtgccaaggagaactgttcacccacaattccagcttcaaatacagctgatgaagagtatgaagatggaattgaaaggacgtgtgacactctccttatgtgcattgtcaccgtgctgaaccagggcctcaggaatggcggtggtgtgggggatgtgctaagaaggccatcgaaagatgagcccttgtttgctgcccgagtggtttatgaccttcttttttatttcattgttatcattattgttctgaacttgatttttggtgttatcatcgatacttttgctgatctcagaagcgaaaaacagaaaaaagaagaaattctaaagacaacttgtttcatctgtggacttgagagagacaagtttgataataaaacggtttcatttgaggagcacattaagtcagaacacaatatgtggcattatttgtacttcatagtcctggtgaaagttaaagacccaacagaatacactggacctgaaagttatgtggctcaaatgattgtggagaagaatttggattggtttcctcggatgcgagccatgtccctcgttagcaatgaaggcgacagtgagcaaaatgaaattcggagccttcaggagaagttggaatcgaccatgagtctggtcaaacagctgtcgggtcagctggcggagctcaaggagcagatgacagaacaaaggaagaataagcagagactgggcttcctcggatcaaacacaccccatgtgaatcatcacatgccaccacactgataccatggggggaagccgtgactagcctttcatcagtgtcctgcctgatcactgaataaagaactgagatggaggggagtgaacagtgcctattgttgaaaagttaaaaacaaccaagtgccaagatgttgagtgggttagctccgagaacaatttataactgtgttttcatggttgcgaagacctaacctcaaatgcatctgctagaaagcgtacatcacacattcgcaatgcatcaggaagaaaaggcttgcccaaaaggctggagagggcagggagcggcaggatggaaggagacacggggcagggagaactctcttctgctaaatcgataggagtcagttttgtcttaaatgctgactacagccactgacatggttggctggaatttctttcttttaattgtggcatataggtttgtgacacaagaagtcatactttggtggctaagttttactaaggaaaataactgaaaagattaaaagtgagagctgaaaagagaaatgataatgcttccaaactgtagctgtcacagggcaatttctttatttataacatgaagcacaatggatttacagctctaggaacttagtactttggagcttttgcctctcacactgacaacataacaggatgtgattgccttctctgggattcagacaggctctgtcaatgtggagcacaaaaggagattttcatataacttgttaaaaacatgttctaagtcatgtataggctaagattttaagaagatctgggggaataaaaagccaacagtaagccccaggaaagggttttttgagaccatatgtatgctattaaaatatattgagattaatacatgaaaatgcttaaaagtgataggaattattgagaaacttatgatggtggcattgccttttataaacatggagtgaaagccatttgactcaacgtttgctgtgcttaaagaattgcttcaggacccgagcgtttttatgtatgctgttcctgcagttaggaaaaaaaaatccaagaaatgtattgaatactcaagaaaatgccacatttcaattacatatttaaaactgtatctgtaagggcttttcaaaatgtagcaagataaaaatctcttattcaaattgtttttgtattaaatcatgcactcagaatttgtcgagggagagaataacctggtgtgttcaggttattcttagagactacacatttggaatagcagagcaaaatatggataatgaaagtgttgggaaaaaagtgatgtgacagggagtgaagacacttgataccagactctgggagatactctgcaagttgacctggcctctcccccacaggaacaaaacactgcctccagagtctttaaattctcagttatcaacgccaaggtttaaggtctagatagggtttgctatagggtttgctctgacaatttttaaagcttttggattgttctaacatagcttaagctattggttcctaaaaatcccaaatcaagatctatgtagaatataaaggaagcctgaaccaatccttccacatactgttaagatgtagacttggaacaaagctgttgggacccagagcaatgaatttttgaactgaagctactggtactccccagcaccacctcatactaagaattcctcactctgacatgacagtattttttctgaccaggagctgaaagaccctgacattcatgatccaaagatataagaaattttgatatgtctgcatgcagcacagaactttgaacctaggaggcagtcaataaatacatgagaaattcagctgtcattcagttactcttaattctttataaaactttaaatgataccacatatttgtttgtttaaaatggctttcccaaaatcaaagtagactaaagcagccatctttaaaatccaggatcatcaatgctattaacagtatcaggtaaaaagtacactttaaaatattttaatcaggcagagttttatggatagagaatagaagagaaaggtagtaaatattgaacatattccaatataggaacctatctctgttttagtacaacaacctgtctttcagatgataaagtatctagccttttctgacaccataatagttcattttgtagggaataagccattaggtgtatataattgctttctagaaatgacctaatgtccccaaccactttgtagtggcagatcactgtttcacagcatattttctcccaaggaaagtattcaaaagagactgcaactaacaagactcttatttcatcaaaatttaaatatttctgagttgtatttttaatgcctctttcttttctgcctaaatgcttagaaattataaagcaaaaaaaaaaaaaaaacagcaacaaaaaatcgaagcagacaaaaaaggcacttttcagaacatcaaattcctaatgaagaagaggagaagataatggggaaatttgacatttgatataaatttatatttgttatgtgtatgtttgttaatgcaactggaatatttgacttaggtgagtatcagttaacatccttgtatttatatagtgacatcaaaataaatgcaatcatcttgaactttgatgttaagggagattttgaaaaaatatttagttatttcaaattcatattggttcaaaagtatcagtttctgctgaataatatttttaatttcaaaagggttttgttccctctgtgctccattctgaggctcaagagcttaatgcaagtatgttttctgagttaaaataacacttttagatgagaaaatgcttgtatcatacagggctataatataaataaataaattgtatgtatgcaaaatttatcatattttctaccccttaaaaaattaagttagaaataagcttattttcttgcacatcaatatttttctgttggtaaagaggacacaatttctagtagattgttaataacatcaggaagatatttctttcgtcagaactaattgtgtgcttattcccatattctcagctcataactccctgttttggctgctctctttattttacaattgtttcattgcaaacagcaaggcagtatagcccacactcagccactagcccccagtccccaggactgagaatgagtggggaggctggggagttggtgagagaaggtggagatagggatttctgcttcccagtactctatcattagagaaaaggaggggtaaatattagctaagaagaagaaaaaagcttattcttcagggacccagtagattggacgtaagcaagtaaatattgcacaggcatcatgatgtaatagttgatggaccccagagatacccctcacccatgcagagaacaaagctgtgtggaagagcaactaccataagatggtgtgttccttccagcggctgttaaagccatcctgaataacaaatcagctattcctacctacagacccattccaatatgctgtgatacacgacacggtgcaccgcagaggagacagacatcttcagcacaaacacagatgcctgcaggagcttggcaagtcactaaattgcatgaaattgtgaggtgcacaccaaatgcagggatgggggaggccgtgggaagctctgtattctcaaaatttgacagctaattccggtttttagaaaatgcctgaggccagtagaggccctctagtcactcactgctgctgtttctgatataattattgagaaagctatctcacttaatagaagaaaacacgcactatcaaaaccagatagcctaacgtgcatgtgaaaatcgagaaagctgaaaacaaatccaggtacccttctctgaactggagtgtttccacagacttgaataatttatgaaattatcacaccagtatttctcatatcaccaagaagactttctctcctgcagtagaggattgttatatttgcctaaaaaacacgattccaatatatgacaagggcagataatttataagtgaatgttaataaaattggatgtgtataa

SEQ ID NO: 10461 - DNA, 10973 bp, Homo sapiens
gcggccgcacgcgcccgctcccccgccggggtcccccgccgcccctccagcgccgcccagcgtcgcgtccccgcgcgggccggtgcggcggcagcagaggcttcccgggtggcccggcctcccgagggtcgccccgccccggcccagctccgcccccggccgctgctccctgattggccgcccccccacctctccagggctcctctcctcctcctcgcccaatgggcaccggcacctggtccaaaaattcccctgaggggaccgagggggctcggccacttccagctcccgccggcggctgtgacggccgcagcgggtcgcagagcagggagtggacacgagagtggggagcggagagggaaggaggaggaggaggagcaaaggtgttggagagaaaacttcagaaaggaacaggaaacctgccggggagcgcggcggcggctgcggcttctctgggcgcctgggctgcgctcttcgcggggtgtcccgagctggcgcttggccccggtctggcttccccggcgcgcaccacggctgagcgcgacgctcagtggctcgggccgtgcctccgccgtggctcttggccgctgtagtcccgcgatccgatccgcttctgccgcggcggctccctggagagagggcggcgagggcgcagggaagaagagggacgtccactgtggaacatgaagcagcatgaagcagcatgactgagaaaatgtccagcttcctctacataggggacatcgtgtccctgtacgcggagggctcggtcaacggcttcatcagcaccttggggttagtggatgacagatgtgtggtgcacccagaggccggggaccttgccaaccctcccaagaagttcagagactgccttttcaaggtgtgccctatgaacagatattctgcccagaagcaatattggaaagcaaagcaagccaaacaagggaaccacaccgaggcagccttgctgaagaaactacagcacgctgcagaactggaacaaaaacaaaatgaatcggagaataagaaactgttgggagaaattgtaaaatacagtaatgttatacaactactgcatataaaaagcaacaaatatcttactgtcaacaagagattacctgctttactggagaagaatgccatgcgtgtgtccttggatgctgcaggaaatgaagggtcttggttttatattcatccattctggaaactgagaagcgagggtgacaatattgttgtaggagataaagttgttttgatgcctgtgaatgcagggcagccactacatgccagcaacatagagcttcttgataacccagggtgtaaagaggtgaatgctgtcaattgcaacaccagctggaaaatcactttattcatgaaatatagttcctatcgagaggatgtattaaaaggaggggacgttgttagattatttcatgcggaacaagagaagtttttgacttgtgatgaatatgagaaaaaacagcacattttccttcgtacgaccttgcgccaatcagctacttctgctactagttctaaagcactctgggaaatagaggtggttcatcatgacccatgccgtgggggtgcaggacagtggaacagcttgttcagatttaagcatcttgcaactggaaactatttagctgcagagcttaatcctgattatcgagatgcccaaaatgaaggaaaaaatgtgagagatggagtccctccaacttcaaagaaaaaacgccaggcaggggagaagatcatgtatactttggtttcagtcccgcatggcaatgacattgcatccctttttgaactagatgccacaactcttcagagagctgactgcctggttccaaggaactcatatgttcggttaaggcatttatgcaccaacacatgggtaaccagtactagtatccccatagacacagatgaagagaggcctgttatgttaaagattggaacctgccaaaccaaagaagataaagaagcgttcgcaatcgtgtctgttccactgtctgaagttcgagacttagactttgccaatgatgccaataaagtactagcgaccacagttaaaaagctagaaaacggcacaataactcagaatgaaaggaggtttgtaaccaaattattggaagatctcatattctttgttgctgatgtgcctaataatggacaagaagttctggatgtggttatcactaagccaaaccgagagcgtcaaaaattgatgagggaacaaaacatactggcacaggtatttggaattcttaaagcaccctttaaagagaaagcaggagaaggctcgatgctgagacttgaagatctgggggatcaaagatatgcaccctacaagtacatgctgcggctctgttaccgcgtcctgagacactcgcagcaggattaccggaaaaatcaggaatatattgctaagaatttctgtgtcatgcagtcccagattggctatgatattttggcagaagatactatcacagctttgttgcacaacaacagaaaactactagagaaacatatcacagcaaaagaaatagaaacatttgtcagtttactcaggagaaatcgggagccaaggtttttggattatttgtcagatctgtgtgtgtctaataccactgctatccctgtaactcaagaactcatctgtaaatttatgttgagtccaggcaatgcagacattctcattcaaactaaggtggtctcaatgcaagcagacaaccccatggagagctccatcctttcagatgacattgatgatgaagaagtttggctctattggattgacagcaacaaggaacctcatggcaaagctatcaggcaccttgctcaagaggcaaaagaaggcaccaaagctgacttagaagttcttacctattacaggtaccagctaaacctctttgcaaggatgtgcttggatcgccagtatctggccataaaccagatttctacacagctgtctgtagacctgatcctgcggtgtgtgtcggatgagagcctgccgttcgacctccgagcgtccttctgtcgcctcatgctccacatgcacgttgaccgggatccccaggagtccgtggtgcctgttcgctatgccaggctctggacagaaatccccacaaagatcacaattcatgaatatgattctataacagactcttccagaaatgatatgaagaggaaatttgccctgacaatggaatttgttgaagaatatttgaaagaagttgtaaaccagccctttccttttggggataaagaaaaaaataaactgacatttgaggtggtccacttggctcggaatcttatatactttggattttatagtttcagtgagttattaaggctaacaagaacacttctggctattttagacattgtacaggcccccatgtcatcatactttgaaagattaagcaaatttcaagatggaggaaacaatgtgatgagaaccattcatggggtgggagagatgatgacccagatggtactcagtagaggctccatcttccccatgagcgtgccggatgtgccacccagcatccacccgagcaagcaagggagccccaccgagcatgaggatgtgactgtgatggacaccaagctgaagatcattgagattttgcagtttatcctgagtgtcagactggattataggatctcatatatgctgtcaatatataagaaggagtttggagaggacaatgacaatgcggagacatctgccagtggatctccagacactttactaccatcagctattgttcctgatatagatgaaattgcagctcaggcagaaactatgtttgcgggaagaaaagaaaaaaatccagttcaacttgacgatgaaggaggcaggacgtttttacgggtcctcattcatctgatcatgcacgactacccgcctttgctgtctggagccctgcagctgttgtttaagcacttcagccagagggcagaggttttacaggcatttaagcaggtgcaattactggtgtctaatcaagacgtagataactacaagcaaatcaaggcagatctagaccagcttcgactgacagtagaaaagtctgagctatgggtggagaagagcagcaactatgagaatggagaaataggggaaagtcaagtgaaaggtggtgaagagccaattgaggaatcaaacattttaagtccagtgcaggatggaacaaagaaacctcagattgacagcaacaagagcaataactaccggattgtaaaggagattttgatcaggctaagtaaactctgtgtgcagaataaaaagtgtcggaatcaacatcaacgattactgaaaaatatgggggcgcattcggtggtgttggatcttctgcagataccctatgaaaagaatgatgaaaagatgaatgaagtaatgaatctagcccatacatttctgcagaatttctgtcgaggaaatccacagaatcaagttcttcttcataaacatctgaatttgtttttaactccaggtctccttgaagcagaaaccatgcggcacatcttcatgaacaattaccatctgtgcaacgaaattagcgagagagttgtacaacactttgtgcactgcattgagacacatggccgccacgtggagtacctgaggtttttgcaaacaattgtaaaagcagatggtaaatatgtgaagaaatgccaggatatggtaatgacagagttgataaatgggggtgaagacgtgctgatattttacaatgatagagcatcatttccaatccttctccatatgatgtgttcagagagagaccgaggggatgagagtggccccttagcctaccacatcaccctggtggagttgctggcagcatgcacagaggggaaaaatgtctacactgaaatcaagtgtaattcccttctcccgctggacgacatagtgagggtggtgacccatgacgactgcatccctgaggttaaaattgcttatgtgaactttgttaatcactgttatgttgacactgaagtggaaatgaaagaaatctatacaagtaaccacatttggaaattatttgagaacttcttggtggatatggcaagggtttgcaacacaactacagacaggaaacatgcagacatctttttggaaaagtgtgttactgagtcaataatgaatattgtgagcggcttctttaattctcccttttcagacaatagtaccagcctccagacacatcagccagtttttattcagctactgcaatctgccttcagaatttacaattgcacctggccaaacccagcgcagaaagcctcagtggaatcctgtatcagaactttggctgaagtggcaaaaaatcgtggaattgccattccagtggatttggacagccaagttaatactcttttcatgaagagccattcaaatatggtgcagagagcagcaatgggttggagactatcagctcgctctgggccacgctttaaggaagctcttggagggcctgcttgggattacagaaatattattgaaaagttacaggatgtagtggcctccttggagcaccagttcagcccaatgatgcaggctgaattctcagtgttggttgatgtattgtacagtccagaactgctgttccctgagggaagcgatgcaagaataagatgtggcgctttcatgtcgaagttgattaatcatacaaagaaactaatggagaaagaagaaaaactgtgcattaaaattcttcagacattacgagaaatgttagagaagaaagacagctttgtggaagagggtaacacattaagaaagatacttctgaatcgatactttaaaggtgattatagtattggtgtgaatggacacctatcaggagcctactccaaaactgcacaggtgggaggaagcttttctggacaagattcagataagatggggatatcaatgtcagacattcagtgtctgctggataaagaaggtgcatcagaacttgtcatcgatgttatagtgaacaccaaaaatgacagaattttttcagaaggcattttcctcggcattgccttgcttgaaggaggaaatacacaaacacagtattctttctaccagcagttgcatgaacaaaaaaagtcagaaaaattctttaaagttctctatgatcgaatgaaggctgctcagaaagaaataagatcaacagtgacagttaataccatagatttaggtaacaaaaaaagggacgatgacaatgaattgatgacatctggtccacgaatgagagtaagagattcaacactacatttaaaagagggaatgaaagggcaattaacagaagcttcttcagcaacatccaaagcatattgtgtatacagaagagaaatggatccagaaatagacattatgtgcacaggaccagaagcgggaaacactgaggaaaaatccgcagaggaagtaacaatgagtcccgcaattgccatcatgcagccaatactgagatttcttcagttactgtgtgagaatcacaaccgggaattgcagaacttcttgaggaatcaaaacaacaaaacaaattacaacctagtctgtgagacccttcagtttctggactgcatttgtggaagtacaaccggtggcctgggcctgttgggtctctacatcaatgagaagaatgtagcgctggtcaaccagaacctggagagcttgactgagtattgccagggcccttgccatgaaaatcagacctgtatcgctacacatgagtctaatgggattgatatcatcattgctttgattctgaatgacataaaccctcttggtaaataccgaatggacctggtgctccagctaaagaacaatgcatctaaacttttgctggccattatggaaagcagacatgacagtgagaatgcagaaagaattctttttaacatgagacccagagaactggtggatgtgatgaagaatgcctataaccaaggattggaatgtgaccatggggatgatgagggtggagatgatggtgtttctccaaaagatgttggacacaatatctatattctggcccatcagttggcccgccacaataaactgttgcagcagatgctcaaaccaggatcggatccagatgaaggagatgaagccttaaagtattatgccaaccacactgcacagattgagattgtccggcatgataggaccatggaacaaatagtttttcctgtccccaatatatgtgaatacctcactcgagaatccaagtgccgtgtgttcaatacaactgaaagggatgaacaaggaagtaaagtgaatgactttttccagcaaacagaagatctctacaatgaaatgaagtggcagaagaaaatcaggaataaccctgcactgttctggttctcgaggcacatctctctctgggggagcatttccttcaacctggctgtgttcatcaatttagctgttgctctcttctacccatttggggatgatggagatgaaggtacactttctccattgttctcggttcttctttggatagcagttgcgatctgcacatctatgctgtttttcttctccaagcctgtgggtattcggccgtttcttgtatcaataatgctcagatcaatatatacaataggtcttgggcctacattaatacttcttggtgcagctaatctttgtaataaaattgtttttctggtgagttttgttggaaatcgtggcacgttcacccgtgggtaccgagcagtcatcctggatatggcctttctctatcacgtggcgtatgtcctggtttgcatgctgggcctttttgtccatgaattcttctatagcttcctgctttttgatttggtgtacagggaagagactttgctgaatgtcataaaaagtgtcacacgaaatggccgctctattattctaactgcagtcctggctctcatcctcgtctacctgttttccattattgggttcctttttttgaaggatgacttcactatggaagttgataggctgaaaaaccgaactcctgttacaggcagtcatcaagtgcctactatgactttaactaccatgatggaagcatgtgccaaggagaactgttcacccacaattccagcttcaaatacagctgatgaagagtatgaagatggaattgaaaggacgtgtgacactctccttatgtgcattgtcaccgtgctgaaccagggcctcaggaatggcggtggtgtgggggatgtgctaagaaggccatcgaaagatgagcccttgtttgctgcccgagtggtttatgaccttcttttttatttcattgttatcattattgttctgaacttgatttttggtgttatcatcgatacttttgctgatctcagaagcgaaaaacagaaaaaagaagaaattctaaagacaacttgtttcatctgtggacttgagagagacaagtttgataataaaacggtttcatttgaggagcacattaagtcagaacacaatatgtggcattatttgtacttcatagtcctggtgaaagttaaagacccaacagaatacactggacctgaaagttatgtggctcaaatgattgtggagaagaatttggattggtttcctcggatgcgagccatgtccctcgttagcaatgaaggcgacagtgagcaaaatgaaattcggagccttcaggagaagttggaatcgaccatgagtctggtcaaacagctgtcgggtcagctggcggagctcaaggagcagatgacagaacaaaggaagaataagcagagactgggcttcctcggatcaaacacaccccatgtgaatcatcacatgccaccacactgataccatggggggaagccgtgactagcctttcatcagtgtcctgcctgatcactgaataaagaactgagatggaggggagtgaacagtgcctattgttgaaaagttaaaaacaaccaagtgccaagatgttgagtgggttagctccgagaacaatttataactgtgttttcatggttgcgaagacctaacctcaaatgcatctgctagaaagcgtacatcacacattcgcaatgcatcaggaagaaaaggcttgcccaaaaggctggagagggcagggagcggcaggatggaaggagacacggggcagggagaactctcttctgctaaatcgataggagtcagttttgtcttaaatgctgactacagccactgacatggttggctggaatttctttcttttaattgtggcatataggtttgtgacacaagaagtcatactttggtggctaagttttactaaggaaaataactgaaaagattaaaagtgagagctgaaaagagaaatgataatgcttccaaactgtagctgtcacagggcaatttctttatttataacatgaagcacaatggatttacagctctaggaacttagtactttggagcttttgcctctcacactgacaacataacaggatgtgattgccttctctgggattcagacaggctctgtcaatgtggagcacaaaaggagattttcatataacttgttaaaaacatgttctaagtcatgtataggctaagattttaagaagatctgggggaataaaaagccaacagtaagccccaggaaagggttttttgagaccatatgtatgctattaaaatatattgagattaatacatgaaaatgcttaaaagtgataggaattattgagaaacttatgatggtggcattgccttttataaacatggagtgaaagccatttgactcaacgtttgctgtgcttaaagaattgcttcaggacccgagcgtttttatgtatgctgttcctgcagttaggaaaaaaaaatccaagaaatgtattgaatactcaagaaaatgccacatttcaattacatatttaaaactgtatctgtaagggcttttcaaaatgtagcaagataaaaatctcttattcaaattgtttttgtattaaatcatgcactcagaatttgtcgagggagagaataacctggtgtgttcaggttattcttagagactacacatttggaatagcagagcaaaatatggataatgaaagtgttgggaaaaaagtgatgtgacagggagtgaagacacttgataccagactctgggagatactctgcaagttgacctggcctctcccccacaggaacaaaacactgcctccagagtctttaaattctcagttatcaacgccaaggtttaaggtctagatagggtttgctatagggtttgctctgacaatttttaaagcttttggattgttctaacatagcttaagctattggttcctaaaaatcccaaatcaagatctatgtagaatataaaggaagcctgaaccaatccttccacatactgttaagatgtagacttggaacaaagctgttgggacccagagcaatgaatttttgaactgaagctactggtactccccagcaccacctcatactaagaattcctcactctgacatgacagtattttttctgaccaggagctgaaagaccctgacattcatgatccaaagatataagaaattttgatatgtctgcatgcagcacagaactttgaacctaggaggcagtcaataaatacatgagaaattcagctgtcattcagttactcttaattctttataaaactttaaatgataccacatatttgtttgtttaaaatggctttcccaaaatcaaagtagactaaagcagccatctttaaaatccaggatcatcaatgctattaacagtatcaggtaaaaagtacactttaaaatattttaatcaggcagagttttatggatagagaatagaagagaaaggtagtaaatattgaacatattccaatataggaacctatctctgttttagtacaaaatatttctgacatctgaaagacaggttgctcagatgtatacaaatgaatttattctcttgacctctagttcagatgtcaaaaatattttggtccccccaaccgcgaat

SEQ ID NO: 10462 - DNA, 12630 bp, Homo sapiens
gcggccgcacgcgcccgctcccccgccggggtcccccgccgcccctccagcgccgcccagcgtcgcgtccccgcgcgggccggtgcggcggcagcagaggcttcccgggtggcccggcctcccgagggtcgccccgccccggcccagctccgcccccggccgctgctccctgattggccgcccccccacctctccagggctcctctcctcctcctcgcccaatgggcaccggcacctggtccaaaaattcccctgaggggaccgagggggctcggccacttccagctcccgccggcggctgtgacggccgcagcgggtcgcagagcagggagtggacacgagagtggggagcggagagggaaggaggaggaggaggagcaaaggtgttggagagaaaacttcagaaaggaacaggaaacctgccggggagcgcggcggcggctgcggcttctctgggcgcctgggctgcgctcttcgcggggtgtcccgagctggcgcttggccccggtctggcttccccggcgcgcaccacggctgagcgcgacgctcagtggctcgggccgtgcctccgccgtggctcttggccgctgtagtcccgcgatccgatccgcttctgccgcggcggctccctggagagagggcggcgagggcgcagggaagaagagggacgtccactgtggaacatgaagcagcatgaagcagcatgactgagaaaatgtccagcttcctctacataggggacatcgtgtccctgtacgcggagggctcggtcaacggcttcatcagcaccttggggttagtggatgacagatgtgtggtgcacccagaggccggggaccttgccaaccctcccaagaagttcagagactgccttttcaaggtgtgccctatgaacagatattctgcccagaagcaatattggaaagcaaagcaagccaaacaagggaaccacaccgaggcagccttgctgaagaaactacagcacgctgcagaactggaacaaaaacaaaatgaatcggagaataagaaactgttgggagaaattgtaaaatacagtaatgttatacaactactgcatataaaaagcaacaaatatcttactgtcaacaagagattacctgctttactggagaagaatgccatgcgtgtgtccttggatgctgcaggaaatgaagggtcttggttttatattcatccattctggaaactgagaagcgagggtgacaatattgttgtaggagataaagttgttttgatgcctgtgaatgcagggcagccactacatgccagcaacatagagcttcttgataacccagggtgtaaagaggtgaatgctgtcaattgcaacaccagctggaaaatcactttattcatgaaatatagttcctatcgagaggatgtattaaaaggaggggacgttgttagattatttcatgcggaacaagagaagtttttgacttgtgatgaatatgagaaaaaacagcacattttccttcgtacgaccttgcgccaatcagctacttctgctactagttctaaagcactctgggaaatagaggtggttcatcatgacccatgccgtgggggtgcaggacagtggaacagcttgttcagatttaagcatcttgcaactggaaactatttagctgcagagcttaatcctgattatcgagatgcccaaaatgaaggaaaaaatgtgagagatggagtccctccaacttcaaagaaaaaacgccaggcaggggagaagatcatgtatactttggtttcagtcccgcatggcaatgacattgcatccctttttgaactagatgccacaactcttcagagagctgactgcctggttccaaggaactcatatgttcggttaaggcatttatgcaccaacacatgggtaaccagtactagtatccccatagacacagatgaagagaggcctgttatgttaaagattggaacctgccaaaccaaagaagataaagaagcgttcgcaatcgtgtctgttccactgtctgaagttcgagacttagactttgccaatgatgccaataaagtactagcgaccacagttaaaaagctagaaaacggcacaataactcagaatgaaaggaggtttgtaaccaaattattggaagatctcatattctttgttgctgatgtgcctaataatggacaagaagttctggatgtggttatcactaagccaaaccgagagcgtcaaaaattgatgagggaacaaaacatactggcacaggtatttggaattcttaaagcaccctttaaagagaaagcaggagaaggctcgatgctgagacttgaagatctgggggatcaaagatatgcaccctacaagtacatgctgcggctctgttaccgcgtcctgagacactcgcagcaggattaccggaaaaatcaggaatatattgctaagaatttctgtgtcatgcagtcccagattggctatgatattttggcagaagatatatcaggcaccttgctcaagaggcaaaagaaggcaccaaagctgacttagaagttcttacctattacaggtaccagctaaacctctttgcaaggatgtgcttggatcgccagtatctggccataaaccagatttctacacagctgtctgtagacctgatcctgcggtgtgtgtcggatgagagcctgccgttcgacctccgagcgtccttctgtcgcctcatgctccacatgcacgttgaccgggatccccaggagtccgtggtgcctgttcgctatgccaggctctggacagaaatccccacaaagatcacaattcatgaatatgattctataacagactcttccagaaatgatatgaagaggaaatttgccctgacaatggaatttgttgaagaatatttgaaagaagttgtaaaccagccctttccttttggggataaagaaaaaaataaactgacatttgaggtggtccacttggctcggaatcttatatactttggattttatagtttcagtgagttattaaggctaacaagaacacttctggctattttagacattgtacaggcccccatgtcatcatactttgaaagattaagcaaatttcaagatggaggaaacaatgtgatgagaaccattcatggggtgggagagatgatgacccagatggtactcagtagaggctccatcttccccatgagcgtgccggatgtgccacccagcatccacccgagcaagcaagggagccccaccgagcatgaggatgtgactgtgatggacaccaagctgaagatcattgagattttgcagtttatcctgagtgtcagactggattataggatctcatatatgctgtcaatatataagaaggagtttggagaggacaatgacaatgcggagacatctgccagtggatctccagacactttactaccatcagctattgttcctgatatagatgaaattgcagctcaggcagaaactatgtttgcgggaagaaaagaaaaaaatccagttcaacttgacgatgaaggaggcaggacgtttttacgggtcctcattcatctgatcatgcacgactacccgcctttgctgtctggagccctgcagctgttgtttaagcacttcagccagagggcagaggttttacaggcatttaagcaggtgcaattactggtgtctaatcaagacgtagataactacaagcaaatcaaggcagatctagaccagcttcgactgacagtagaaaagtctgagctatgggtggagaagagcagcaactatgagaatggagaaataggggaaagtcaagtgaaaggtggtgaagagccaattgaggaatcaaacattttaagtccagtgcaggatggaacaaagaaacctcagattgacagcaacaagagcaataactaccggattgtaaaggagattttgatcaggctaagtaaactctgtgtgcagaataaaaagtgtcggaatcaacatcaacgattactgaaaaatatgggggcgcattcggtggtgttggatcttctgcagataccctatgaaaagaatgatgaaaagatgaatgaagtaatgaatctagcccatacatttctgcagaatttctgtcgaggaaatccacagaatcaagttcttcttcataaacatctgaatttgtttttaactccaggtctccttgaagcagaaaccatgcggcacatcttcatgaacaattaccatctgtgcaacgaaattagcgagagagttgtacaacactttgtgcactgcattgagacacatggccgccacgtggagtacctgaggtttttgcaaacaattgtaaaagcagatggtaaatatgtgaagaaatgccaggatatggtaatgacagagttgataaatgggggtgaagacgtgctgatattttacaatgatagagcatcatttccaatccttctccatatgatgtgttcagagagagaccgaggggatgagagtggccccttagcctaccacatcaccctggtggagttgctggcagcatgcacagaggggaaaaatgtctacactgaaatcaagtgtaattcccttctcccgctggacgacatagtgagggtggtgacccatgacgactgcatccctgaggttaaaattgcttatgtgaactttgttaatcactgttatgttgacactgaagtggaaatgaaagaaatctatacaagtaaccacatttggaaattatttgagaacttcttggtggatatggcaagggtttgcaacacaactacagacaggaaacatgcagacatctttttggaaaagtgtgttactgagtcaataatgaatattgtgagcggcttctttaattctcccttttcagacaatagtaccagcctccagacacatcagccagtttttattcagctactgcaatctgccttcagaatttacaattgcacctggccaaacccagcgcagaaagcctcagtggaatcctgtatcagaactttggctgaagtggcaaaaaatcgtggaattgccattccagtggatttggacagccaagttaatactcttttcatgaagagccattcaaatatggtgcagagagcagcaatgggttggagactatcagctcgctctgggccacgctttaaggaagctcttggagggcctgcttgggattacagaaatattattgaaaagttacaggatgtagtggcctccttggagcaccagttcagcccaatgatgcaggctgaattctcagtgttggttgatgtattgtacagtccagaactgctgttccctgagggaagcgatgcaagaataagatgtggcgctttcatgtcgaagttgattaatcatacaaagaaactaatggagaaagaagaaaaactgtgcattaaaattcttcagacattacgagaaatgttagagaagaaagacagctttgtggaagagggtaacacattaagaaagatacttctgaatcgatactttaaaggtgattatagtattggtgtgaatggacacctatcaggagcctactccaaaactgcacaggtgggaggaagcttttctggacaagattcagataagatggggatatcaatgtcagacattcagtgtctgctggataaagaaggtgcatcagaacttgtcatcgatgttatagtgaacaccaaaaatgacagaattttttcagaaggcattttcctcggcattgccttgcttgaaggaggaaatacacaaacacagtattctttctaccagcagttgcatgaacaaaaaaagtcagaaaaattctttaaagttctctatgatcgaatgaaggctgctcagaaagaaataagatcaacagtgacagttaataccatagatttaggtaacaaaaaaagggacgatgacaatgaattgatgacatctggtccacgaatgagagaattttggtcatggggtgaccctaaaacggctctgcaggactaaacttaaatgagacataatcagtgcaaagcaaccaacggcatgaaagatgtttgatttcattgtggcatgcatgtaagagattcaacactacatttaaaagagggaatgaaagggcaattaacagaagcttcttcagcaacatccaaagcatattgtgtatacagaagagaaatggatccagaaatagacattatgtgcacaggaccagaagcgggaaacactgaggaaaaatccgcagaggaagtaacaatgagtcccgcaattgccatcatgcagccaatactgagatttcttcagttactgtgtgagaatcacaaccgggaattgcagaacttcttgaggaatcaaaacaacaaaacaaattacaacctagtctgtgagacccttcagtttctggactgcatttgtggaagtacaaccggtggcctgggcctgttgggtctctacatcaatgagaagaatgtagcgctggtcaaccagaacctggagagcttgactgagtattgccagggcccttgccatgaaaatcagacctgtatcgctacacatgagtctaatgggattgatatcatcattgctttgattctgaatgacataaaccctcttggtaaataccgaatggacctggtgctccagctaaagaacaatgcatctaaacttttgctggccattatggaaagcagacatgacagtgagaatgcagaaagaattctttttaacatgagacccagagaactggtggatgtgatgaagaatgcctataaccaaggattggaatgtgaccatggggatgatgagggtggagatgatggtgtttctccaaaagatgttggacacaatatctatattctggcccatcagttggcccgccacaataaactgttgcagcagatgctcaaaccaggatcggatccagatgaaggagatgaagccttaaagtattatgccaaccacactgcacagattgagattgtccggcatgataggaccatggaacaaatagtttttcctgtccccaatatatgtgaatacctcactcgagaatccaagtgccgtgtgttcaatacaactgaaagggatgaacaaggaagtaaagtgaatgactttttccagcaaacagaagatctctacaatgaaatgaagtggcagaagaaaatcaggaataaccctgcactgttctggttctcgaggcacatctctctctgggggagcatttccttcaacctggctgtgttcatcaatttagctgttgctctcttctacccatttggggatgatggagatgaaggtacactttctccattgttctcggttcttctttggatagcagttgcgatctgcacatctatgctgtttttcttctccaagcctgtgggtattcggccgtttcttgtatcaataatgctcagatcaatatatacaataggtcttgggcctacattaatacttcttggtgcagctaatctttgtaataaaattgtttttctggtgagttttgttggaaatcgtggcacgttcacccgtgggtaccgagcagtcatcctggatatggcctttctctatcacgtggcgtatgtcctggtttgcatgctgggcctttttgtccatgaattcttctatagcttcctgctttttgatttggtgtacagggaagagactttgctgaatgtcataaaaagtgtcacacgaaatggccgctctattattctaactgcagtcctggctctcatcctcgtctacctgttttccattattgggttcctttttttgaaggatgacttcactatggaagttgataggctgaaaaaccgaactcctgttacaggcagtcatcaagtgcctactatgactttaactaccatgatggaagcatgtgccaaggagaactgttcacccacaattccagcttcaaatacagctgatgaagagtatgaagatggaattgaaaggacgtgtgacactctccttatgtgcattgtcaccgtgctgaaccagggcctcaggaatggcggtggtgtgggggatgtgctaagaaggccatcgaaagatgagcccttgtttgctgcccgagtggtttatgaccttcttttttatttcattgttatcattattgttctgaacttgatttttggtgttatcatcgatacttttgctgatctcagaagcgaaaaacagaaaaaagaagaaattctaaagacaacttgtttcatctgtggacttgagagagacaagtttgataataaaacggtttcatttgaggagcacattaagtcagaacacaatatgtggcattatttgtacttcatagtcctggtgaaagttaaagacccaacagaatacactggacctgaaagttatgtggctcaaatgattgtggagaagaatttggattggtttcctcggatgcgagccatgtccctcgttagcaatgaaggcgacagtgagcaaaatgaaattcggagccttcaggagaagttggaatcgaccatgagtctggtcaaacagctgtcgggtcagctggcggagctcaaggagcagatgacagaacaaaggaagaataagcagagactgggcttcctcggatcaaacacaccccatgtgaatcatcacatgccaccacactgataccatggggggaagccgtgactagcctttcatcagtgtcctgcctgatcactgaataaagaactgagatggaggggagtgaacagtgcctattgttgaaaagttaaaaacaaccaagtgccaagatgttgagtgggttagctccgagaacaatttataactgtgttttcatggttgcgaagacctaacctcaaatgcatctgctagaaagcgtacatcacacattcgcaatgcatcaggaagaaaaggcttgcccaaaaggctggagagggcagggagcggcaggatggaaggagacacggggcagggagaactctcttctgctaaatcgataggagtcagttttgtcttaaatgctgactacagccactgacatggttggctggaatttctttcttttaattgtggcatataggtttgtgacacaagaagtcatactttggtggctaagttttactaaggaaaataactgaaaagattaaaagtgagagctgaaaagagaaatgataatgcttccaaactgtagctgtcacagggcaatttctttatttataacatgaagcacaatggatttacagctctaggaacttagtactttggagcttttgcctctcacactgacaacataacaggatgtgattgccttctctgggattcagacaggctctgtcaatgtggagcacaaaaggagattttcatataacttgttaaaaacatgttctaagtcatgtataggctaagattttaagaagatctgggggaataaaaagccaacagtaagccccaggaaagggttttttgagaccatatgtatgctattaaaatatattgagattaatacatgaaaatgcttaaaagtgataggaattattgagaaacttatgatggtggcattgccttttataaacatggagtgaaagccatttgactcaacgtttgctgtgcttaaagaattgcttcaggacccgagcgtttttatgtatgctgttcctgcagttaggaaaaaaaaatccaagaaatgtattgaatactcaagaaaatgccacatttcaattacatatttaaaactgtatctgtaagggcttttcaaaatgtagcaagataaaaatctcttattcaaattgtttttgtattaaatcatgcactcagaatttgtcgagggagagaataacctggtgtgttcaggttattcttagagactacacatttggaatagcagagcaaaatatggataatgaaagtgttgggaaaaaagtgatgtgacagggagtgaagacacttgataccagactctgggagatactctgcaagttgacctggcctctcccccacaggaacaaaacactgcctccagagtctttaaattctcagttatcaacgccaaggtttaaggtctagatagggtttgctatagggtttgctctgacaatttttaaagcttttggattgttctaacatagcttaagctattggttcctaaaaatcccaaatcaagatctatgtagaatataaaggaagcctgaaccaatccttccacatactgttaagatgtagacttggaacaaagctgttgggacccagagcaatgaatttttgaactgaagctactggtactccccagcaccacctcatactaagaattcctcactctgacatgacagtattttttctgaccaggagctgaaagaccctgacattcatgatccaaagatataagaaattttgatatgtctgcatgcagcacagaactttgaacctaggaggcagtcaataaatacatgagaaattcagctgtcattcagttactcttaattctttataaaactttaaatgataccacatatttgtttgtttaaaatggctttcccaaaatcaaagtagactaaagcagccatctttaaaatccaggatcatcaatgctattaacagtatcaggtaaaaagtacactttaaaatattttaatcaggcagagttttatggatagagaatagaagagaaaggtagtaaatattgaacatattccaatataggaacctatctctgttttagtacaaaatatttctgacatctgaactagaggtcaagagaataaattcatttgtatacatctgagcaacctgtctttcagatgataaagtatctagccttttctgacaccataatagttcattttgtagggaataagccattaggtgtatataattgctttctagaaatgacctaatgtccccaaccactttgtagtggcagatcactgtttcacagcatattttctcccaaggaaagtattcaaaagagactgcaactaacaagactcttatttcatcaaaatttaaatatttctgagttgtatttttaatgcctctttcttttctgcctaaatgcttagaaattataaagcaaaaaaaaaaaaaaaacagcaacaaaaaatcgaagcagacaaaaaaggcacttttcagaacatcaaattcctaatgaagaagaggagaagataatggggaaatttgacatttgatataaatttatatttgttatgtgtatgtttgttaatgcaactggaatatttgacttaggtgagtatcagttaacatccttgtatttatatagtgacatcaaaataaatgcaatcatcttgaactttgatgttaagggagattttgaaaaaatatttagttatttcaaattcatattggttcaaaagtatcagtttctgctgaataatatttttaatttcaaaagggttttgttccctctgtgctccattctgaggctcaagagcttaatgcaagtatgttttctgagttaaaataacacttttagatgagaaaatgcttgtatcatacagggctataatataaataaataaattgtatgtatgcaaaatttatcatattttctaccccttaaaaaattaagttagaaataagcttattttcttgcacatcaatatttttctgttggtaaagaggacacaatttctagtagattgttaataacatcaggaagatatttctttcgtcagaactaattgtgtgcttattcccatattctcagctcataactccctgttttggctgctctctttattttacaattgtttcattgcaaacagcaaggcagtatagcccacactcagccactagcccccagtccccaggactgagaatgagtggggaggctggggagttggtgagagaaggtggagatagggatttctgcttcccagtactctatcattagagaaaaggaggggtaaatattagctaagaagaagaaaaaagcttattcttcagggacccagtagattggacgtaagcaagtaaatattgcacaggcatcatgatgtaatagttgatggaccccagagatacccctcacccatgcagagaacaaagctgtgtggaagagcaactaccataagatggtgtgttccttccagcggctgttaaagccatcctgaataacaaatcagctattcctacctacagacccattccaatatgctgtgatacacgacacggtgcaccgcagaggagacagacatcttcagcacaaacacagatgcctgcaggagcttggcaagtcactaaattgcatgaaattgtgaggtgcacaccaaatgcagggatgggggaggccgtgggaagctctgtattctcaaaatttgacagctaattccggtttttagaaaatgcctgaggccagtagaggccctctagtcactcactgctgctgtttctgatataattattgagaaagctatctcacttaatagaagaaaacacgcactatcaaaaccagatagcctaacgtgcatgtgaaaatcgagaaagctgaaaacaaatccaggtacccttctctgaactggagtgtttccacagacttgaataatttatgaaattatcacaccagtatttctcatatcaccaagaagactttctctcctgcagtagaggattgttatatttgcctaaaaaacacgattccaatatatgacaagggcagataatttataagtgaatgttaataaaattggatgtgtataa

SEQ ID NO: 10463 - DNA, 7469 bp, Homo sapiens
ggaagtggatggcgtggagatatggcgcaactgcggcgcggacacttgacattcagggacgtggccatgaattctcagtgttggttgatgtattgtacagtccagaactgctgttccctgagggaagcgatgcaagaataagatgtggcgctttcatgtcgaagttgattaatcatacaaagaaactaatggagaaagaagaaaaactgtgcattaaaattcttcagacattacgagaaatgttagagaagaaagacagctttgtggaagagggtaacacattaagaaagatacttctgaatcgatactttaaaggtgattatagtattggtgtgaatggacacctatcaggagcctactccaaaactgcacaggtgggaggaagcttttctggacaagattcagataagatggggatatcaatgtcagacattcagtgtctgctggataaagaaggtgcatcagaacttgtcatcgatgttatagtgaacaccaaaaatgacagaattttttcagaaggcattttcctcggcattgccttgcttgaaggaggaaatacacaaacacagtattctttctaccagcagttgcatgaacaaaaaaagtcagaaaaattctttaaagttctctatgatcgaatgaaggctgctcagaaagaaataagatcaacagtgacagttaataccatagatttaggtaacaaaaaaagggacgatgacaatgaattgatgacatctggtccacgaatgagagaattttggtcatggggtgaccctaaaacggctctgcaggactaaacttaaatgagacataatcagtgcaaagcaaccaacggcatgaaagatgtttgatttcattgtggcatgcatgtaagagattcaacactacatttaaaagagggaatgaaagggcaattaacagaagcttcttcagcaacatccaaagcatattgtgtatacagaagagaaatggatccagaaatagacattatgtgcacaggaccagaagcgggaaacactgaggaaaaatccgcagaggaagtaacaatgagtcccgcaattgccatcatgcagccaatactgagatttcttcagttactgtgtgagaatcacaaccgggaattgcagaacttcttgaggaatcaaaacaacaaaacaaattacaacctagtctgtgagacccttcagtttctggactgcatttgtggaagtacaaccggtggcctgggcctgttgggtctctacatcaatgagaagaatgtagcgctggtcaaccagaacctggagagcttgactgagtattgccagggcccttgccatgaaaatcagacctgtatcgctacacatgagtctaatgggattgatatcatcattgctttgattctgaatgacataaaccctcttggtaaataccgaatggacctggtgctccagctaaagaacaatgcatctaaacttttgctggccattatggaaagcagacatgacagtgagaatgcagaaagaattctttttaacatgagacccagagaactggtggatgtgatgaagaatgcctataaccaaggattggaatgtgaccatggggatgatgagggtggagatgatggtgtttctccaaaagatgttggacacaatatctatattctggcccatcagttggcccgccacaataaactgttgcagcagatgctcaaaccaggatcggatccagatgaaggagatgaagccttaaagtattatgccaaccacactgcacagattgagattgtccggcatgataggaccatggaacaaatagtttttcctgtccccaatatatgtgaatacctcactcgagaatccaagtgccgtgtgttcaatacaactgaaagggatgaacaaggaagtaaagtgaatgactttttccagcaaacagaagatctctacaatgaaatgaagtggcagaagaaaatcaggaataaccctgcactgttctggttctcgaggcacatctctctctgggggagcatttccttcaacctggctgtgttcatcaatttagctgttgctctcttctacccatttggggatgatggagatgaaggtacactttctccattgttctcggttcttctttggatagcagttgcgatctgcacatctatgctgtttttcttctccaagcctgtgggtattcggccgtttcttgtatcaataatgctcagatcaatatatacaataggtcttgggcctacattaatacttcttggtgcagctaatctttgtaataaaattgtttttctggtgagttttgttggaaatcgtggcacgttcacccgtgggtaccgagcagtcatcctggatatggcctttctctatcacgtggcgtatgtcctggtttgcatgctgggcctttttgtccatgaattcttctatagcttcctgctttttgatttggtgtacagggaagagactttgctgaatgtcataaaaagtgtcacacgaaatggccgctctattattctaactgcagtcctggctctcatcctcgtctacctgttttccattattgggttcctttttttgaaggatgacttcactatggaagttgataggctgaaaaaccgaactcctgttacaggcagtcatcaagtgcctactatgactttaactaccatgatggaagcatgtgccaaggagaactgttcacccacaattccagcttcaaatacagctgatgaagagtatgaagatggaattgaaaggacgtgtgacactctccttatgtgcattgtcaccgtgctgaaccagggcctcaggaatggcggtggtgtgggggatgtgctaagaaggccatcgaaagatgagcccttgtttgctgcccgagtggtttatgaccttcttttttatttcattgttatcattattgttctgaacttgatttttggtgttatcatcgatacttttgctgatctcagaagcgaaaaacagaaaaaagaagaaattctaaagacaacttgtttcatctgtggacttgagagagacaagtttgataataaaacggtttcatttgaggagcacattaagtcagaacacaatatgtggcattatttgtacttcatagtcctggtgaaagttaaagacccaacagaatacactggacctgaaagttatgtggctcaaatgattgtggagaagaatttggattggtttcctcggatgcgagccatgtccctcgttagcaatgaaggcgacagtgagcaaaatgaaattcggagccttcaggagaagttggaatcgaccatgagtctggtcaaacagctgtcgggtcagctggcggagctcaaggagcagatgacagaacaaaggaagaataagcagagactgggcttcctcggatcaaacacaccccatgtgaatcatcacatgccaccacactgataccatggggggaagccgtgactagcctttcatcagtgtcctgcctgatcactgaataaagaactgagatggaggggagtgaacagtgcctattgttgaaaagttaaaaacaaccaagtgccaagatgttgagtgggttagctccgagaacaatttataactgtgttttcatggttgcgaagacctaacctcaaatgcatctgctagaaagcgtacatcacacattcgcaatgcatcaggaagaaaaggcttgcccaaaaggctggagagggcagggagcggcaggatggaaggagacacggggcagggagaactctcttctgctaaatcgataggagtcagttttgtcttaaatgctgactacagccactgacatggttggctggaatttctttcttttaattgtggcatataggtttgtgacacaagaagtcatactttggtggctaagttttactaaggaaaataactgaaaagattaaaagtgagagctgaaaagagaaatgataatgcttccaaactgtagctgtcacagggcaatttctttatttataacatgaagcacaatggatttacagctctaggaacttagtactttggagcttttgcctctcacactgacaacataacaggatgtgattgccttctctgggattcagacaggctctgtcaatgtggagcacaaaaggagattttcatataacttgttaaaaacatgttctaagtcatgtataggctaagattttaagaagatctgggggaataaaaagccaacagtaagccccaggaaagggttttttgagaccatatgtatgctattaaaatatattgagattaatacatgaaaatgcttaaaagtgataggaattattgagaaacttatgatggtggcattgccttttataaacatggagtgaaagccatttgactcaacgtttgctgtgcttaaagaattgcttcaggacccgagcgtttttatgtatgctgttcctgcagttaggaaaaaaaaatccaagaaatgtattgaatactcaagaaaatgccacatttcaattacatatttaaaactgtatctgtaagggcttttcaaaatgtagcaagataaaaatctcttattcaaattgtttttgtattaaatcatgcactcagaatttgtcgagggagagaataacctggtgtgttcaggttattcttagagactacacatttggaatagcagagcaaaatatggataatgaaagtgttgggaaaaaagtgatgtgacagggagtgaagacacttgataccagactctgggagatactctgcaagttgacctggcctctcccccacaggaacaaaacactgcctccagagtctttaaattctcagttatcaacgccaaggtttaaggtctagatagggtttgctatagggtttgctctgacaatttttaaagcttttggattgttctaacatagcttaagctattggttcctaaaaatcccaaatcaagatctatgtagaatataaaggaagcctgaaccaatccttccacatactgttaagatgtagacttggaacaaagctgttgggacccagagcaatgaatttttgaactgaagctactggtactccccagcaccacctcatactaagaattcctcactctgacatgacagtattttttctgaccaggagctgaaagaccctgacattcatgatccaaagatataagaaattttgatatgtctgcatgcagcacagaactttgaacctaggaggcagtcaataaatacatgagaaattcagctgtcattcagttactcttaattctttataaaactttaaatgataccacatatttgtttgtttaaaatggctttcccaaaatcaaagtagactaaagcagccatctttaaaatccaggatcatcaatgctattaacagtatcaggtaaaaagtacactttaaaatattttaatcaggcagagttttatggatagagaatagaagagaaaggtagtaaatattgaacatattccaatataggaacctatctctgttttagtacaaaatatttctgacatctgaactagaggtcaagagaataaattcatttgtatacatctgagcaacctgtctttcagatgataaagtatctagccttttctgacaccataatagttcattttgtagggaataagccattaggtgtatataattgctttctagaaatgacctaatgtccccaaccactttgtagtggcagatcactgtttcacagcatattttctcccaaggaaagtattcaaaagagactgcaactaacaagactcttatttcatcaaaatttaaatatttctgagttgtatttttaatgcctctttcttttctgcctaaatgcttagaaattataaagcaaaaaaaaaaaaaaaacagcaacaaaaaatcgaagcagacaaaaaaggcacttttcagaacatcaaattcctaatgaagaagaggagaagataatggggaaatttgacatttgatataaatttatatttgttatgtgtatgtttgttaatgcaactggaatatttgacttaggtgagtatcagttaacatccttgtatttatatagtgacatcaaaataaatgcaatcatcttgaactttgatgttaagggagattttgaaaaaatatttagttatttcaaattcatattggttcaaaagtatcagtttctgctgaataatatttttaatttcaaaagggttttgttccctctgtgctccattctgaggctcaagagcttaatgcaagtatgttttctgagttaaaataacacttttagatgagaaaatgcttgtatcatacagggctataatataaataaataaattgtatgtatgcaaaatttatcatattttctaccccttaaaaaattaagttagaaataagcttattttcttgcacatcaatatttttctgttggtaaagaggacacaatttctagtagattgttaataacatcaggaagatatttctttcgtcagaactaattgtgtgcttattcccatattctcagctcataactccctgttttggctgctctctttattttacaattgtttcattgcaaacagcaaggcagtatagcccacactcagccactagcccccagtccccaggactgagaatgagtggggaggctggggagttggtgagagaaggtggagatagggatttctgcttcccagtactctatcattagagaaaaggaggggtaaatattagctaagaagaagaaaaaagcttattcttcagggacccagtagattggacgtaagcaagtaaatattgcacaggcatcatgatgtaatagttgatggaccccagagatacccctcacccatgcagagaacaaagctgtgtggaagagcaactaccataagatggtgtgttccttccagcggctgttaaagccatcctgaataacaaatcagctattcctacctacagacccattccaatatgctgtgatacacgacacggtgcaccgcagaggagacagacatcttcagcacaaacacagatgcctgcaggagcttggcaagtcactaaattgcatgaaattgtgaggtgcacaccaaatgcagggatgggggaggccgtgggaagctctgtattctcaaaatttgacagctaattccggtttttagaaaatgcctgaggccagtagaggccctctagtcactcactgctgctgtttctgatataattattgagaaagctatctcacttaatagaagaaaacacgcactatcaaaaccagatagcctaacgtgcatgtgaaaatcgagaaagctgaaaacaaatccaggtacccttctctgaactggagtgtttccacagacttgaataatttatgaaattatcacaccagtatttctcatatcaccaagaagactttctctcctgcagtagaggattgttatatttgcctaaaaaacacgattccaatatatgacaagggcagataatttataagtgaatgttaataaaattggatgtgtataa

SEQ ID NO: 10464 - DNA, 1792 bp, Homo sapiens
gcggccgcacgcgcccgctcccccgccggggtcccccgccgcccctccagcgccgcccagcgtcgcgtccccgcgcgggccggtgcggcggcagcagaggcttcccgggtggcccggcctcccgagggtcgccccgccccggcccagctccgcccccggccgctgctccctgattggccgcccccccacctctccagggctcctctcctcctcctcgcccaatgggcaccggcacctggtccaaaaattcccctgaggggaccgagggggctcggccacttccagctcccgccggcggctgtgacggccgcagcgggtcgcagagcagggagtggacacgagagtggggagcggagagggaaggaggaggaggaggagcaaaggtgttggagagaaaacttcagaaaggaacaggaaacctgccggggagcgcggcggcggctgcggcttctctgggcgcctgggctgcgctcttcgcggggtgtcccgagctggcgcttggccccggtctggcttccccggcgcgcaccacggctgagcgcgacgctcagtggctcgggccgtgcctccgccgtggctcttggccgctgtagtcccgcgatccgatccgcttctgccgcggcggctccctggagagagggcggcgagggcgcagggaagaagagggacgtccactgtggaacatgaagcagcatgaagcagcatgactgagaaaatgtccagcttcctctacataggggacatcgtgtccctgtacgcggagggctcggtcaacggcttcatcagcaccttggggttagtggatgacagatgtgtggtgcacccagaggccggggaccttgccaaccctcccaagaagttcagagactgccttttcaaggtgtgccctatgaacagatattctgcccagaagcaatattggaaagcaaagcaagccaaacaagggaaccacaccgaggcagccttgctgaagaaactacagcacgctgcagaactggaacaaaaacaaaatgaatcggagaataagaaactgttgggagaaattgtaaaatacagtaatgttatacaactactgcatataaaaagcaacaaatatcttactgtcaacaagagattacctgctttactggagaagaatgccatgcgtgtgtccttggatgctgcaggaaatgaagggtcttggttttatattcatccattctggaaactgagaagcgagggtgacaatattgttgtaggagataaagttgttttgatgcctgtgaatgcagggcagccactacatgccagcaacatagagcttcttgataacccagggtgtaaagaggtgaatgctgtcaattgcaacaccagctggaaaatcactttattcatgaaatatagttcctatcgagaggatgtattaaaaggaggggacgttgttagattatttcatgcggaacaagagaagtttttgacttgtgatgaatatgagaaaaaacagcacattttccttcgtacgaccttgcgccaatcagctacttctgctactagttctaaagcactctgggaaatagaggtggttcatcatgacccatgccgtgggggtgcaggacagtggaacagcttgttcagatttaagcatcttgcaactggaaactatttagctgcagaggcttatcaatcacaataatagatttgtcctgaaatgccagtcgttggaaagagaaacatataaatataatcatttaaaaatacacacatgatgtttatgatttcagtgttatatataataaaaattgatcaaaacaca

SEQ ID NO: 10465 - DNA, 395 bp, Homo sapiens
tatcaggcaccttgctcaagaggcaaaagaaggcaccaaagctgacttagaagttcttacctattacaggttaagtattatagacaatcttacaataattcccagtctcacatattaattgagaactggttctctgtagccactagttaggtatctatgaagaggcaattttaaaagtcatgtcagaactagggtagctgaaatatttagtattgtttaaaatattcaaaataaaagttaacatttatattttctgcatacaccacttgtaatttcctggtttctcactagcttggaattattgtgcagccaaaggctttgtcctcatattgagtagagtggaggcagatgagaggcatgttaggacctaggtgatggagttgagagggatatag

SEQ ID NO: 10466 - DNA, 287 bp, Homo sapiens
aaagaagagattttaccatttatctttgcagctattgttcctgatatagatgaaattgcagctcaggcagaaactatgtttgcgggaaggtatagtaacatttatatatctttatcttacttgtgaataacattttacttagaattctattgatactttgatattgttcactctatatctatttatttttagaccctctattgttgctaacataatttctgccagaaatgaagctgctaatttactctggaggagaaagcatagcttttctttaggtcaggtaaaaa

SEQ ID NO: 10467 - DNA, 1364 bp, Homo sapiens
gcggccgcacgcgcccgctcccccgccggggtcccccgccgcccctccagcgccgcccagcgtcgcgtccccgcgcgggccggtgcggcggcagcagaggcttcccgggtggcccggcctcccgagggtcgccccgccccggcccagctccgcccccggccgctgctccctgattggccgcccccccacctctccagggctcctctcctcctcctcgcccaatgggcaccggcacctggtccaaaaattcccctgaggggaccgagggggctcggccacttccagctcccgccggcggctgtgacggccgcagcgggtcgcagagcagggagtggacacgagagtggggagcggagagggaaggaggaggaggaggagcaaaggtgttggagagaaaacttcagaaaggaacaggaaacctgccggggagcgcggcggcggctgcggcttctctgggcgcctgggctgcgctcttcgcggggtgtcccgagctggcgcttggccccggtctggcttccccggcgcgcaccacggctgagcgcgacgctcagtggctcgggccgtgcctccgccgtggctcttggccgctgtagtcccgcgatccgatccgcttctgccgcggcggctccctggagagagggcggcgagggcgcagggaagaagagggacgtccactgtggaacatgaagcagcatgaagcagcatgactgagaaaatgtccagcttcctctacataggggacatcgtgtccctgtacgcggagggctcggtcaacggcttcatcagcaccttggggttagtggatgacagatgtgtggtgcacccagaggccggggaccttgccaaccctcccaagaagttcagagactgccttttcaaggtgtgccctatgaacagatattctgcccagaagcaatattggaaagcaaagcaagccaaacaagggaaccacaccgaggcagccttgctgaagaaactacagcacgctgcagaactggaacaaaaacaaaatgaatcggagaataagaaactgttgggagaaattgtaaaatacagtaatgttatacaactactgcatataaaaagcaacaaatatcttactgtcaacaagagattacctgctttactggagaagaatgccatgcgtgtgtccttggatgctgcaggaaatgaagggtcttggttttatattcatccattctggaaactgagaagcgagggtgacaatgatgcaagcttctggatttaatttggttaataaattatctggtgatatcttcctttggtaaggtttggtagaagcatggcatgcaggaatgtgatgcactttaagtcttgtgttggttggatttcttaaaaaaaaa

SEQ ID NO: 10468 - DNA, 12183 bp, Homo sapiens
gcggccgcacgcgcccgctcccccgccggggtcccccgccgcccctccagcgccgcccagcgtcgcgtccccgcgcgggccggtgcggcggcagcagaggcttcccgggtggcccggcctcccgagggtcgccccgccccggcccagctccgcccccggccgctgctccctgattggccgcccccccacctctccagggctcctctcctcctcctcgcccaatgggcaccggcacctggtccaaaaattcccctgaggggaccgagggggctcggccacttccagctcccgccggcggctgtgacggccgcagcgggtcgcagagcagggagtggacacgagagtggggagcggagagggaaggaggaggaggaggagcaaaggtgttggagagaaaacttcagaaaggaacaggaaacctgccggggagcgcggcggcggctgcggcttctctgggcgcctgggctgcgctcttcgcggggtgtcccgagctggcgcttggccccggtctggcttccccggcgcgcaccacggctgagcgcgacgctcagtggctcgggccgtgcctccgccgtggctcttggccgctgtagtcccgcgatccgatccgcttctgccgcggcggctccctggagagagggcggcgagggcgcagggaagaagagggacgtccactgtggaacatgaagcagcatgaagcagcatgactgagaaaatgtccagcttcctctacataggggacatcgtgtccctgtacgcggagggctcggtcaacggcttcatcagcaccttggggttagtggatgacagatgtgtggtgcacccagaggccggggaccttgccaaccctcccaagaagttcagagactgccttttcaaggtgtgccctatgaacagatattctgcccagaagcaatattggaaagcaaagcaagccaaacaagggaaccacaccgaggcagccttgctgaagaaactacagcacgctgcagaactggaacaaaaacaaaatgaatcggagaataagaaactgttgggagaaattgtaaaatacagtaatgttatacaactactgcatataaaaagcaacaaatatcttactgtcaacaagagattacctgctttactggagaagaatgccatgcgtgtgtccttggatgctgcaggaaatgaagggtcttggttttatattcatccattctggaaactgagaagcgagggtgacaatattgttgtaggagataaagttgttttgatgcctgtgaatgcagggcagccactacatgccagcaacatagagcttcttgataacccagggtgtaaagaggtgaatgctgtcaattgcaacaccagctggaaaatcactttattcatgaaatatagttcctatcgagaggatgtattaaaaggaggggacgttgttagattatttcatgcggaacaagagaagtttttgacttgtgatgaatatgagaaaaaacagcacattttccttcgtacgaccttgcgccaatcagctacttctgctactagttctaaagcactctgggaaatagaggtggttcatcatgacccatgccgtgggggtgcaggacagtggaacagcttgttcagatttaagcatcttgcaactggaaactatttagctgcagagcttaatcctgattatcgagatgcccaaaatgaaggaaaaaatgtgagagatggagtccctccaacttcaaagaaaaaacgccaggcaggggagaagatcatgtatactttggtttcagtcccgcatggcaatgacattgcatccctttttgaactagatgccacaactcttcagagagctgactgcctggttccaaggaactcatatgttcggttaaggcatttatgcaccaacacatgggtaaccagtactagtatccccatagacacagatgaagagaggcctgttatgttaaagattggaacctgccaaaccaaagaagataaagaagcgttcgcaatcgtgtctgttccactgtctgaagttcgagacttagactttgccaatgatgccaataaagtactagcgaccacagttaaaaagctagaaaacggcacaataactcagaatgaaaggaggtttgtaaccaaattattggaagatctcatattctttgttgctgatgtgcctaataatggacaagaagttctggatgtggttatcactaagccaaaccgagagcgtcaaaaattgatgagggaacaaaacatactggcacaggtatttggaattcttaaagcaccctttaaagagaaagcaggagaaggctcgatgctgagacttgaagatctgggggatcaaagatatgcaccctacaagtacatgctgcggctctgttaccgcgtcctgagacactcgcagcaggattaccggaaaaatcaggaatatattgctaagaatttctgtgtcatgcagtcccagattggctatgatattttggcagaagatactatcacagctttgttgcacaacaacagaaaactactagagaaacatatcacagcaaaagaaatagaaacatttgtcagtttactcaggagaaatcgggagccaaggtttttggattatttgtcagatctgtgtgtgtctaataccactgctatccctgtaactcaagaactcatctgtaaatttatgttgagtccaggcaatgcagacattctcattcaaactaaggtggtctcaatgcaagcagacaaccccatggagagctccatcctttcagatgacattgatgatgaagaagtttggctctattggattgacagcaacaaggaacctcatggcaaagctatcaggcaccttgctcaagaggcaaaagaaggcaccaaagctgacttagaagttcttacctattacaggtaccagctaaacctctttgcaaggatgtgcttggatcgccagtatctggccataaaccagatttctacacagctgtctgtagacctgatcctgcggtgtgtgtcggatgagagcctgccgttcgacctccgagcgtccttctgtcgcctcatgctccacatgcacgttgaccgggatccccaggagtccgtggtgcctgttcgctatgccaggctctggacagaaatccccacaaagatcacaattcatgaatatgattctataacagactcttccagaaatgatatgaagaggaaatttgccctgacaatggaatttgttgaagaatatttgaaagaagttgtaaaccagccctttccttttggggataaagaaaaaaataaactgacatttgaggtggtccacttggctcggaatcttatatactttggattttatagtttcagtgagttattaaggctaacaagaacacttctggctattttagacattgtacaggcccccatgtcatcatactttgaaagattaagcaaatttcaagatggaggaaacaatgtgatgagaaccattcatggggtgggagagatgatgacccagatggtactcagtagaggctccatcttccccatgagcgtgccggatgtgccacccagcatccacccgagcaagcaagggagccccaccgagcatgaggatgtgactgtgatggacaccaagctgaagatcattgagattttgcagtttatcctgagtgtcagactggattataggatctcatatatgctgtcaatatataagaaggagtttggagaggacaatgacaatgcggagacatctgccagtggatctccagacactttactaccatcagctattgttcctgatatagatgaaattgcagctcaggcagaaactatgtttgcgggaagaaaagaaaaaaatccagttcaacttgacgatgaaggaggcaggacgtttttacgggtcctcattcatctgatcatgcacgactacccgcctttgctgtctggagccctgcagctgttgtttaagcacttcagccagagggcagaggttttacaggcatttaagcaggtgcaattactggtgtctaatcaagacgtagataactacaagcaaatcaaggcagatctagaccagcttcgactgacagtagaaaagtctgagctatgggtggagaagagcagcaactatgagaatggagaaataggggaaagtcaagtgaaaggtggtgaagagccaattgaggaatcaaacattttaagtccagtgcaggatggaacaaagaaacctcagattgacagcaacaagagcaataactaccggattgtaaaggagattttgatcaggctaagtaaactctgtgtgcagaataaaaagtgtcggaatcaacatcaacgattactgaaaaatatgggggcgcattcggtggtgttggatcttctgcagataccctatgaaaagaatgatgaaaagatgaatgaagtaatgaatctagcccatacatttctgcagaatttctgtcgaggaaatccacagaatcaagttcttcttcataaacatctgaatttgtttttaactccaggtctccttgaagcagaaaccatgcggcacatcttcatgaacaattaccatctgtgcaacgaaattagcgagagagttgtacaacactttgtgcactgcattgagacacatggccgccacgtggagtacctgaggtttttgcaaacaattgtaaaagcagatggtaaatatgtgaagaaatgccaggatatggtaatgacagagttgataaatgggggtgaagacgtgctgatattttacaatgatagagcatcatttccaatccttctccatatgatgtgttcagagagagaccgaggggatgagagtggccccttagcctaccacatcaccctggtggagttgctggcagcatgcacagaggggaaaaatgtctacactgaaatcaagtgtaattcccttctcccgctggacgacatagtgagggtggtgacccatgacgactgcatccctgaggttaaaattgcttatgtgaactttgttaatcactgttatgttgacactgaagtggaaatgaaagaaatctatacaagtaaccacatttggaaattatttgagaacttcttggtggatatggcaagggtttgcaacacaactacagacaggaaacatgcagacatctttttggaaaagtgtgttactgagtcaataatgaatattgtgagcggcttctttaattctcccttttcagacaatagtaccagcctccagacacatcagccagtttttattcagctactgcaatctgccttcagaatttacaattgcacctggccaaacccagcgcagaaagcctcagtggaatcctgtatcagaactttggctgaagtggcaaaaaatcgtggaattgccattccagtggatttggacagccaagttaatactcttttcatgaagagccattcaaatatggtgcagagagcagcaatgggttggagactatcagctcgctctgggccacgctttaaggaagctcttggagggcctgcttgggattacagaaatattattgaaaagttacaggatgtagtggcctccttggagcaccagttcagcccaatgatgcaggctgaattctcagtgttggttgatgtattgtacagtccagaactgctgttccctgagggaagcgatgcaagaataagatgtggcgctttcatgtcgaagttgattaatcatacaaagaaactaatggagaaagaagaaaaactgtgcattaaaattcttcagacattacgagaaatgttagagaagaaagacagctttgtggaagagggtaacacattaagaaagatacttctgaatcgatactttaaaggtgattatagtattggtgtgaatggacacctatcaggagcctactccaaaactgcacaggtgggaggaagcttttctggacaagattcagataagatggggatatcaatgtcagacattcagtgtctgctggataaagaaggtgcatcagaacttgtcatcgatgttatagtgaacaccaaaaatgacagaattttttcagaaggcattttcctcggcattgccttgcttgaaggaggaaatacacaaacacagtattctttctaccagcagttgcatgaacaaaaaaagtcagaaaaattctttaaagttctctatgatcgaatgaaggctgctcagaaagaaataagatcaacagtgacagttaataccatagatttaggtaacaaaaaaagggacgatgacaatgaattgatgacatctggtccacgaatgagagtaagagattcaacactacatttaaaagagggaatgaaagggcaattaacagaagcttcttcagcaacatccaaagcatattgtgtatacagaagagaaatggatccagaaatagacattatgtgcacaggaccagaagcgggaaacactgaggaaaaatccgcagaggaagtaacaatgagtcccgcaattgccatcatgcagccaatactgagatttcttcagttactgtgtgagaatcacaaccgggaattgcagaacttcttgaggaatcaaaacaacaaaacaaattacaacctagtctgtgagacccttcagtttctggactgcatttgtggaagtacaaccggtggcctgggcctgttgggtctctacatcaatgagaagaatgtagcgctggtcaaccagaacctggagagcttgactgagtattgccagggcccttgccatgaaaatcagacctgtatcgctacacatgagtctaatgggattgatatcatcattgctttgattctgaatgacataaaccctcttggtaaataccgaatggacctggtgctccagctaaagaacaatgcatctaaacttttgctggccattatggaaagcagacatgacagtgagaatgcagaaagaattctttttaacatgagacccagagaactggtggatgtgatgaagaatgcctataaccaaggattggaatgtgaccatggggatgatgagggtggagatgatggtgtttctccaaaagatgttggacacaatatctatattctggcccatcagttggcccgccacaataaactgttgcagcagatgctcaaaccaggatcggatccagatgaaggagatgaagccttaaagtattatgccaaccacactgcacagattgagattgtccggcatgataggaccatggaacaaatagtttttcctgtccccaatatatgtgaatacctcactcgagaatccaagtgccgtgtgttcaatacaactgaaagggatgaacaaggaagtaaagtgaatgactttttccagcaaacagaagatctctacaatgaaatgaagtggcagaagaaaatcaggaataaccctgcactgttctggttctcgaggcacatctctctctgggggagcatttccttcaacctggctgtgttcatcaatttagctgttgctctcttctacccatttggggatgatggagatgaaggtacactttctccattgttctcggttcttctttggatagcagttgcgatctgcacatctatgctgtttttcttctccaagcctgtgggtattcggccgtttcttgtatcaataatgctcagatcaatatatacaataggtcttgggcctacattaatacttcttggtgcagctaatctttgtaataaaattgtttttctggtgagttttgttggaaatcgtggcacgttcacccgtgggtaccgagcagtcatcctggatatggcctttctctatcacgtggcgtatgtcctggtttgcatgctgggcctttttgtccatgaattcttctatagcttcctgctttttgatttggtgtacagggaagagactttgctgaatgtcataaaaagtgtcacacgaaatggccgctctattattctaactgcagtcctggctctcatcctcgtctacctgttttccattattgggttcctttttttgaaggatgacttcactatggaagttgataggctgaaaaaccgaactcctgttacaggcagtcatcaagtgcctactatgactttaactaccatgatggaagcatgtgccaaggagaactgttcacccacaattccagcttcaaatacagctgatgaagagtatgaagatggaattgaaaggacgtgtgacactctccttatgtgcattgtcaccgtgctgaaccagggcctcaggaatggcggtggtgtgggggatgtgctaagaaggccatcgaaagatgagcccttgtttgctgcccgagtggtttatgaccttcttttttatttcattgttatcattattgttctgaacttgatttttggtgttatcatcgatacttttgctgatctcagaagcgaaaaacagaaaaaagaagaaattctaaagacaacttgtttcatctgtggacttgagagagacaagtttgataataaaacggtttcatttgaggagcacattaagtcagaacacaatatgtggcattatttgtacttcatagtcctggtgaaagttaaagacccaacagaatacactggacctgaaagttatgtggctcaaatgattgtggagaagaatttggattggtttcctcggatgcgagccatgtccctcgttagcaatgaaggcgacagtgagcaaaatgaaattcggagccttcaggagaagttggaatcgaccatgagtctggtcaaacagctgtcgggtcagctggcggagctcaaggagcagatgacagaacaaaggaagaataagcagagactgggcttcctcggatcaaacacaccccatgtgaatcatcacatgccaccacactgataccatggggggaagccgtgactagcctttcatcagtgtcctgcctgatcactgaataaagaactgagatggaggggagtgaacagtgcctattgttgaaaagttaaaaacaaccaagtgccaagatgttgagtgggttagctccgagaacaatttataactgtgttttcatggttgcgaagacctaacctcaaatgcatctgctagaaagcgtacatcacacattcgcaatgcatcaggaagaaaaggcttgcccaaaaggctggagagggcagggagcggcaggatggaaggagacacggggcagggagaactctcttctgctaaatcgataggagtcagttttgtcttaaatgctgactacagccactgacatggttggctggaatttctttcttttaattgtggcatataggtttgtgacacaagaagtcatactttggtggctaagttttactaaggaaaataactgaaaagattaaaagtgagagctgaaaagagaaatgataatgcttccaaactgtagctgtcacagggcaatttctttatttataacatgaagcacaatggatttacagctctaggaacttagtactttggagcttttgcctctcacactgacaacataacaggatgtgattgccttctctgggattcagacaggctctgtcaatgtggagcacaaaaggagattttcatataacttgttaaaaacatgttctaagtcatgtataggctaagattttaagaagatctgggggaataaaaagccaacagtaagccccaggaaagggttttttgagaccatatgtatgctattaaaatatattgagattaatacatgaaaatgcttaaaagtgataggaattattgagaaacttatgatggtggcattgccttttataaacatggagtgaaagccatttgactcaacgtttgctgtgcttaaagaattgcttcaggacccgagcgtttttatgtatgctgttcctgcagttaggaaaaaaaaatccaagaaatgtattgaatactcaagaaaatgccacatttcaattacatatttaaaactgtatctgtaagggcttttcaaaatgtagcaagataaaaatctcttattcaaattgtttttgtattaaatcatgcactcagaatttgtcgagggagagaataacctggtgtgttcaggttattcttagagactacacatttggaatagcagagcaaaatatggataatgaaagtgttgggaaaaaagtgatgtgacagggagtgaagacacttgataccagactctgggagatactctgcaagttgacctggcctctcccccacaggaacaaaacactgcctccagagtctttaaattctcagttatcaacgccaaggtttaaggtctagatagggtttgctatagggtttgctctgacaatttttaaagcttttggattgttctaacatagcttaagctattggttcctaaaaatcccaaatcaagatctatgtagaatataaaggaagcctgaaccaatccttccacatactgttaagatgtagacttggaacaaagctgttgggacccagagcaatgaatttttgaactgaagctactggtactccccagcaccacctcatactaagaattcctcactctgacatgacagtattttttctgaccaggagctgaaagaccctgacattcatgatccaaagatataagaaattttgatatgtctgcatgcagcacagaactttgaacctaggaggcagtcaataaatacatgagaaattcagctgtcattcagttactcttaattctttataaaactttaaatgataccacatatttgtttgtttaaaatggctttcccaaaatcaaagtagactaaagcagccatctttaaaatccaggatcatcaatgctattaacagtatcaggtaaaaagtacactttaaaatattttaatcaggcagagttttatggatagagaatagaagagaaaggtagtaaatattgaacatattccaatataggaacctatctctgttttagtacaaaatatttctgacatctgaactagaggtcaagagaataaattcatttgtatacatctgagcaacctgtctttcagatgataaagtatctagccttttctgacaccataatagttcattttgtagggaataagccattaggtgtatataattgctttctagaaatgacctaatgtccccaaccactttgtagtggcagatcactgtttcacagcatattttctcccaaggaaagtattcaaaagagactgcaactaacaagactcttatttcatcaaaatttaaatatttctgagttgtatttttaatgcctctttcttttctgcctaaatgcttagaaattataaagcaaaaaaaaaaaaaaaacagcaacaaaaaatcgaagcagacaaaaaaggcacttttcagaacatcaaattcctaatgaagaagaggagaagataatggggaaatttgacatttgatataaatttatatttgttatgtgtatgtttgttaatgcaactggaatatttgacttaggtgagtatcagttaacatccttgtatttatatagtgacatcaaaataaatgcaatcatcttgaactttgatgttaagggagattttgaaaaaatatttagttatttcaaattcatattggttcaaaagtatcagtttctgctgaataatatttttaatttcaaaagggttttgttccctctgtgctccattctgaggctcaagagcttaatgcaagtatgttttctgagttaaaataacacttttagatgagaaaatgcttgtatcatacagggctataatataaataaataaattgtatgtatgcaaaaaaaaaaaaaaaaaaaaaaaaaaaaaaaaaaaaaaaaaaaaaaaaaaaaaaaaaaaaaaaaaaaaaaaacaaaaaggaggaagcgacccaaacaacaaataacaacaacacacaacgagcggcgcaccagaaactcaaacgtccccagcaccacacgacacccccgacaccccaagccgcccccgccaccaacagtgcgccgcactcgctacccacaaccgcaaccgcgcccgcagcgcacaccctacaagacccacccctacgcccaacctccgacgacccacgcgccccttctggacgatagctcccacactacccctacgccaccccccaacaagccagaccactcactcacacgtcccttcgcatcactccactccctcctcctatcccatcacaatcacttatccgtgcattcacccacacacatcgccccgcgcacactgtttcctcccgctcttgccccccaaaacactatccctgcacctcac

SEQ ID NO: 10469 - DNA, 12973 bp, Homo sapiens
gcggccgcacgcgcccgctcccccgccggggtcccccgccgcccctccagcgccgcccagcgtcgcgtccccgcgcgggccggtgcggcggcagcagaggcttcccgggtggcccggcctcccgagggtcgccccgccccggcccagctccgcccccggccgctgctccctgattggccgcccccccacctctccagggctcctctcctcctcctcgcccaatgggcaccggcacctggtccaaaaattcccctgaggggaccgagggggctcggccacttccagctcccgccggcggctgtgacggccgcagcgggtcgcagagcagggagtggacacgagagtggggagcggagagggaaggaggaggaggaggagcaaaggtgttggagagaaaacttcagaaaggaacaggaaacctgccggggagcgcggcggcggctgcggcttctctgggcgcctgggctgcgctcttcgcggggtgtcccgagctggcgcttggccccggtctggcttccccggcgcgcaccacggctgagcgcgacgctcagtggctcgggccgtgcctccgccgtggctcttggccgctgtagtcccgcgatccgatccgcttctgccgcggcggctccctggagagagggcggcgagggcgcagggaagaagagggacgtccactgtggaacatgaagcagcatgaagcagcatgactgagaaaatgtccagcttcctctacataggggacatcgtgtccctgtacgcggagggctcggtcaacggcttcatcagcaccttggggttagtggatgacagatgtgtggtgcacccagaggccggggaccttgccaaccctcccaagaagttcagagactgccttttcaaggtgtgccctatgaacagatattctgcccagaagcaatattggaaagcaaagcaagccaaacaagggaaccacaccgaggcagccttgctgaagaaactacagcacgctgcagaactggaacaaaaacaaaatgaatcggagaataagaaactgttgggagaaattgtaaaatacagtaatgttatacaactactgcatataaaaagcaacaaatatcttactgtcaacaagagattacctgctttactggagaagaatgccatgcgtgtgtccttggatgctgcaggaaatgaagggtcttggttttatattcatccattctggaaactgagaagcgagggtgacaatattgttgtaggagataaagttgttttgatgcctgtgaatgcagggcagccactacatgccagcaacatagagcttcttgataacccagggtgtaaagaggtgaatgctgtcaattgcaacaccagctggaaaatcactttattcatgaaatatagttcctatcgagaggatgtattaaaaggaggggacgttgttagattatttcatgcggaacaagagaagtttttgacttgtgatgaatatgagaaaaaacagcacattttccttcgtacgaccttgcgccaatcagctacttctgctactagttctaaagcactctgggaaatagaggtggttcatcatgacccatgccgtgggggtgcaggacagtggaacagcttgttcagatttaagcatcttgcaactggaaactatttagctgcagagcttaatcctgattatcgagatgcccaaaatgaaggaaaaaatgtgagagatggagtccctccaacttcaaagaaaaaacgccaggcaggggagaagatcatgtatactttggtttcagtcccgcatggcaatgacattgcatccctttttgaactagatgccacaactcttcagagagctgactgcctggttccaaggaactcatatgttcggttaaggcatttatgcaccaacacatgggtaaccagtactagtatccccatagacacagatgaagagaggcctgttatgttaaagattggaacctgccaaaccaaagaagataaagaagcgttcgcaatcgtgtctgttccactgtctgaagttcgagacttagactttgccaatgatgccaataaagtactagcgaccacagttaaaaagctagaaaacggcacaataactcagaatgaaaggaggtttgtaaccaaattattggaagatctcatattctttgttgctgatgtgcctaataatggacaagaagttctggatgtggttatcactaagccaaaccgagagcgtcaaaaattgatgagggaacaaaacatactggcacaggtatttggaattcttaaagcaccctttaaagagaaagcaggagaaggctcgatgctgagacttgaagatctgggggatcaaagatatgcaccctacaagtacatgctgcggctctgttaccgcgtcctgagacactcgcagcaggattaccggaaaaatcaggaatatattgctaagaatttctgtgtcatgcagtcccagattggctatgatattttggcagaagatactatcacagctttgttgcacaacaacagaaaactactagagaaacatatcacagcaaaagaaatagaaacatttgtcagtttactcaggagaaatcgggagccaaggtttttggattatttgtcagatctgtgtgtgtctaataccactgctatccctgtaactcaagaactcatctgtaaatttatgttgagtccaggcaatgcagacattctcattcaaactaaggtggtctcaatgcaagcagacaaccccatggagagctccatcctttcagatgacattgatgatgaagaagtttggctctattggattgacagcaacaaggaacctcatggcaaagctatcaggcaccttgctcaagaggcaaaagaaggcaccaaagctgacttagaagttcttacctattacaggtaccagctaaacctctttgcaaggatgtgcttggatcgccagtatctggccataaaccagatttctacacagctgtctgtagacctgatcctgcggtgtgtgtcggatgagagcctgccgttcgacctccgagcgtccttctgtcgcctcatgctccacatgcacgttgaccgggatccccaggagtccgtggtgcctgttcgctatgccaggctctggacagaaatccccacaaagatcacaattcatgaatatgattctataacagactcttccagaaatgatatgaagaggaaatttgccctgacaatggaatttgttgaagaatatttgaaagaagttgtaaaccagccctttccttttggggataaagaaaaaaataaactgacatttgaggtggtccacttggctcggaatcttatatactttggattttatagtttcagtgagttattaaggctaacaagaacacttctggctattttagacattgtacaggcccccatgtcatcatactttgaaagattaagcaaatttcaagatggaggaaacaatgtgatgagaaccattcatggggtgggagagatgatgacccagatggtactcagtagaggctccatcttccccatgagcgtgccggatgtgccacccagcatccacccgagcaagcaagggagccccaccgagcatgaggatgtgactgtgatggacaccaagctgaagatcattgagattttgcagtttatcctgagtgtcagactggattataggatctcatatatgctgtcaatatataagaaggagtttggagaggacaatgacaatgcggagacatctgccagtggatctccagacactttactaccatcagctattgttcctgatatagatgaaattgcagctcaggcagaaactatgtttgcgggaagaaaagaaaaaaatccagttcaacttgacgatgaaggaggcaggacgtttttacgggtcctcattcatctgatcatgcacgactacccgcctttgctgtctggagccctgcagctgttgtttaagcacttcagccagagggcagaggttttacaggcatttaagcaggtgcaattactggtgtctaatcaagacgtagataactacaagcaaatcaaggcagatctagaccagcttcgactgacagtagaaaagtctgagctatgggtggagaagagcagcaactatgagaatggagaaataggggaaagtcaagtgaaaggtggtgaagagccaattgaggaatcaaacattttaagtccagtgcaggatggaacaaagaaacctcagattgacagcaacaagagcaataactaccggattgtaaaggagattttgatcaggctaagtaaactctgtgtgcagaataaaaagtgtcggaatcaacatcaacgattactgaaaaatatgggggcgcattcggtggtgttggatcttctgcagataccctatgaaaagaatgatgaaaagatgaatgaagtaatgaatctagcccatacatttctgcagaatttctgtcgaggaaatccacagaatcaagttcttcttcataaacatctgaatttgtttttaactccaggtctccttgaagcagaaaccatgcggcacatcttcatgaacaattaccatctgtgcaacgaaattagcgagagagttgtacaacactttgtgcactgcattgagacacatggccgccacgtggagtacctgaggtttttgcaaacaattgtaaaagcagatggtaaatatgtgaagaaatgccaggatatggtaatgacagagttgataaatgggggtgaagacgtgctgatattttacaatgatagagcatcatttccaatccttctccatatgatgtgttcagagagagaccgaggggatgagagtggccccttagcctaccacatcaccctggtggagttgctggcagcatgcacagaggggaaaaatgtctacactgaaatcaagtgtaattcccttctcccgctggacgacatagtgagggtggtgacccatgacgactgcatccctgaggttaaaattgcttatgtgaactttgttaatcactgttatgttgacactgaagtggaaatgaaagaaatctatacaagtaaccacatttggaaattatttgagaacttcttggtggatatggcaagggtttgcaacacaactacagacaggaaacatgcagacatctttttggaaaagtgtgttactgagtcaataatgaatattgtgagcggcttctttaattctcccttttcagacaatagtaccagcctccagacacatcagccagtttttattcagctactgcaatctgccttcagaatttacaattgcacctggccaaacccagcgcagaaagcctcagtggaatcctgtatcagaactttggctgaagtggcaaaaaatcgtggaattgccattccagtggatttggacagccaagttaatactcttttcatgaagagccattcaaatatggtgcagagagcagcaatgggttggagactatcagctcgctctgggccacgctttaaggaagctcttggagggcctgcttgggattacagaaatattattgaaaagttacaggatgtagtggcctccttggagcaccagttcagcccaatgatgcaggctgaattctcagtgttggttgatgtattgtacagtccagaactgctgttccctgagggaagcgatgcaagaataagatgtggcgctttcatgtcgaagttgattaatcatacaaagaaactaatggagaaagaagaaaaactgtgcattaaaattcttcagacattacgagaaatgttagagaagaaagacagctttgtggaagagggtaacacattaagaaagatacttctgaatcgatactttaaaggtgattatagtattggtgtgaatggacacctatcaggagcctactccaaaactgcacaggtgggaggaagcttttctggacaagattcagataagatggggatatcaatgtcagacattcagtgtctgctggataaagaaggtgcatcagaacttgtcatcgatgttatagtgaacaccaaaaatgacagaattttttcagaaggcattttcctcggcattgccttgcttgaaggaggaaatacacaaacacagtattctttctaccagcagttgcatgaacaaaaaaagtcagaaaaattctttaaagttctctatgatcgaatgaaggctgctcagaaagaaataagatcaacagtgacagttaataccatagatttaggtaacaaaaaaagggacgatgacaatgaattgatgacatctggtccacgaatgagagaattttggtcatggggtgaccctaaaacggctctgcaggactaaacttaaatgagacataatcagtgcaaagcaaccaacggcatgaaagatgtttgatttcattgtggcatgcatgtaagagattcaacactacatttaaaagagggaatgaaagggcaattaacagaagcttcttcagcaacatccaaagcatattgtgtatacagaagagaaatggatccagaaatagacattatgtgcacaggaccagaagcgggaaacactgaggaaaaatccgcagaggaagtaacaatgagtcccgcaattgccatcatgcagccaatactgagatttcttcagttactgtgtgagaatcacaaccgggaattgcagaacttcttgaggaatcaaaacaacaaaacaaattacaacctagtctgtgagacccttcagtttctggactgcatttgtggaagtacaaccggtggcctgggcctgttgggtctctacatcaatgagaagaatgtagcgctggtcaaccagaacctggagagcttgactgagtattgccagggcccttgccatgaaaatcagacctgtatcgctacacatgagtctaatgggattgatatcatcattgctttgattctgaatgacataaaccctcttggtaaataccgaatggacctggtgctccagctaaagaacaatgcatctaaacttttgctggccattatggaaagcagacatgacagtgagaatgcagaaagaattctttttaacatgagacccagagaactggtggatgtgatgaagaatgcctataaccaaggattggaatgtgaccatggggatgatgagggtggagatgatggtgtttctccaaaagatgttggacacaatatctatattctggcccatcagttggcccgccacaataaactgttgcagcagatgctcaaaccaggatcggatccagatgaaggagatgaagccttaaagtattatgccaaccacactgcacagattgagattgtccggcatgataggaccatggaacaaatagtttttcctgtccccaatatatgtgaatacctcactcgagaatccaagtgccgtgtgttcaatacaactgaaagggatgaacaaggaagtaaagtgaatgactttttccagcaaacagaagatctctacaatgaaatgaagtggcagaagaaaatcaggaataaccctgcactgttctggttctcgaggcacatctctctctgggggagcatttccttcaacctggctgtgttcatcaatttagctgttgctctcttctacccatttggggatgatggagatgaaggtacactttctccattgttctcggttcttctttggatagcagttgcgatctgcacatctatgctgtttttcttctccaagcctgtgggtattcggccgtttcttgtatcaataatgctcagatcaatatatacaataggtcttgggcctacattaatacttcttggtgcagctaatctttgtaataaaattgtttttctggtgagttttgttggaaatcgtggcacgttcacccgtgggtaccgagcagtcatcctggatatggcctttctctatcacgtggcgtatgtcctggtttgcatgctgggcctttttgtccatgaattcttctatagcttcctgctttttgatttggtgtacagggaagagactttgctgaatgtcataaaaagtgtcacacgaaatggccgctctattattctaactgcagtcctggctctcatcctcgtctacctgttttccattattgggttcctttttttgaaggatgacttcactatggaagttgataggctgaaaaaccgaactcctgttacaggcagtcatcaagtgcctactatgactttaactaccatgatggaagcatgtgccaaggagaactgttcacccacaattccagcttcaaatacagctgatgaagagtatgaagatggaattgaaaggacgtgtgacactctccttatgtgcattgtcaccgtgctgaaccagggcctcaggaatggcggtggtgtgggggatgtgctaagaaggccatcgaaagatgagcccttgtttgctgcccgagtggtttatgaccttcttttttatttcattgttatcattattgttctgaacttgatttttggtgttatcatcgatacttttgctgatctcagaagcgaaaaacagaaaaaagaagaaattctaaagacaacttgtttcatctgtggacttgagagagacaagtttgataataaaacggtttcatttgaggagcacattaagtcagaacacaatatgtggcattatttgtacttcatagtcctggtgaaagttaaagacccaacagaatacactggacctgaaagttatgtggctcaaatgattgtggagaagaatttggattggtttcctcggatgcgagccatgtccctcgttagcaatgaaggcgacagtgagcaaaatgaaattcggagccttcaggagaagttggaatcgaccatgagtctggtcaaacagctgtcgggtcagctggcggagctcaaggagcagatgacagaacaaaggaagaataagcagagactgggcttcctcggatcaaacacaccccatgtgaatcatcacatgccaccacactgataccatggggggaagccgtgactagcctttcatcagtgtcctgcctgatcactgaataaagaactgagatggaggggagtgaacagtgcctattgttgaaaagttaaaaacaaccaagtgccaagatgttgagtgggttagctccgagaacaatttataactgtgttttcatggttgcgaagacctaacctcaaatgcatctgctagaaagcgtacatcacacattcgcaatgcatcaggaagaaaaggcttgcccaaaaggctggagagggcagggagcggcaggatggaaggagacacggggcagggagaactctcttctgctaaatcgataggagtcagttttgtcttaaatgctgactacagccactgacatggttggctggaatttctttcttttaattgtggcatataggtttgtgacacaagaagtcatactttggtggctaagttttactaaggaaaataactgaaaagattaaaagtgagagctgaaaagagaaatgataatgcttccaaactgtagctgtcacagggcaatttctttatttataacatgaagcacaatggatttacagctctaggaacttagtactttggagcttttgcctctcacactgacaacataacaggatgtgattgccttctctgggattcagacaggctctgtcaatgtggagcacaaaaggagattttcatataacttgttaaaaacatgttctaagtcatgtataggctaagattttaagaagatctgggggaataaaaagccaacagtaagccccaggaaagggttttttgagaccatatgtatgctattaaaatatattgagattaatacatgaaaatgcttaaaagtgataggaattattgagaaacttatgatggtggcattgccttttataaacatggagtgaaagccatttgactcaacgtttgctgtgcttaaagaattgcttcaggacccgagcgtttttatgtatgctgttcctgcagttaggaaaaaaaaatccaagaaatgtattgaatactcaagaaaatgccacatttcaattacatatttaaaactgtatctgtaagggcttttcaaaatgtagcaagataaaaatctcttattcaaattgtttttgtattaaatcatgcactcagaatttgtcgagggagagaataacctggtgtgttcaggttattcttagagactacacatttggaatagcagagcaaaatatggataatgaaagtgttgggaaaaaagtgatgtgacagggagtgaagacacttgataccagactctgggagatactctgcaagttgacctggcctctcccccacaggaacaaaacactgcctccagagtctttaaattctcagttatcaacgccaaggtttaaggtctagatagggtttgctatagggtttgctctgacaatttttaaagcttttggattgttctaacatagcttaagctattggttcctaaaaatcccaaatcaagatctatgtagaatataaaggaagcctgaaccaatccttccacatactgttaagatgtagacttggaacaaagctgttgggacccagagcaatgaatttttgaactgaagctactggtactccccagcaccacctcatactaagaattcctcactctgacatgacagtattttttctgaccaggagctgaaagaccctgacattcatgatccaaagatataagaaattttgatatgtctgcatgcagcacagaactttgaacctaggaggcagtcaataaatacatgagaaattcagctgtcattcagttactcttaattctttataaaactttaaatgataccacatatttgtttgtttaaaatggctttcccaaaatcaaagtagactaaagcagccatctttaaaatccaggatcatcaatgctattaacagtatcaggtaaaaagtacactttaaaatattttaatcaggcagagttttatggatagagaatagaagagaaaggtagtaaatattgaacatattccaatataggaacctatctctgttttagtacaaaatatttctgacatctgaactagaggtcaagagaataaattcatttgtatacatctgagcaacctgtctttcagatgataaagtatctagccttttctgacaccataatagttcattttgtagggaataagccattaggtgtatataattgctttctagaaatgacctaatgtccccaaccactttgtagtggcagatcactgtttcacagcatattttctcccaaggaaagtattcaaaagagactgcaactaacaagactcttatttcatcaaaatttaaatatttctgagttgtatttttaatgcctctttcttttctgcctaaatgcttagaaattataaagcaaaaaaaaaaaaaaaacagcaacaaaaaatcgaagcagacaaaaaaggcacttttcagaacatcaaattcctaatgaagaagaggagaagataatggggaaatttgacatttgatataaatttatatttgttatgtgtatgtttgttaatgcaactggaatatttgacttaggtgagtatcagttaacatccttgtatttatatagtgacatcaaaataaatgcaatcatcttgaactttgatgttaagggagattttgaaaaaatatttagttatttcaaattcatattggttcaaaagtatcagtttctgctgaataatatttttaatttcaaaagggttttgttccctctgtgctccattctgaggctcaagagcttaatgcaagtatgttttctgagttaaaataacacttttagatgagaaaatgcttgtatcatacagggctataatataaataaataaattgtatgtatgcaaaatttatcatattttctaccccttaaaaaattaagttagaaataagcttattttcttgcacatcaatatttttctgttggtaaagaggacacaatttctagtagattgttaataacatcaggaagatatttctttcgtcagaactaattgtgtgcttattcccatattctcagctcataactccctgttttggctgctctctttattttacaattgtttcattgcaaacagcaaggcagtatagcccacactcagccactagcccccagtccccaggactgagaatgagtggggaggctggggagttggtgagagaaggtggagatagggatttctgcttcccagtactctatcattagagaaaaggaggggtaaatattagctaagaagaagaaaaaagcttattcttcagggacccagtagattggacgtaagcaagtaaatattgcacaggcatcatgatgtaatagttgatggaccccagagatacccctcacccatgcagagaacaaagctgtgtggaagagcaactaccataagatggtgtgttccttccagcggctgttaaagccatcctgaataacaaatcagctattcctacctacagacccattccaatatgctgtgatacacgacacggtgcaccgcagaggagacagacatcttcagcacaaacacagatgcctgcaggagcttggcaagtcactaaattgcatgaaattgtgaggtgcacaccaaatgcagggatgggggaggccgtgggaagctctgtattctcaaaatttgacagctaattccggtttttagaaaatgcctgaggccagtagaggccctctagtcactcactgctgctgtttctgatataattattgagaaagctatctcacttaatagaagaaaacacgcactatcaaaaccagatagcctaacgtgcatgtgaaaatcgagaaagctgaaaacaaatccaggtacccttctctgaactggagtgtttccacagacttgaataatttatgaaattatcacaccagtatttctcatatcaccaagaagactttctctcctgcagtagaggattgttatatttgcctaaaaaacacgattccaatatatgacaagggcagataatttataagtgaatgttaataaaattggatgtgtataa

SEQ ID NO: 10470 - DNA, 12919 bp, Homo sapiens
gcggccgcacgcgcccgctcccccgccggggtcccccgccgcccctccagcgccgcccagcgtcgcgtccccgcgcgggccggtgcggcggcagcagaggcttcccgggtggcccggcctcccgagggtcgccccgccccggcccagctccgcccccggccgctgctccctgattggccgcccccccacctctccagggctcctctcctcctcctcgcccaatgggcaccggcacctggtccaaaaattcccctgaggggaccgagggggctcggccacttccagctcccgccggcggctgtgacggccgcagcgggtcgcagagcagggagtggacacgagagtggggagcggagagggaaggaggaggaggaggagcaaaggtgttggagagaaaacttcagaaaggaacaggaaacctgccggggagcgcggcggcggctgcggcttctctgggcgcctgggctgcgctcttcgcggggtgtcccgagctggcgcttggccccggtctggcttccccggcgcgcaccacggctgagcgcgacgctcagtggctcgggccgtgcctccgccgtggctcttggccgctgtagtcccgcgatccgatccgcttctgccgcggcggctccctggagagagggcggcgagggcgcagggaagaagagggacgtccactgtggaacatgaagcagcatgaagcagcatgactgagaaaatgtccagcttcctctacataggggacatcgtgtccctgtacgcggagggctcggtcaacggcttcatcagcaccttggggttagtggatgacagatgtgtggtgcacccagaggccggggaccttgccaaccctcccaagaagttcagagactgccttttcaaggtgtgccctatgaacagatattctgcccagaagcaatattggaaagcaaagcaagccaaacaagggaaccacaccgaggcagccttgctgaagaaactacagcacgctgcagaactggaacaaaaacaaaatgaatcggagaataagaaactgttgggagaaattgtaaaatacagtaatgttatacaactactgcatataaaaagcaacaaatatcttactgtcaacaagagattacctgctttactggagaagaatgccatgcgtgtgtccttggatgctgcaggaaatgaagggtcttggttttatattcatccattctggaaactgagaagcgagggtgacaatattgttgtaggagataaagttgttttgatgcctgtgaatgcagggcagccactacatgccagcaacatagagcttcttgataacccagggtgtaaagaggtgaatgctgtcaattgcaacaccagctggaaaatcactttattcatgaaatatagttcctatcgagaggatgtattaaaaggaggggacgttgttagattatttcatgcggaacaagagaagtttttgacttgtgatgaatatgagaaaaaacagcacattttccttcgtacgaccttgcgccaatcagctacttctgctactagttctaaagcactctgggaaatagaggtggttcatcatgacccatgccgtgggggtgcaggacagtggaacagcttgttcagatttaagcatcttgcaactggaaactatttagctgcagagcttaatcctgattatcgagatgcccaaaatgaaggaaaaaatgtgagagatggagtccctccaacttcaaagaaaaaacgccaggcaggggagaagatcatgtatactttggtttcagtcccgcatggcaatgacattgcatccctttttgaactagatgccacaactcttcagagagctgactgcctggttccaaggaactcatatgttcggttaaggcatttatgcaccaacacatgggtaaccagtactagtatccccatagacacagatgaagagaggcctgttatgttaaagattggaacctgccaaaccaaagaagataaagaagcgttcgcaatcgtgtctgttccactgtctgaagttcgagacttagactttgccaatgatgccaataaagtactagcgaccacagttaaaaagctagaaaacggcacaataactcagaatgaaaggaggtttgtaaccaaattattggaagatctcatattctttgttgctgatgtgcctaataatggacaagaagttctggatgtggttatcactaagccaaaccgagagcgtcaaaaattgatgagggaacaaaacatactggcacaggtatttggaattcttaaagcaccctttaaagagaaagcaggagaaggctcgatgctgagacttgaagatctgggggatcaaagatatgcaccctacaagtacatgctgcggctctgttaccgcgtcctgagacactcgcagcaggattaccggaaaaatcaggaatatattgctaagaatttctgtgtcatgcagtcccagattggctatgatattttggcagaagatactatcacagctttgttgcacaacaacagaaaactactagagaaacatatcacagcaaaagaaatagaaacatttgtcagtttactcaggagaaatcgggagccaaggtttttggattatttgtcagatctgtgtgtgtctaataccactgctatccctgtaactcaagaactcatctgtaaatttatgttgagtccaggcaatgcagacattctcattcaaactaaggtggtctcaatgcaagcagacaaccccatggagagctccatcctttcagatgacattgatgatgaagaagtttggctctattggattgacagcaacaaggaacctcatggcaaagctatcaggcaccttgctcaagaggcaaaagaaggcaccaaagctgacttagaagttcttacctattacaggtaccagctaaacctctttgcaaggatgtgcttggatcgccagtatctggccataaaccagatttctacacagctgtctgtagacctgatcctgcggtgtgtgtcggatgagagcctgccgttcgacctccgagcgtccttctgtcgcctcatgctccacatgcacgttgaccgggatccccaggagtccgtggtgcctgttcgctatgccaggctctggacagaaatccccacaaagatcacaattcatgaatatgattctataacagactcttccagaaatgatatgaagaggaaatttgccctgacaatggaatttgttgaagaatatttgaaagaagttgtaaaccagccctttccttttggggataaagaaaaaaataaactgacatttgaggtggtccacttggctcggaatcttatatactttggattttatagtttcagtgagttattaaggctaacaagaacacttctggctattttagacattgtacaggcccccatgtcatcatactttgaaagattaagcaaatttcaagatggaggaaacaatgtgatgagaaccattcatggggtgggagagatgatgacccagatggtactcagtagaggctccatcttccccatgagcgtgccggatgtgccacccagcatccacccgagcaagcaagggagccccaccgagcatgaggatgtgactgtgatggacaccaagctgaagatcattgagattttgcagtttatcctgagtgtcagactggattataggatctcatatatgctgtcaatatataagaaggagtttggagaggacaatgacaatgcggagacatctgccagtggatctccagacactttactaccatcagctattgttcctgatatagatgaaattgcagctcaggcagaaactatgtttgcgggaagaaaagaaaaaaatccagttcaacttgacgatgaaggaggcaggacgtttttacgggtcctcattcatctgatcatgcacgactacccgcctttgctgtctggagccctgcagctgttgtttaagcacttcagccagagggcagaggttttacaggcatttaagcaggtgcaattactggtgtctaatcaagacgtagataactacaagcaaatcaaggcagatctagaccagcttcgactgacagtagaaaagtctgagctatgggtggagaagagcagcaactatgagaatggagaaataggggaaagtcaagtgaaaggtggtgaagagccaattgaggaatcaaacattttaagtccagtgcaggatggaacaaagaaacctcagattgacagcaacaagagcaataactaccggattgtaaaggagattttgatcaggctaagtaaactctgtgtgcagaataaaaagtgtcggaatcaacatcaacgattactgaaaaatatgggggcgcattcggtggtgttggatcttctgcagataccctatgaaaagaatgatgaaaagatgaatgaagtaatgaatctagcccatacatttctgcagaatttctgtcgaggaaatccacagaatcaagttcttcttcataaacatctgaatttgtttttaactccaggtctccttgaagcagaaaccatgcggcacatcttcatgaacaattaccatctgtgcaacgaaattagcgagagagttgtacaacactttgtgcactgcattgagacacatggccgccacgtggagtacctgaggtttttgcaaacaattgtaaaagcagatggtaaatatgtgaagaaatgccaggatatggtaatgacagagttgataaatgggggtgaagacgtgctgatattttacaatgatagagcatcatttccaatccttctccatatgatgtgttcagagagagaccgaggggatgagagtggccccttagcctaccacatcaccctggtggagttgctggcagcatgcacagaggggaaaaatgtctacactgaaatcaagtgtaattcccttctcccgctggacgacatagtgagggtggtgacccatgacgactgcatccctgaggttaaaattgcttatgtgaactttgttaatcactgttatgttgacactgaagtggaaatgaaagaaatctatacaagtaaccacatttggaaattatttgagaacttcttggtggatatggcaagggtttgcaacacaactacagacaggaaacatgcagacatctttttggaaaagtgtgttactgagtcaataatgaatattgtgagcggcttctttaattctcccttttcagacaatagtaccagcctccagacacatcagccagtttttattcagctactgcaatctgccttcagaatttacaattgcacctggccaaacccagcgcagaaagcctcagtggaatcctgtatcagaactttggctgaagtggcaaaaaatcgtggaattgccattccagtggatttggacagccaagttaatactcttttcatgaagagccattcaaatatggtgcagagagcagcaatgggttggagactatcagctcgctctgggccacgctttaaggaagctcttggagggcctgcttgggattacagaaatattattgaaaagttacaggatgtagtggcctccttggagcaccagttcagcccaatgatgcaggctgaattctcagtgttggttgatgtattgtacagtccagaactgctgttccctgagggaagcgatgcaagaataagatgtggcgctttcatgtcgaagttgattaatcatacaaagaaactaatggagaaagaagaaaaactgtgcattaaaattcttcagacattacgagaaatgttagagaagaaagacagctttgtggaagagggtaacacattaagaaagatacttctgaatcgatactttaaaggtgattatagtattggtgtgaatggacacctatcaggagcctactccaaaactgcacaggtgggaggaagcttttctggacaagattcagataagatggggatatcaatgtcagacattcagtgtctgctggataaagaaggtgcatcagaacttgtcatcgatgttatagtgaacaccaaaaatgacagaattttttcagaaggcattttcctcggcattgccttgcttgaaggaggaaatacacaaacacagtattctttctaccagcagttgcatgaacaaaaaaagtcagaaaaattctttaaagttctctatgatcgaatgaaggctgctcagaaagaaataagatcaacagtgacagttaataccatagatttaggtaacaaaaaaagggacgatgacaatgaattgatgacatctggtccacgaatgagagaattttggtcatggggtgaccctaaaacggctctgcaggactaaacttaaatgagacataatcagtgcaaagcaaccaacggcatgaaagatgtttgatttcattgtggcatgcatgtaagagattcaacactacatttaaaagagggaatgaaagggcaattaacagaagcttcttcagcaacatccaaagcatattgtgtatacagaagagaaatggatccagaaatagacattatgtgcacaggaccagaagcgggaaacactgaggaaaaatccgcagaggaagtaacaatgagtcccgcaattgccatcatgcagccaatactgagatttcttcagttactgtgtgagaatcacaaccgggaattgcagaacttcttgaggaatcaaaacaacaaaacaaattacaacctagtctgtgagacccttcagtttctggactgcatttgtggaagtacaaccggtggcctgggcctgttgggtctctacatcaatgagaagaatgtagcgctggtcaaccagaacctggagagcttgactgagtattgccagggcccttgccatgaaaatcagacctgtatcgctacacatgagtctaatgggattgatatcatcattgctttgattctgaatgacataaaccctcttggtaaataccgaatggacctggtgctccagctaaagaacaatgcatctaaacttttgctggccattatggaaagcagacatgacagtgagaatgcagaaagaattctttttaacatgagacccagagaactggtggatgtgatgaagaatgcctataaccaaggattggaatgtgaccatggggatgatgagggtggagatgatggtgtttctccaaaagatgttggacacaatatctatattctggcccatcagttggcccgccacaataaactgttgcagcagatgctcaaaccaggatcggatccagatgaaggagatgaagccttaaagtattatgccaaccacactgcacagattgagattgtccggcatgataggaccatggaacaaatagtttttcctgtccccaatatatgtgaatacctcactcgagaatccaagtgccgtgtgttcaatacaactgaaagggatgaacaaggaagtaaagtgaatgactttttccagcaaacagaagatctctacaatgaaatgaagtggcagaagaaaatcaggaataaccctgcactgttctggttctcgaggcacatctctctctgggggagcatttccttcaacctggctgtgttcatcaatttagctgttgctctcttctacccatttggggatgatggagatgaaggtacactttctccattgttctcggttcttctttggatagcagttgcgatctgcacatctatgctgtttttcttctccaagcctgtgggtattcggccgtttcttgtatcaataatgctcagatcaatatatacaataggtcttgggcctacattaatacttcttggtgcagctaatctttgtaataaaattgtttttctggtgagttttgttggaaatcgtggcacgttcacccgtgggtaccgagcagtcatcctggatatggcctttctctatcacgtggcgtatgtcctggtttgcatgctgggcctttttgtccatgaattcttctatagcttcctgctttttgatttggtgtacagggaagagactttgctgaatgtcataaaaagtgtcacacgaaatggccgctctattattctaactgcagtcctggctctcatcctcgtctacctgttttccattattgggttcctttttttgaaggatgacttcactatggaagttgataggctgaaaaaccgaactcctgttacaggcagtcatcaagtgcctactatgactttaactaccatgatggaagcatgtgccaaggagaactgttcacccacaattccagcttcaaatacagctgatgaagagtatgaagatggaattgaaaggacgtgtgacactctccttatgtgcattgtcaccgtgctgaaccagggcctcaggaatggcggtggtgtgggggatgtgctaagaaggccatcgaaagatgagcccttgtttgctgcccgagtggtttatgaccttcttttttatttcattgttatcattattgttctgaacttgatttttggtgttatcatcgatacttttgctgatctcagaagcgaaaaacagaaaaaagaagaaattctaaagacaacttgtttcatctgtggacttgagagagacaagtttgataataaaacggtttcatttgaggagcacattaagtcagaacacaatatgtggcattatttgtacttcatagtcctggtgaaagttaaagacccaacagaatacactggacctgaaagttatgtggctcaaatgattgtggagaagaatttggattggtttcctcggatgcgagccatgtccctcgttagcaatgaaggcgacagtgagcaaaatgaaattcggagccttcaggagaagttggaatcgaccatgagtctggtcaaacagctgtcgggtcagctggcggagctcaaggagcagatgacagaacaaaggaagaataagcagagactgggcttcctcggatcaaacacaccccatgtgaatcatcacatgccaccacactgataccatggggggaagccgtgactagcctttcatcagtgtcctgcctgatcactgaataaagaactgagatggaggggagtgaacagtgcctattgttgaaaagttaaaaacaaccaagtgccaagatgttgagtgggttagctccgagaacaatttataactgtgttttcatggttgcgaagacctaacctcaaatgcatctgctagaaagcgtacatcacacattcgcaatgcatcaggaagaaaaggcttgcccaaaaggctggagagggcagggagcggcaggatggaaggagacacggggcagggagaactctcttctgctaaatcgataggagtcagttttgtcttaaatgctgactacagccactgacatggttggctggaatttctttcttttaattgtggcatataggtttgtgacacaagaagtcatactttggtggctaagttttactaaggaaaataactgaaaagattaaaagtgagagctgaaaagagaaatgataatgcttccaaactgtagctgtcacagggcaatttctttatttataacatgaagcacaatggatttacagctctaggaacttagtactttggagcttttgcctctcacactgacaacataacaggatgtgattgccttctctgggattcagacaggctctgtcaatgtggagcacaaaaggagattttcatataacttgttaaaaacatgttctaagtcatgtataggctaagattttaagaagatctgggggaataaaaagccaacagtaagccccaggaaagggttttttgagaccatatgtatgctattaaaatatattgagattaatacatgaaaatgcttaaaagtgataggaattattgagaaacttatgatggtggcattgccttttataaacatggagtgaaagccatttgactcaacgtttgctgtgcttaaagaattgcttcaggacccgagcgtttttatgtatgctgttcctgcagttaggaaaaaaaaatccaagaaatgtattgaatactcaagaaaatgccacatttcaattacatatttaaaactgtatctgtaagggcttttcaaaatgtagcaagataaaaatctcttattcaaattgtttttgtattaaatcatgcactcagaatttgtcgagggagagaataacctggtgtgttcaggttattcttagagactacacatttggaatagcagagcaaaatatggataatgaaagtgttgggaaaaaagtgatgtgacagggagtgaagacacttgataccagactctgggagatactctgcaagttgacctggcctctcccccacaggaacaaaacactgcctccagagtctttaaattctcagttatcaacgccaaggtttaaggtctagatagggtttgctatagggtttgctctgacaatttttaaagcttttggattgttctaacatagcttaagctattggttccttccacatactgttaagatgtagacttggaacaaagctgttgggacccagagcaatgaatttttgaactgaagctactggtactccccagcaccacctcatactaagaattcctcactctgacatgacagtattttttctgaccaggagctgaaagaccctgacattcatgatccaaagatataagaaattttgatatgtctgcatgcagcacagaactttgaacctaggaggcagtcaataaatacatgagaaattcagctgtcattcagttactcttaattctttataaaactttaaatgataccacatatttgtttgtttaaaatggctttcccaaaatcaaagtagactaaagcagccatctttaaaatccaggatcatcaatgctattaacagtatcaggtaaaaagtacactttaaaatattttaatcaggcagagttttatggatagagaatagaagagaaaggtagtaaatattgaacatattccaatataggaacctatctctgttttagtacaaaatatttctgacatctgaactagaggtcaagagaataaattcatttgtatacatctgagcaacctgtctttcagatgataaagtatctagccttttctgacaccataatagttcattttgtagggaataagccattaggtgtatataattgctttctagaaatgacctaatgtccccaaccactttgtagtggcagatcactgtttcacagcatattttctcccaaggaaagtattcaaaagagactgcaactaacaagactcttatttcatcaaaatttaaatatttctgagttgtatttttaatgcctctttcttttctgcctaaatgcttagaaattataaagcaaaaaaaaaaaaaaaacagcaacaaaaaatcgaagcagacaaaaaaggcacttttcagaacatcaaattcctaatgaagaagaggagaagataatggggaaatttgacatttgatataaatttatatttgttatgtgtatgtttgttaatgcaactggaatatttgacttaggtgagtatcagttaacatccttgtatttatatagtgacatcaaaataaatgcaatcatcttgaactttgatgttaagggagattttgaaaaaatatttagttatttcaaattcatattggttcaaaagtatcagtttctgctgaataatatttttaatttcaaaagggttttgttccctctgtgctccattctgaggctcaagagcttaatgcaagtatgttttctgagttaaaataacacttttagatgagaaaatgcttgtatcatacagggctataatataaataaataaattgtatgtatgcaaaatttatcatattttctaccccttaaaaaattaagttagaaataagcttattttcttgcacatcaatatttttctgttggtaaagaggacacaatttctagtagattgttaataacatcaggaagatatttctttcgtcagaactaattgtgtgcttattcccatattctcagctcataactccctgttttggctgctctctttattttacaattgtttcattgcaaacagcaaggcagtatagcccacactcagccactagcccccagtccccaggactgagaatgagtggggaggctggggagttggtgagagaaggtggagatagggatttctgcttcccagtactctatcattagagaaaaggaggggtaaatattagctaagaagaagaaaaaagcttattcttcagggacccagtagattggacgtaagcaagtaaatattgcacaggcatcatgatgtaatagttgatggaccccagagatacccctcacccatgcagagaacaaagctgtgtggaagagcaactaccataagatggtgtgttccttccagcggctgttaaagccatcctgaataacaaatcagctattcctacctacagacccattccaatatgctgtgatacacgacacggtgcaccgcagaggagacagacatcttcagcacaaacacagatgcctgcaggagcttggcaagtcactaaattgcatgaaattgtgaggtgcacaccaaatgcagggatgggggaggccgtgggaagctctgtattctcaaaatttgacagctaattccggtttttagaaaatgcctgaggccagtagaggccctctagtcactcactgctgctgtttctgatataattattgagaaagctatctcacttaatagaagaaaacacgcactatcaaaaccagatagcctaacgtgcatgtgaaaatcgagaaagctgaaaacaaatccaggtacccttctctgaactggagtgtttccacagacttgaataatttatgaaattatcacaccagtatttctcatatcaccaagaagactttctctcctgcagtagaggattgttatatttgcctaaaaaacacgattccaatatatgacaagggcagataatttataagtgaatgttaataaaattggatgtgtataa

SEQ ID NO: 10471 - DNA, 6191 bp, Homo sapiens
gcggccgcacgcgcccgctcccccgccggggtcccccgccgcccctccagcgccgcccagcgtcgcgtccccgcgcgggccggtgcggcggcagcagaggcttcccgggtggcccggcctcccgagggtcgccccgccccggcccagctccgcccccggccgctgctccctgattggccgcccccccacctctccagggctcctctcctcctcctcgcccaatgggcaccggcacctggtccaaaaattcccctgaggggaccgagggggctcggccacttccagctcccgccggcggctgtgacggccgcagcgggtcgcagagcagggagtggacacgagagtggggagcggagagggaaggaggaggaggaggagcaaaggtgttggagagaaaacttcagaaaggaacaggaaacctgccggggagcgcggcggcggctgcggcttctctgggcgcctgggctgcgctcttcgcggggtgtcccgagctggcgcttggccccggtctggcttccccggcgcgcaccacggctgagcgcgacgctcagtggctcgggccgtgcctccgccgtggctcttggccgctgtagtcccgcgatccgatccgcttctgccgcggcggctccctggagagagggcggcgagggcgcagggaagaagagggacgtccactgtggaacatgaagcagcatgaagcagcatgactgagaaaatgtccagcttcctctacataggggacatcgtgtccctgtacgcggagggctcggtcaacggcttcatcagcaccttggggttagtggatgacagatgtgtggtgcacccagaggccggggaccttgccaaccctcccaagaagttcagagactgccttttcaaggtgtgccctatgaacagatattctgcccagaagcaatattggaaagcaaagcaagccaaacaagggaaccacaccgaggcagccttgctgaagaaactacagcacgctgcagaactggaacaaaaacaaaatgaatcggagaataagaaactgttgggagaaattgtaaaatacagtaatgttatacaactactgcatataaaaagcaacaaatatcttactgtcaacaagagattacctgctttactggagaagaatgccatgcgtgtgtccttggatgctgcaggaaatgaagggtcttggttttatattcatccattctggaaactgagaagcgagggtgacaatattgttgtaggagataaagttgttttgatgcctgtgaatgcagggcagccactacatgccagcaacatagagcttcttgataacccagggtgtaaagaggtgaatgctgtcaattgcaacaccagctggaaaatcactttattcatgaaatatagttcctatcgagaggatgtattaaaaggaggggacgttgttagattatttcatgcggaacaagagaagtttttgacttgtgatgaatatgagaaaaaacagcacattttccttcgtacgaccttgcgccaatcagctacttctgctactagttctaaagcactctgggaaatagaggtggttcatcatgacccatgccgtgggggtgcaggacagtggaacagcttgttcagatttaagcatcttgcaactggaaactatttagctgcagagcttaatcctgattatcgagatgcccaaaatgaaggaaaaaatgtgagagatggagtccctccaacttcaaagaaaaaacgccaggcaggggagaagatcatgtatactttggtttcagtcccgcatggcaatgacattgcatccctttttgaactagatgccacaactcttcagagagctgactgcctggttccaaggaactcatatgttcggttaaggcatttatgcaccaacacatgggtaaccagtactagtatccccatagacacagatgaagagaggcctgttatgttaaagattggaacctgccaaaccaaagaagataaagaagcgttcgcaatcgtgtctgttccactgtctgaagttcgagacttagactttgccaatgatgccaataaagtactagcgaccacagttaaaaagctagaaaacggcacaataactcagaatgaaaggaggtttgtaaccaaattattggaagatctcatattctttgttgctgatgtgcctaataatggacaagaagttctggatgtggttatcactaagccaaaccgagagcgtcaaaaattgatgagggaacaaaacatactggcacaggtatttggaattcttaaagcaccctttaaagagaaagcaggagaaggctcgatgctgagacttgaagatctgggggatcaaagatatgcaccctacaagtacatgctgcggctctgttaccgcgtcctgagacactcgcagcaggattaccggaaaaatcaggaatatattgctaagaatttctgtgtcatgcagtcccagattggctatgatattttggcagaagatactatcacagctttgttgcacaacaacagaaaactactagagaaacatatcacagcaaaagaaatagaaacatttgtcagtttactcaggagaaatcgggagccaaggtttttggattatttgtcagatctgtgtgtgtctaataccactgctatccctgtaactcaagaactcatctgtaaatttatgttgagtccaggcaatgcagacattctcattcaaactaaggtggtctcaatgcaagcagacaaccccatggagagctccatcctttcagatgacattgatgatgaagaagtttggctctattggattgacagcaacaaggaacctcatggcaaagctatcaggcaccttgctcaagaggcaaaagaaggcaccaaagctgacttagaagttcttacctattacaggtaccagctaaacctctttgcaaggatgtgcttggatcgccagtatctggccataaaccagatttctacacagctgtctgtagacctgatcctgcggtgtgtgtcggatgagagcctgccgttcgacctccgagcgtccttctgtcgcctcatgctccacatgcacgttgaccgggatccccaggagtccgtggtgcctgttcgctatgccaggctctggacagaaatccccacaaagatcacaattcatgaatatgattctataacagactcttccagaaatgatatgaagaggaaatttgccctgacaatggaatttgttgaagaatatttgaaagaagttgtaaaccagccctttccttttggggataaagaaaaaaataaactgacatttgaggtggtccacttggctcggaatcttatatactttggattttatagtttcagtgagttattaaggctaacaagaacacttctggctattttagacattgtacaggcccccatgtcatcatactttgaaagattaagcaaatttcaagatggaggaaacaatgtgatgagaaccattcatggggtgggagagatgatgacccagatggtactcagtagaggctccatcttccccatgagcgtgccggatgtgccacccagcatccacccgagcaagcaagggagccccaccgagcatgaggatgtgactgtgatggacaccaagctgaagatcattgagattttgcagtttatcctgagtgtcagactggattataggatctcatatatgctgtcaatatataagaaggagtttggagaggacaatgacaatgcggagacatctgccagtggatctccagacactttactaccatcagctattgttcctgatatagatgaaattgcagctcaggcagaaactatgtttgcgggaagaaaagaaaaaaatccagttcaacttgacgatgaaggaggcaggacgtttttacgggtcctcattcatctgatcatgcacgactacccgcctttgctgtctggagccctgcagctgttgtttaagcacttcagccagagggcagaggttttacaggcatttaagcaggtgcaattactggtgtctaatcaagacgtagataactacaagcaaatcaaggcagatctagaccagcttcgactgacagtagaaaagtctgagctatgggtggagaagagcagcaactatgagaatggagaaataggggaaagtcaagtgaaaggtggtgaagagccaattgaggaatcaaacattttaagtccagtgcaggatggaacaaagaaacctcagattgacagcaacaagagcaataactaccggattgtaaaggagattttgatcaggctaagtaaactctgtgtgcagaataaaaagtgtcggaatcaacatcaacgattactgaaaaatatgggggcgcattcggtggtgttggatcttctgcagataccctatgaaaagaatgatgaaaagatgaatgaagtaatgaatctagcccatacatttctgcagaatttctgtcgaggaaatccacagaatcaagttcttcttcataaacatctgaatttgtttttaactccaggtctccttgaagcagaaaccatgcggcacatcttcatgaacaattaccatctgtgcaacgaaattagcgagagagttgtacaacactttgtgcactgcattgagacacatggccgccacgtggagtacctgaggtttttgcaaacaattgtaaaagcagatggtaaatatgtgaagaaatgccaggatatggtaatgacagagttgataaatgggggtgaagacgtgctgatattttacaatgatagagcatcatttccaatccttctccatatgatgtgttcagagagagaccgaggggatgagagtggccccttagcctaccacatcaccctggtggagttgctggcagcatgcacagaggggaaaaatgtctacactgaaatcaagtgtaattcccttctcccgctggacgacatagtgagggtggtgacccatgacgactgcatccctgaggttaaaattgcttatgtgaactttgttaatcactgttatgttgacactgaagtggaaatgaaagaaatctatacaagtaaccacatttggaaattatttgagaacttcttggtggatatggcaagggtttgcaacacaactacagacaggaaacatgcagacatctttttggaaaagtgtgttactgagtcaataatgaatattgtgagcggcttctttaattctcccttttcagacaatagtaccagcctccagacacatcagccagtttttattcagctactgcaatctgccttcagaatttacaattgcacctggccaaacccagcgcagaaagcctcagtggaatcctgtatcagaactttggctgaagtggcaaaaaatcgtggaattgccattccagtggatttggacagccaagttaatactcttttcatgaagagccattcaaatatggtgcagagagcagcaatgggttggagactatcagctcgctctgggccacgctttaaggaagctcttggagggcctgcttgggattacagaaatattattgaaaagttacaggatgtagtggcctccttggagcaccagttcagcccaatgatgcaggctgaattctcagtgttggttgatgtattgtacagtccagaactgctgttccctgagggaagcgatgcaagaataagatgtggcgctttcatgtcgaagttgattaatcatacaaagaaactaatggagaaagaagaaaaactgtgcattaaaattcttcagacattacgagaaatgttagagaagaaagacagctttgtggaagagggtaacacattaagaaagatacttctgaatcgatactttaaaggtgattatagtattggtgtgaatggacacctatcaggagcctactccaaaactgcacaggtgggaggaagcttttctggacaagattcagataagatggggatatcaatgtcagacattcagtgtctgctggataaagaaggtgcatcagaacttgtcatcgatgttatagtgaacaccaaaaatgacagaattttttcagaaggcattttcctcggcattgccttgcttgaaggaggaaatacacaaacacaggtacttgttcatcaatcatggggattacatttattattggtatttcttgtttacttgtcacagaaaccaaggaaaagtaatgtgtttcttttagctcttattactatctaaaaaaaaa

SEQ ID NO: 10472 - DNA, 480 bp, Homo sapiens
gcagggggctgttccttcctgtcgaggaggactttcaaaggtcttttgaagtggggtgtgggggaacttgccaacaggtattcatataatttgttatttctttaaagacaccttaattgaattactatggtcagatgggtaaactttccaaactttaaaagcactgacacagggaccttttaaaatgggtcatcttgatgagatctctgcccatctgttgataaccctaacagtggatgaaggctggggagggcaacaccctgcattcttatctgagcccttcagtgctattcagttccaaatgttttgatttgtttcaacaaagtctgtaatgttggagtgcccttagagcaattttcttcacaatcaaaatcacaatcctttaagtggttaataaatgtagttgccttccactcacttatgactctggacagtccccacccctgtcactcacaagggcagtcttcccaccccaccccc

SEQ ID NO: 10473 - DNA, 382 bp, Homo sapiens
gcagggggctgttccttcctgtcgaggaggactttcaaaggtcttttgaagtggggtgtgggggaacttgccaacaggtattcatataatttgttatttctttaaagacaccttaattgaattactatggtcagatgggtaaactttccaaactttaaaagcactgacacagggaccttttaaaatgggtcatcttgatgagatctctgcccatctgttgataaccctaacagtggatgaaggctggggagggcaacaccctgcattcttatctgagcccttcagtgctattcagttccaaatgttttgatttgctccaccatggctacaactgatccccacatcctgactaaacaccctcgctatctaatcagcacaaccc

SEQ ID NO: 10474 - DNA, 310 bp, Homo sapiens
ttaaaccatgaaatgccaggtctctcccacagaatttctgaggcccgggatgcagcctggtaattcatgtttcaaacaagttcccattcgatgctgagcctgagtgattactcagaagcactactctacaacgatcactaaaaaaaaggcaaaaacagaaaccataataatatcaacaagtataactaaaagccattagagaattataacgaaatgtcaaatttcaataatattattagccaaagaaagtggaaaagaggaacagaggaacaaaaaccaaaaaaagagaactagaaaaaaataaaacact

SEQ ID NO: 10475 - DNA, 350 bp, Homo sapiens
gaaacagctcaccagacaccaaatctgctagcacctttatcttggacttcccagccctcagaagtgtgagaaataaatttttgttgtttataagccttccagtctatggtaatttgttgtaacagcttaaactgttagagagttttcaagcttgaacacaggcatctttttatttgcaagctgttatatttgttcctataaaagcttaaacacagacatttatgaaaagcctatagctaacattattctcgatagtgaaagactgtatcaggaacaagataaggatgcccatcctgaccatggctattcaacattgtactgtaagttctaaccagaacaactaggcaaga

SEQ ID NO: 10476 - DNA, 735 bp, Homo sapiens
gaaatcaagtattatttccccaccaatattcatatccaaaaataactttaaatacacacacacacacacacacacacacttttagtgaactggttgaatgaaaataaatttatataattattttatataacaaatcagcataaaatggaaaatcaaactgcctctctagatataataaccttcactgactgtggaaatacatggatagctttttaaaatcttcagtgttggagtaacagtcccttacatcttttcagcctcttgagtacaagaagactatcataagagttagttccagattggtgcaagactggaatacacttgactgcttttattaaagccatgagggcataccaagtaattcacccagtatggtcttattgccacccttgaaaatccctgggcatggtccagtccacatagaatgaattcagaaaggtgtctcttgttggtctctagaactatcctcagaaataatagtaaaacagtggtcatgagtagcctcactaggctacttcatgtacattatcttgtttactctctatagcaaccatatgagatgtatataattattaaattgtacagatgggaaaattgaaattcagagagattaaatacaatgcttgctctgtgttacactgttagtaagagagcaatacatgaacccaagtttgatcctcaaaatcacacttttaattacttgatacataatgtcttccaatattgaatctagac

SEQ ID NO: 10477 - DNA, 279 bp, Homo sapiens
tatctgacagctgctagtttttccctcatgatctttctattaaaatagctctgtacttactatgttgagcccttcctttttttttgacagggtctcagactagagtacagtggtgtgatcatggctcactgccacctctgcttcctgggttcaagtgatgctcccatctcaacctcccaagatgctaggactacaggcacatgccaccatgcctggctaatttttttgtgttttttgtagagacagggtttcaccatggtgcccaggctagtctcaaac

SEQ ID NO: 10478 - DNA, 421 bp, Homo sapiens
aacattctatggataagggatcctgatatttttactttctttggagctgtttccttttaaaacatgctgggatacaccttgagaggagggctgaagtcagagatgaaggtgcaagtgcaaaatgcagcatcaaagacattggcagaatctgtgcttggtcacttaccttagcgctgagtccaaggcacattctgatttaaaaagtaggagaactagaactcctttggaggaaggagaaatagggaagaggtagggcctgtggtgagagcaatcagagcagcagtgcagacaaggaagccagaccaagggtgggggaagctcagtctggaatgtgctagtgaggtccccccatacatggcagtagatgccaacatgatggctgagaagaatatgaggaaaaacagtcagaaatgtgtaagag

SEQ ID NO: 10479 - DNA, 497 bp, Homo sapiens
tagaggctttgaatacttgcagatggaccggttggctagtgatgggagaaaagattttatattaattatttgattaaaaacctttatacagaaaaattgacttcttttgttgtacagctgatgaatttcagcacatgtatacatttgtgtatctaccaccataatcaggatatagtttttttgttgttgttgttgttttgagacggagtttcgctcttgttgcccaggctggagtgcagtggtgcagtctcagctcactgcaacctccgcctcctggattcaagcgattctcctgcctcagcttcccaagtagctgggattacaggcatgtgccaccatgcccggctaattttgtatttttagtagagatggggttttgccatgttggtcaggctggtctcgaaccgctgacctcaggtgatccactcacctcggcctcccaaagtgttgggattataggcatgagccactgcgcccggccaggttttttaatttcc

SEQ ID NO: 10480 - DNA, 1313 bp, Homo sapiens
  misc_feature (533)..(533): n is a, c, g, or t
tcctgcctcagcctctcaaagtggtgggataacaaaagttttttttttgctttttaaaaaattcaatgttagcaagagaatgataagtttgggagcttcatatgatgctttagaagtgtaaatttcctttctgataagcagctaagcaagctatatcaggaatgtagctttttggttgttttttgagatggtcttgcgttgttgcccaggctttgagtgcagtggcatgatcatggctcactgcagcctcaacctccctgactcaagcgatcctcccacctcagcctcccaggtagctgcgactacaggcacgcaccactccactcggctaattttttattttttatttttgtagagacagggtcttcctatgttgcccaggccagtctctgaactcctgggctcaagtgatccttctgccttggctcacacctataatcccagcctcccaagtagctgggactacaaggcacctactgctgcacttagctttatcttttaactcatattttaaatgtcttctacaaggcacngaaaaataagtagttgtgttcatttttaagtaaatagtagtaaacagtttcaaatgctgtttgagatgttaattaaggcacacacttagactagtccatttgatttgaaaattaggattttatttgtgctttttgttaattactggcttttaaaagatcagtagtggggcagaaactagactagtgggttgaagggtgaataggaaataagtaatacttattctttcaaggagcttgactgaaaaggagacagtggtagtttgaagatattgctgtttttaagataaaaatgatttcagcactttaaaaataaaaagttggaaatgatcaatgaatcaaggatcatcaagaaagaggcaagaggaagtaagattaagcacaaagagtatcaactgataggtggcatttcaaggaacttcaggtgttgaatatctaaagcaccaaatgcgtgtggacagcagtgaagataaagctggaaatgcgccggcagaccaacacatgatgagccctgtaggtggtggacaaagactatgagcaagccatttaggcaaacatctgaagaatttaaaaatcaaaggcaaacaaataggactgtttcattaagatcacttgcattctaacaggttatgatgaatggaaagctgatggttcctggttggaaaaaagataattttcaatttggacatgtcacatttgagatgcagttgacacacccaagatacataatatattgtctttcaaaattcagaaacctaataaaccatgatcttaataaccgcc

SEQ ID NO: 10481 - DNA, 340 bp, Homo sapiens
tatatatatatatatatgtgtatgtatgtatgtatgtgatggggtgcaggaaatactaccccagcagcttccaattgtgcttacaataatatagtctcccacttgtctgtatgctctataaacatctaaaccttatctctttgatacagttcagtgccaagtataatgctaggtacatagatgataaacatgtatttgttgaatgagtgaaccaataattgtcatttttttcaagtgctctgtagtaaatactcagtttacaggaaaagtatttcctaatagttcttcaacagatggcactgtttgttaaggaatctaaggataaaagaaatcatgtaat

SEQ ID NO: 10482 - DNA, 576 bp, Homo sapiens
agcttaaaggagggacgtttctcaatgtgaagtctttctctatttcaaatataagcacaaaaagtaatgatggaaaataatgcgaattggtgtgtccagggtcagctggccatcctgtacacaggcaggtggggacagacgagccaaggatgagaggtgacagggcccgtatctgaccccgtcactgcctgacttggtaatattttcagaatccaaagctttctctgtccctatttctgagcttgtaaagggtagctaatagcagttgtttgttgagttctgatgagaacaataaagatttgcagagaaaaccctgaaaagtgctctaagctcttggacataaccatcacagaaatgtgttttgttattttgctcaatgcagcaaaaaccctccatcctttgcttcctggtgtaaaaggttatatgtgatgctggagtgccaaagtacttggtgtatttcaacagtgcatcaagttatcaccacctctggtgctttggaagatgctgtgatttggaaagcactgtcgaaatgtaaaacattattgccacagtagtaaaaatatccgtgtccatctc

SEQ ID NO: 10483 - DNA, 301 bp, Homo sapiens
ggcggcatcaggtctccttcaacttctgttttacatggtctgtttgcagttgagtcagtcacctatttaaaccttatttcaaacaacgcaccagtcaataatataaaattcacacaataaccaacttggttgcccttcaagaaatacacagggaaaacaactggagtttttaaacgtaaagttcacttcctcattctttcactctctaaggaagcaggacaaattcttgccccagtacaaagtcctgaccttgatgaatgagattcattcccattaggtggcaggttccactcagcgcctc

SEQ ID NO: 10484 - DNA, 729 bp, Homo sapiens
ccaaagagccagacaaataacttaatgatttaaacatattgcttcccacataattcactgtattgacaggaaggttgtagttttgtcgatcataaacaccgttttgagattaatgctacatggtgttttaatttgggttccaccaaaagaagaccctgagacaaggatttgtttggttccaaatagttcatttaagaatgttgaagaagtaggaaagagacagggaagggacaaaagttaataagcgtgctttaataagtagtataccacactgggcaactggtcatcagtctcgctgaactccctctgctaggattacataggaggaatatggcctctgggattgtcccattgagggataagacatttactacctcttgcccttcactggttgaagtttctgggaataactcccaggctctcttgcttgtcctgctgccaagctgagtatgctccttcaggcagagaaagctctggcagagaggctcagatgctgagaaattgtctggagaactgttcatagaaactgcaggtgttctccacactggctgtgaatggaaatgggtgggacattgatagattcagctatgaatggtgaaatacattgtatattctcaaaacaggtgaatttttcctttgattttgattaaaattcccatatattggtagagcagtgtaagtacctaccctaaccatgccgctcccacgctggttcactttatttgcttt

SEQ ID NO: 10485 - DNA, 382 bp, Homo sapiens
gactttaacatgccactgacaacactagataggtcaagacagaaagtcaacaaagaaacaatagacttaaactataccctagaacaaatggacttaacagatatttatagaacattctacccaattctaccgtagaatatgcattctattctttagcacatgcaacattttccaagatagcccatataataggtcacaaaataagtctcaataaatttaagtaaatcaaaatcatatcaagtattctttcagaccactgtggaataatatctgaaattaactccaaaaggaaacctgaaaaccatgcaaatacatggaaattaaataagctgctcctgaataatcattgggtcagtaatgacatcaagatggaaatttaaaa

SEQ ID NO: 10486 - DNA, 866 bp, Homo sapiens
gccttacagtctgtttgaggagggaaagagagagaggagaaggagacaggcaggataggtcaggttctaggggctcccatggtttgtatcttaacaatctaccattttcttttcaggccagtgtccacatcctgctcacatttgggacatctgtgaggcagggtgcctcctttttgtccctccaagaggacagttgggggacttggcctctggccgcctcaagttgggtcagcacctgctgggcctcatcctggttcatcgtgcatcaatgggagcgcacctgggttctgctgacatgtgagagcttcttcaccgaggggttcagaaaagtgtgctcatggcctgtagatctggattcaaagggagatgagaaaaataggaactgagcccgtggcttgcctcacccacttcctgagcctgcgcaagggacaagactttcctgtgtggccttcttacggcagtccacagggaagtggcctcattttctgtgtctgtcctgcccagcgcccccactctcctgtgctggtcccaggccatcccttagccagagtgcagaactccagacccccaatattctctcatatcctcagaatcttcagcttccatccatggatgttggctgaatcctgagtggggtcgtagaaagatctggtcctgtgagtaggggggcgaggaggaaggcagggacttcagctgggctgtctacaacctgagtctaaaacacctaaagacaagcacaacttgcccccgctaggacgaatttcttgctccagaccgcctcactgcatctctagggccatgtgtattcctgctatttggccacattccttgagaaaaattgcctattaaaagaatttccttattca

SEQ ID NO: 10487 - DNA, 812 bp, Homo sapiens
gccttacagtctgtttgaggagggaaagagagagaggagaaggagacaggcaggataggtcaggttctaggggctcccatggtttgtatcttaacaatctaccattttcttttcaggccagtgtccacatcctgctcacatttgggacatctgtgaggcagggtgcctcctttttgtccctccaagaggacagttgggggacttggcctctggccgcctcaagttgggtcagcacctgctgggcctcatcctggttcatcgtgcatcaatgggagcgcacctgggttctgctgacatgtgagagcttcttcaccgaggggttcagaaaagtgtgctcatggcctgtagatctggattcaaagggagatgagaggacaagactttcctgtgtggccttcttacggcagtccacagggaagtggcctcattttctgtgtctgtcctgcccagcgcccccactctcctgtgctggtcccaggccatcccttagccagagtgcagaactccagacccccaatattctctcatatcctcagaatcttcagcttccatccatggatgttggctgaatcctgagtggggtcgtagaaagatctggtcctgtgagtaggggggcgaggaggaaggcagggacttcagctgggctgtctacaacctgagtctaaaacacctaaagacaagcacaacttgcccccgctaggacgaatttcttgctccagaccgcctcactgcatctctagggccatgtgtattcctgctatttggccacattccttgagaaaaattgcctattaaaagaatttccttattca

SEQ ID NO: 10488 - DNA, 1600 bp, Homo sapiens
ttcactcacctaatgtttccaaatggcatggaaagtcaagacgacttctggattcatggacatctggtcactggaggccttggctggtggtactcaaagacaatcagaatgcgacatcagctttgttcaagcagagattctgagtcaaatcactcctctggcccccaataccaggatggggcctgtcttagctgggccccactttacatctttgtgacttttgtcagctcacccccagcctggtgccagcccagtatcagttgtagggaaatctggtaacatttctactagctaacacgtgtccagtgcttaccacgccctaggccctgagctacccaataactgtgttctttggttctcaccacaaccctatgcacagaggaaatggaaggcacaaagtggtgaagttgcttgcccaagaccccgtagctggtatgtggcagagcataaatgcaaacccagttcttctggctccagaatcctgccctagacgatgacacttttgatcagcagtggatgcaccccaaatcatgcctctgttattgaccaaagcctgatccactcacccttgagtttgaggcccactgtgaacctgcccagaaatgcctacctccaagccctttcttcctccactgctcccacccagccaaagcagacaggcagctgctcccccagaaccacttcctacttcctcatcactgctgatacggttctccctttagggatgctcttcccctaagatctgcctctaagattccactcaagggagcctccttgataccccaggtggaaggggtcactccttgagcaccaagtccacccccatcacaggaccctctgtgtgaccttctagtattgtttatggttgtgacctcactgccctaagactgtctacttctgaccccacaagggctagcactgccctcagaaagctcagccactgtttgctgaatttaattaaaaatacatctctaataacctctttgtaaaatagcttggcagtttcataaaaagttaaacgtacatcttcttcacgagccagcagttgtactcctaggtatattcctacgggaaatgaaagcacatgtctgcataaaggttcatgtatgaatattcacagcagcattattcataacagccaaaacctggaagctgtcaagatacccatccactgacgaatgattcagcacactgtggtatagtcataaatggaatactactcagccatgaaaaggaacaaattcctgataaacaccacaacatgaatgaattgcaaaagcagtgctctgagtccaagaagctgggcagaaaggagttggtgccctgattccatttttctcaagttgtagaagaaacaaactaatctacggtaggagaaattcaaattcagattctccccatccccaccagttacctctggttggtggagagggggagaattggcaggaaaggggcacaaagaaactttttggggtgatggaaatattttgtaccttgctttagatgttggtcagatggaatatacgtttgtggaaacctgccaaactgtacattgaatatctgtgtgtttttaccacatacagttaaaactaaaaaaaaa

SEQ ID NO: 10489 - DNA, 380 bp, Homo sapiens
gtcgacccttgtctttattcatgggtcctgcatggtgcccaaacctagtaggccttaaataggtgtttgctaggggctggcagatgagtgagtctatattttaatagtttaaaggcctgtatagggaaacctaccttcagttatttaattcagcactttttttttttttttttttgagacagggtctcaactctcgcccaggctggagtgcagtggcacgatctcagctcactgcaacctctgcctcccagattcaagacatcctcccacctcagcctcccgagtagctgggattccaggcatgcgccaccactcctggctaattttttgtatttttagtagagacagggttttgccatgttggccaggctggttgaact

SEQ ID NO: 10490 - DNA, 1247 bp, Homo sapiens
actaaggtgcacaagaatgtctgtaaactacctgaaggtttgtagatatggagtacaccttacccattaatcaagctatgcacagcttgaacctgggaggtggaggttgcagtgagcagagatcacaacattgcacttcagcctggtgacatgagcaaaactgttgtctcaacaaaatgaaattatggaacctgtttgccatcctagtatttacttaattgttccttcttaacatcaaagatggtcttctaggcaattgtaaattttaaattagccagttattttgacaattaattttttactccacctgtatctttagtgcccagccaatgatctggcatagttaggggtgcaccaagaatgtctgtaaactacctgaaggtttgtagatatggagtacaccttacccattaatcaagctgtgcatagcaggaaccaatacgagccgtgatcctcctggttcatacagaacaatggaaaaacataaggctttgtctacctagttggccatcagactttcagcaacttttatcatccagatagtcaccaaatgaaataaaatagaaaaatcccttgagcaatgaaacaattgtgaatgaacacaaagtccatgaatttaatccttatccgtttgctgagccaagcatgtgcatctgcagtgggtggcccaggctggcagcacagataccaccatttcccttttctttgctcagggcatggcctgtttatctcgttgcaccagatgagggttggaaggatgatggtggtggttgtttcagatctactgacagcaatgagaaatcaatgacagttgacaggaagagaggacgcatacaacaggcaaaagaggaatgcccagcagtcttggtccttgcggtgcaatactggccttgaggccaagtcagcaggggattcgtagtcactaacttctaactgaggcagggaagtaacatgttctggaaaaggtccaaagaaacaggaatagaggcagtgtagcaagaggcagatttttggtgccaaatagatttgaatcctggttctgcttcttcctttgtagagtatgatattggttctttcctcccaaagctattataaagactaaatatgtacacaaatctttgggatgtctgacatataaatgcttaacaataggtatttgctggtattattacaaatgaatttgcttatttttgagccacttctatgtctgtccattaaaccaaaatgtgttctgcaaaaaaaaaaaa

SEQ ID NO: 10491 - DNA, 369 bp, Homo sapiens
cggtgcccgatgctttccacggattacctcgtatactcgtcatacccaccatttgagtgaagtgcttggattcccatttgacagatgaggaaactaagggaccgagaggtgaagtgggtcccccaggtcacagagtggtgattggttgaatatgggcttggatccagggggcgggggtctcgtgtcccttccctcagccatgtcagcccctcactcactcgggtgtgtgttcagggatgggcctgcacggactctgtttcttggctggggctccctctgttcaccccaacctgcttcctgccttccagggtgacagctctggctgagtgcgttgcgtatgtgctctgtgccaggcatgtggagaccgag

SEQ ID NO: 10492 - DNA, 381 bp, Homo sapiens
agtcactggagcctgagcaacatagtgagaccctgactccaccaaaaaaacgtttaaaaattaaccgggcatggtgctgtgttcctgtagtcccagctactcgggaggctgaggaaggaggatcacttgagccaaggaatttgaggctgcagtgagctgtgatcacgccactgcgttccagcctgggtgacagagcgggattctctcagaaaaaaaaaaaaaaaaaagacagaaaagaaaagaaaaaaacaaacactggaacaacaataggaagagtcctttagggatgacagaactttccctactctactctaagcagcctaggctcccggctctgaagtttaggctcccacttggtttagaaataaaaaacccaaaaca

SEQ ID NO: 10493 - DNA, 540 bp, Homo sapiens
gacaggctctggagcaagagtgcttgggttcaaatccctgttgcaccagggatgagtgatatgcttttgggtagattatttatttaacctctccatgcatagcttcattatctgtacagtagggataatcagtacctatctcacaggttgctgtgaggcttaagtgaattcatacataaaagtgcttagagcagtgcctggcagtggaaagagctcagtacggtcatccttgatcataaggaggatgactatattgactttggagaacttgtgctcagggatgaaggtcaaggtaggatccaggagatatttgcagagacatgtgagttggttctgttctactacagctaccagtgccaactggaagtcatcccaccgtcatttataacacctagaaagtgtgagtcgacaggtatgctctccaatatggtggccatgtggttactgagcccctgaaatgtgacaagtctgaattgggatgtgctgtaagcatcagatacctatgctaaatttcaaagacctagtttaaaaaaattaaat

SEQ ID NO: 10494 - DNA, 391 bp, Homo sapiens
catataatctccacggtatctttctcagcattaggaggaatggattttaaaatattatataaaaacaagaaaagactaaagcagtacctgttacagataacattctgaggaaaaagaacatttggacttgctaaaatgtttttgacatctacattgaggacccaagaaaatgattttctttttaggtttggtttcagttatcttgtgctaaaaatgtctgtgaacattaaatttctttgatctttgtctacgtagctatcacactctgtaataagtctttaattatatgtttttggcactgcacctggtaggtgagaaggactgttgcatttctgttgttcactcatcaaatagcaattacccttcaactctccttacccctgttactgtg

SEQ ID NO: 10495 - DNA, 431 bp, Homo sapiens
cttatggacatcacttgccctcctatgtgatacactgagaaagatacggcattgtgtttgtgtattcctgccaaagccacagcctcagtctaatcattagaacacattggacaaatccaaactgagaaacattctaccactggcctgcacttttcataaatgtcagtgtcatgaaagacaagactaagggacagttccagatgaaaggagaccaaggagacaggctgctgtgtacatcgtatgggcataaatcggacgtggggtcaaaattatttttctaaaaacaatattattgagagggctctgtgcagtggctcatgccggtaatcccaacgttttgggaggccagggcgggaggattgcttgaagctaggaggagttcaagaccagcctgggcaatatcgtgagaacccccatctacaaaaaaaaaa

SEQ ID NO: 10496 - DNA, 468 bp, Homo sapiens
tgagaaacctatgtctcccacatcctctgtatgtctagtttggttgaagtgttgcaaatgaattataaatatgttgttgtctgaaaagaaatcatggctgttagaaagaggatgtgggccagatgtggtaactcatgcctgtaattccagcagtttgggaggccgaggtgggaggattgcttgagcccaggctgttcccaaattttggtctcaaatggttctcctgtcttggcctcccaaacctctgagattgcaggcatgagccaccatgcccagccagataacaaacacctttaagtttgacattcatcattattgtaaacttttatttccttttaagacttaaatattggtgtttaaaaatgaaaataaactgaaatgacatattgtcttttccaatgaacaaaataaatgtgataatattcaatttgtacattgatttgaataaactggtgtataatttcacga

SEQ ID NO: 10497 - DNA, 2223 bp, Homo sapiens
  misc_feature (1211)..(1211): n is a, c, g, or t
gcgagccacggcgccgggggcggccaaggggaggcgggatgagtctgcgagccggctgagcgcgccgaggagccggccggggcaccgccggggacatggcgtcttggctccggagaaagctgcgtggcaagaggcggccagtgatagcgttctgcctcttgatgatcctatctgcgatggctgtcacccgctttcccccacagcgtccatccgccggcccagaccctggtcccatggagcctcagggggtaactggcgcccctgcaacccatatccggcaggctttgagctccagccggaggcagcgggcaagaaacatgggcttctggagaagccgtgctttgcccaggaactccatcttggtctgtgctgaggagcaaggccatagagcaagagtggacagaagcagggagtccccaggaggggacctcaggcatccagggagggtgaggagggacattactttgtcaggacatccaagactcagtactcagcatgttgtgctcctgagggaggatgaggttggagatccaggaaccaaagacctgggccacccccagcatggcagtcccatccaggagacacagagtgaggtggtcaccctggtcagtccactcccagggagtgacatggcagctttaccggcttggagagctacttctgggctgacactctggccccatacagcagaaggcagggatctgctgggagctgagaacagagccttgactggtgggcaacaagcagaggatcccaccttggcctcaggggcttatcagtggcctggctctgttgagaagctgcaagggtcagtatggtgtgatgctgagacgctgttgagcagctcgaggactggtgggcaggctcccccatggctgacagaccacgatgtgcagatgctccgtctgttggcacagggggaggtggtggacaaagccagggtccccgcccatgggcaggtgctacaggttggcttctccactgaggctgcccttcaggacctgtcctctcccaggctcagccaactctgttcccaagggctctgtggcctgatcaagaggcctggggacctgcctgaggtcctgtccttccacgtagatcgtgtgctggggctgcgccggagcctacctgctgtggcccgccgcttccatagccccctcctgccctaccgatacacagacggtggagcaaggcctgtcatctggtgggcncccgatgtgcagcacctgagcgacccagatgaggatcagaactctctggccttgggctggctgcagtatcaggccctgctggcacacagctgcaactggccaggccaggccccgtgcccgggcatccaccataccgagtgggcacgcctggcgctcttcgacttcctgttgcaggtccacgaccgcttggatcgctactgctgtggcttcgagcctgagccctcagacccctgtgtggaagagaggctccgagagaaatgccagaacccagccgagctgcggctggtccacatcctggtccggagcagcgatccatctcacctggtctacatcgataacgctggcaaccttcagcaccctgaggacaagctgaactttcggctgctggagggcatagatgggtttcctgagtctgccgtgaaggttctcgcatcagggtgtctacagaacatgctgctgaagtcgctgcagatggacccagtgttctgggaaagccaaggcggagcccaggggctgaagcaggtcctccagaccctggagcagcgaggacaggtgctgctgggacacatccaaaagcacaacctcacactcttcagggacgaggacccataagccgcacacagccctgagtcaatgagcatccatcctgatggccacattttcttgggctcactcatcttgaggacaaatgggaaaagccagaagccagaggggcacaaggatgtcacgggatatttcacctgcctgggatggtggaggtagtatggggttttcaatctcaaagcgtccctttctgccttctcggctctggctatttattcccttgcaccaacaaatacattcgaaaatgttctgtgagctgctcaagaaactgtaaaaatgtgtgatgcacgtgcatatgcagagtgggagaactttgtgtgtgtgtagaggtgtgtaggtgtgggtggcatgtgtgcacgcctgcatgcaatacctgagaccaacctaataaaggtacaatcttcataga

SEQ ID NO: 10498 - DNA, 365 bp, Homo sapiens
tccggagcagcgatccatctcacctggtctacatcgataacgctggcaaccttcagcaccctgaggacaagctgaactttcggctgctggagggcatagatgggtgagggtcaaaagggttgggtggaagttcatgggactgagacctgatggccttgctgcaaaccttgggaccttcaactgtggccctgagaagcccacagtccatcagacagaagttattggatcagaactttaggcggtggtggggagccctgggaaagctgagaggggatacagttggcagggcctaccccaatatccagagggcctcgtgcctgcagaatactagctgtattgctggggtgtgggaaggctagtccttc

SEQ ID NO: 10499 - DNA, 417 bp, Homo sapiens
cgcggccgcgggtaggctccctcagatccccgtagatctcagtagatccggcgtgtattccccacccgcggagtatcccggtgtgcagcgatctcccgagagttggcgcagggccacttggctgcagagaacgtgtgcaccttcagtccgggaaacccgccccagccgagtagccgcgcatcctgggaagcctggcgagccacggcgccgggggcggccaaggggaggcgggatgagtctgcgagccggctgagcgcgccgaggagccggccggggcaccgccggggacatggtaggactcgcgggaaggaacgcgcgagcggagggtggggcgatcaccaggacaggtggctgcagtcaacgcgcagcggcccagggcgcgcgcagcctgcgcggcctcccgaggccggagttgtt

SEQ ID NO: 10500 - DNA, 3120 bp, Homo sapiens
  misc_feature (1211)..(1211): n is a, c, g, or t
  misc_feature (2917)..(2917): n is a, c, g, or t
gcgagccacggcgccgggggcggccaaggggaggcgggatgagtctgcgagccggctgagcgcgccgaggagccggccggggcaccgccggggacatggcgtcttggctccggagaaagctgcgtggcaagaggcggccagtgatagcgttctgcctcttgatgatcctatctgcgatggctgtcacccgctttcccccacagcgtccatccgccggcccagaccctggtcccatggagcctcagggggtaactggcgcccctgcaacccatatccggcaggctttgagctccagccggaggcagcgggcaagaaacatgggcttctggagaagccgtgctttgcccaggaactccatcttggtctgtgctgaggagcaaggccatagagcaagagtggacagaagcagggagtccccaggaggggacctcaggcatccagggagggtgaggagggacattactttgtcaggacatccaagactcagtactcagcatgttgtgctcctgagggaggatgaggttggagatccaggaaccaaagacctgggccacccccagcatggcagtcccatccaggagacacagagtgaggtggtcaccctggtcagtccactcccagggagtgacatggcagctttaccggcttggagagctacttctgggctgacactctggccccatacagcagaaggcagggatctgctgggagctgagaacagagccttgactggtgggcaacaagcagaggatcccaccttggcctcaggggcttatcagtggcctggctctgttgagaagctgcaagggtcagtatggtgtgatgctgagacgctgttgagcagctcgaggactggtgggcaggctcccccatggctgacagaccacgatgtgcagatgctccgtctgttggcacagggggaggtggtggacaaagccagggtccccgcccatgggcaggtgctacaggttggcttctccactgaggctgcccttcaggacctgtcctctcccaggctcagccaactctgttcccaagggctctgtggcctgatcaagaggcctggggacctgcctgaggtcctgtccttccacgtagatcgtgtgctggggctgcgccggagcctacctgctgtggcccgccgcttccatagccccctcctgccctaccgatacacagacggtggagcaaggcctgtcatctggtgggcncccgatgtgcagcacctgagcgacccagatgaggatcagaactctctggccttgggctggctgcagtatcaggccctgctggcacacagctgcaactggccaggccaggccccgtgcccgggcatccaccataccgagtgggcacgcctggcgctcttcgacttcctgttgcaggtccacgaccgcttggatcgctactgctgtggcttcgagcctgagccctcagacccctgtgtggaagagaggctccgagagaaatgccagaacccagccgagctgcggctggtccacatcctggtccggagcagcgatccatctcacctggtctacatcgataacgctggcaaccttcagcaccctgaggacaagctgaactttcggctgctggagggcatagatgggtttcctgagtctgccgtgaaggttctcgcatcagggtgtctacagaacatgctgctgaagtcgctgcagatggacccagtgttctgggaaagccaaggcggagcccaggggctgaagcaggtcctccagaccctggagcagcgaggacaggtgctgctgggacacatccaaaagcacaacctcacactcttcagggacgaggacccataagccgcacacagccctgagtcaatgagcatccatcctgatggccacattttcttgggctcactcatcttgaggacaaatgggaaaagccagaagccagaggggcacaaggatgtcacgggatatttcacctgcctgggatggtggaggtagtatggggttttcaatctcaaagcgtccctttctgccttctcggctctggctatttattcccttgcaccaacaaatacattcgaaaatgttctgtgagctgctcaagaaactgtaaaaatgtgtgatgcacgtgcatatgcagagtgggagaactttgtgtgtgtgtagaggtgtgtaggtgtgggtggcatgtgtgcacgcctgcatgcaatacctgagaccaacctaataaaggtacaatcttcatagaactgcacttgcagcctggagttgctctggctgaaagtagactcaggcttaagaaatgaaacataatgcgtttgtctttatagactttaaattttcaattattactcagttatgtttttggtttaaaaaattataaaagtctaaaagtaatacatgctcagtaaaaacaagtccataaaaaatagaagcatatgacaaaaagcataagtcccacaaactccctagcggtgtgtatgtgtgtgtgtgttattcatggtcacactacatgcaaattaaaaaatgaaagtgtggtcatgctttgtcaactcactatatttttactttattaactatattctgtatcagccatctgaattgacccaatctttattggtgactgcatgaaattccaaggcagggatgtgtcatattttctttagctggtcccataatcatgaacatttaagtagctccaatttttcatcaattacagacattgccgccatgaacatgattgcatggcgtgcaagtatttctgcgaggtagatttccgtacgggatttctggggcaaagggtatgggcattcagtattctgagagaaactgccaaattgctctctgaaatggtggtgtcaatttacatttctcccaagagggtaggagactgattatttttctacaccttcaccaacacttggcattctcagacttttggnttttttttggcctatttaggaggaaaaccgattttaaaagctgcatttccttaatcatgaatgaagtcatctttccacttatttgccagacatttgtattttcttttctgcattgtctttttgttttaagatgtttgccctttgcttgttaatttgttggaaatctttgactctaataagtgtgatcaatcttttctctgctg

SEQ ID NO: 10501 - DNA, 350 bp, Homo sapiens
cctggccaaggtactctgatttaattggtctggggataggccccaggcatgggcaatttttaaagccacccagatgatttgaatgggatggctagagaaccactaagctagtatgtaaaatgatacatttaaagatatatatatatatatatatatatatatatatatatatatatatatgtatgtttgccccaaagccatttgtcttttccctatattgctagggagtttcagactaattgatgatttgtcttcatagcagagtttgactaattaatttgaattccagataccatacgtttcttatacagagtcaggctgcttaacctcttattttctaaacatcaaaa

SEQ ID NO: 10502 - DNA, 488 bp, Homo sapiens
ctgaggctggagaatagctagcacccaggaagcagaggttgcagtgagccgagatcgggccattgcactccagcctgggggacaaaagtgaaactccgtctcacaaaacaaaacaaaacaaaaaaagagtaaggactgtatgtctcacaccttggcacaccctcctggtgtctggtgtgatggaggggattattcctcatctctcctgagttcagtcttctgtaatgtagcatgctggggcctctggagcacttcactgcacactaacgaatgtgaggatggaaaaggaaaatcttatcttagtgaaactgtggaaatagtttagacctcgggctcccctaacaggcccctagacgatgctttgggaaccgtggtggtagaactctctctcccagactcactctgccctgacccctcttattggtgagaaacaggcatgtgtaactcttctttttcctttgaggaataaaagatatttgtacattttg

SEQ ID NO: 10503 - DNA, 1604 bp, Homo sapiens
tctcatgtacagcacatatgcgggagagttggcagaaaatttgtgaagagatgccgcaaaggaagggtctgttgacgggtgggattgggggttttgatgaagttgcttagtcctggttttgttttgaaaattactgcgttgcatttttgtgttaagtttttgaacccacgtgtgttttggtggagtatgagttggaagtcactgcaaactagcataaacaacaaagctcacagagtaggcacagatgtagagaacagagaccaaaatggggtgaggtggcagtaaatctaggatagggaaaaattaatgtgagggtgggaaataaactgtaattacctgaaatcaaatgtaagagtgcaataagtatgctttttattctaagctgtgaacggtttttttaagaatcattccttcctaatacatttgtgtatgttccatagctgattaaaaccagctatatcaacatataatgcctttttattcatgttaatgaccaacgtaagtggctagcctttatgtcttatttatcttcatgttatgttagtttacatacaggggtgtatgtctctgtgctgtccccttctcctgccttcattttaaaatgcatccatgggtcctccgtgtttcctttggccatgccacatatatagactcagtttggccttcatgatatcgcctgatttttgaggactgtatcacagtgatatgtatttgtggtaatctcatttgttggttgtacatctgatcctttcctcaacatggcaattgctgcctttcctaagataggatcatacaactgatcaggggattgaatttgatcattcatcaacatgtgtctctgaattttattcagtagttgtcattgctctttggtttagaccaagaaaaaggaaatccccccttttcatgtattccttggtttgaggacatgactcctgtaagggagaggaaagggagatgcttcctgtttgaactgcagtgaattcacggttcctgtttcaccactccaaaccttatggcgactcacacacacattcctcttttctgttactgccaaaggttcgggtttagtacacttcagttccactcaagcattgaaaaggttctcgtggagtctggggcgtgcccagtgaaaagatggggactttttaattgtccacagacctctctatacctgctttgcaaaaattacaatggagtaactatttttaaagcttatttttcaattcataaaaaagacatttattttcagtcaaatggatgatgtctccctcttttcccctattctcaatgtttgcttgaatcttttattattttttttaattctcccccatacccacttcctgatactttggttctctttcctgctcaggtcccttcatttgtactttggagtttttctcatgtaaatttgtataacagaaaatattgttcagtttggatagaaagcatggagaataaaaaaagatagctgaaattcagattgaagaaatttatttctgtgtaaagttatttaaaaactgtattatataaaaggcaaaaaaagttctatgtacttgatgtgaatatgcgaatactgctataataaagattgactgcatgga

SEQ ID NO: 10504 - DNA, 1891 bp, Homo sapiens
tctcatgtacagcacatatgcgggagagttggcagaaaatttgtgaagagatgccgcaaaggaagggtctgttgacgggtgggattgggggttttgatgaagttgcttagtcctggttttgttttgaaaattactgcgttgcatttttgtgttaagtttttgaacccacgtgtgttttggtggagtatgagttggaagtcactgcaaactagcataaacaacaaagctcacagagtaggcacagatgtagagaacagagaccaaaatggggtgaggtggcagtaaatctaggatagggaaaaattaatgtgagggtgggaaataaactgtaattacctgaaatcaaatgtaagagtgcaataagtatgctttttattctaagctgtgaacggtttttttaagaatcattccttcctaatacatttgtgtatgttccatagctgattaaaaccagctatatcaacatataatgcctttttattcatgttaatgaccaacgtaagtggctagcctttatgtcttatttatcttcatgttatgttagtttacatacaggggtgtatgtctctgtgctgtccccttctcctgccttcattttaaaatgcatccatgggtcctccgtgtttcctttggccatgccacatatatagactcagtttggccttcatgatatcgcctgatttttgaggactgtatcacagtgatatgtatttgtggtaatctcatttgttggttgtacatctgatcctttcctcaacatggcaattgctgcctttcctaagataggatcatacaactgatcaggggattgaatttgatcattcatcaacatgtgtctctgaattttattcagtagttgtcattgctctttggtttagaccaagaaaaaggaaatccccccttttcatgtattccttggtttgaggacatgactcctgtaagggagaggaaagggagatgcttcctgtttgaactgcagtgaattcacggttcctgtttcaccactccaaaccttatggcgactcacacacacattcctcttttctgttactgccaaaggttcgggtttagtacacttcagttccactcaagcattgaaaaggttctcgtggagtctggggcgtgcccagtgaaaagatggggactttttaattgtccacagacctctctatacctgctttgcaaaaattacaatggagtaactatttttaaagcttatttttcaattcataaaaaagacatttattttcagtcaaatggatgatgtctccctcttttcccctattctcaatgtttgcttgaatcttttattattttttttaattctcccccatacccacttcctgatactttggttctctttcctgctcaggtcccttcatttgtactttggagtttttctcatgtaaatttgtataacagaaaatattgttcagtttggatagaaagcatggagaataaaaaaagatagctgaaattcagattgaagaaatttatttctgtgtaaagttatttaaaaactgtattatataaaaggcaaaaaaagttctatgtacttgatgtgaatatgcgaatactgctataataaagattgactgcatggaaaaaaaaaaaaaaaaaaaaaaaaacaattttgggaaagaaggacaaaaaaaggtaataaaacatagtatggcagagaggacaccaaaaagaataaggaagaacaagtgccaaaaagagaaaaacaaaagaaacacccagagaaaaaagaaaagaggatagagatatcacacaaaaaaaaaacccaccggaagaaacaacaagaatataaagaaaaaaaccaaagagaaacaaagagaaaaaacaagggacaaataaaaggaacaaaaaagaagcaaataaaattacg

SEQ ID NO: 10505 - DNA, 1624 bp, Homo sapiens
tctcatgtacagcacatatgcgggagagttggcagaaaatttgtgaagagatgccgcaaaggaagggtctgttgacgggtgggattgggggttttgatgaagttgcttagtcctggttttgttttgaaaattactgcgttgcatttttgtgttaagtttttgaacccacgtgtgttttggtggagtatgagttggaagtcactgcaaactagcataaacaacaaagctcacagagtaggcacagatgtagagaacagagaccaaaatggggtgaggtggcagtaaatctaggatagggaaaaattaatgtgagggtgggaaataaactgtaattacctgaaatcaaatgtaagagtgcaataagtatgctttttattctaagctgtgaacggtttttttaagaatcattccttcctaatacatttgtgtatgttccatagctgattaaaaccagctatatcaacatataatgcctttttattcatgttaatgaccaacgtaagtggctagcctttatgtcttatttatcttcatgttatgttagtttacatacaggggtgtatgtctctgtgctgtccccttctcctgccttcattttaaaatgcatccatgggtcctccgtgtttcctttggccatgccacatatatagactcagtttggccttcatgatatcgcctgatttttgaggactgtatcacagtgatatgtatttgtggtaatctcatttgttggttgtacatctgatcctttcctcaacatggcaattgctgcctttcctaagataggatcatacaactgatcaggggattgaatttgatcattcatcaacatgtgtctctgaattttattcagtagttgtcattgctctttggtttagaccaagaaaaaggaaatccccccttttcatgtattccttggtttgaggacatgactcctgtaagggagaggaaagggagatgcttcctgtttgaactgcagtgaattcacggttcctgtttcaccactccaaaccttatggcgactcacacacacattcctcttttctgttactgccaaaggttcgggtttagtacacttcagttccactcaagcattgaaaaggttctcgtggagtctggggcgtgcccagtgaaaagatggggactttttaattgtccacagacctctctatacctgctttgcaaaaattacaatggagtaactatttttaaagcttatttttcaattcataaaaaagacatttattttcagtcaaatggatgatgtctccctcttttcccctattctcaatgtttgcttgaatcttttattattttttttaattctcccccatacccacttcctgatactttggttctctttcctgctcaggtcccttcatttgtactttggagtttttctcatgtaaatttgtataacagaaaatattgttcagtttggatagaaagcatggagaataaaaaaagatagctgaaattcagattgaagaaatttatttctgtgtaaagttatttaaaaactgtattatataaaaggcaaaaaaagttctatgtacttgatgtgaatatgcgaatactgctataataaagattgactgcatggagaagtcttcaaaaaaactat

SEQ ID NO: 10506 - DNA, 116 bp, Homo sapiens
ctggtgcagtcataggggctgctttgctggagctcttcatgagtcaggcatgtccctccagtgcagatgctctggtatgagcttccagggtacctgagactgccctgtaagcagct

SEQ ID NO: 10507 - DNA, 432 bp, Homo sapiens
gagactccaatttgtgagagctggtgagtagactgagtacagcaaacccatagaggccggactgcctatggctttgagggcccagttcccatcccagtgagcccagtattcaggacatggagtcaaaagagaatgattctctagctttaagacttaatgggccttgcacagtggctcacatctgtaatcccagcactttgggaggccaaggcgggcggactgcttgagctcaggagtttgagaccagcctgggcaatatggtgaaaccccgtctctacaaaacatacaaaaattagctgggcatggtgatgcacatctgtggtctcagctactcgggaagctaaggaaggaggattgcttgagccctagaggcaaaggttgcagtaagccaagatcatgctgtggcactccagcctgggtgacaaaatggga

SEQ ID NO: 10508 - DNA, 501 bp, Homo sapiens
acagagtttcaccatgttggccaggctggttttgaacttctgacctcaggtgatctgcccaccttggcctcccaaagtgctgggattacaggtgtaaaccaccgcacccagccctttaccatatttttgaaagtactttatgtgtctctctcctcatcttccacaaaatttgagaccttcaaaggtagaaactgttttatttaaaatataagagttcctgacacagagaaggttcccgagtgattgaagtgctacaatgtactaatcatactctggtctatgagttcattcccagattagctgtggattacatgtgtttcaaatgtatagctaggaatcgaaaagtggtctgagcttcaaaaagtcttactatattttaatacttccatatgaatttgacttaattatgtaaggaaatagttatgtatatatatcttattttaacaatagggttcaaaggagcttgacttttttggaattggaaataaaagtaggttcttt

SEQ ID NO: 10509 - DNA, 324 bp, Homo sapiens
cacatcagttattctgaaattttcagtgttatgatggatgttgcagtaattattcttatatatgcacagaacccccagaggacatgactactgaaggctgtgctggcaggatcacaggtaaggatctagcaaattgtcccagcttcattgactgagctttcatccttgttgcactactttgagctgccattttgatcatataataatgatttagtagagctcttttttggttcaacctacctgttcttgtatcagaactgaaatgtttgattttataaatttgaatagtggcacaatatagagttcactattcctcaatatttt

SEQ ID NO: 10510 - DNA, 502 bp, Homo sapiens
aaagtggaaacaacccaaatgtccatcaactgatgaaatgatacacaaaatgtggtatgttcataaaatgaaatattaatcagtaataaaaagaaatgaggtgctgatacattctgccaatgtggatgaattttgaaaacatgttaaatgaagaagcctgttgggaaagaccacatattgtataattccatttatatgaaatgtccagagtaggcaaaactggggaaacaaaaagtagattagtggttgtctaggactcgggtgggggtaggtggtagaaatggagtgactgctcacaggtactgggtttctcttgggggtgatgaaaatattctaaaattctattgtgatggttgcacaactctgaatgtactaaagctaatttaattgtgatgttaaatggatgaattgtactgtacgtgtgtgaattacatctcaataaagtttaaaaaataggaaattataaaaataaagatttgaactaggtcagtattttttaaag

SEQ ID NO: 10511 - DNA, 265 bp, Homo sapiens
aaccatttatttttcttcacagtatgtgcctacaattaataagaccacatcactttagttgttctgtggttcagaattttctgtaagtcagattggccagaaccactgtggttttcctgtgctgtcattattcaccttggtaacaaatcaggctgtatccaagtatattagttttgtatttcggaagccagttttgtcaaggatttgacaaaaggaattgccttcgttacttcctatctcccagggaagccgaatcattgcttaa

SEQ ID NO: 10512 - DNA, 750 bp, Homo sapiens
tgctggtcctcgatgagctagtctcagtcaagaggaacccacccagctccttccttccagacacagcagcatccagggcagatgtgggttccagtcccggatacctctgacacatcggcctgggaccatgagcaagttttacctctccctgaatctcactctggccagtcgaacactgggagggtctgctgagaagctggacctggtccctattctggccagggagtgtgaacccatgtcccattggagggggacagtcaggaccaacacaacaggacaaagaagtggccctcaggaactgggtccacgagagacaggattattaaggggggattctgtgcaggcggaagcctgtggtccttctcaatttgatactggagatgatcaggaaagcctcagcttctcccagaatgaattgagaggaccttccttccactatagcgaccaagatctccacctaaggggcgctcactggaagtttgctgaaatcccaaatcagcatgctcctgatttcagaagctgccatccacctttgcacttcaacacaaaatccaccacatcctaggctccagccctggaacaccaaatgaagccacacaagttctgcacaccaagacctcttcaatggaaggaaaatgaccactgagtttggtccacccttttcccacctcccgtaccaaatcccaaatcatcaaaacaggcccaactctgcatcttacagccagggaaactggggaccaccaggccagg

SEQ ID NO: 10513 - DNA, 1299 bp, Homo sapiens
ggctgcgctgggagccgggcggtcgggcggcggcggcggcgggcggcgccccggtccgcggcgccgaggctcgcaccgggagctgcccatgggccgggcccggagttccggcgcgccgggagccggcagacatgccacagacgctgagtgcctccgacatggtcaccccaggcagcctcagcccaccccccaccgagcccacagatggcgaacaggctgggcagcccctcctggatggagcgccatcctcagcctccctggaaacactgatccagcacctggtgcccacagccgactactaccccgagaaagcctacatcttcaccttcctgctgagctctcgcctcttcatcgagccccgggagctcctggcccgggtctgccacctgtgcatcgagcagcagcagctggacaagccggtgctggacaaggcccgggtccggaagttcggccccaaactgctgcagctgttggccgagtggaccgagaccttcccaagggacttccaggaagagtcgactatcgggcaccttaaggacgtcgtgggccgcatcgccccctgtgacgaggcataccggaagaggatgcatcagctcctacaggctctgcaccagaagctggcggctctgcgccagggccagaaggtctggtgggtgccgacaagcccatctcctacaggaccaagccaccagcctccatccacagggagctccttggtgtctgcagcgacccctacacactggcccagcagctgacccacgtggaactggagcggctgcggcacatcgggcctgaggagtttgtccaggcctttgtgaacaaggaccctctggccagcacaaagccctgcttcagtgacaagaccagcaacctggaggcttatgtgaaatggttcaacaggctgtgctacctggtggcaactgagatctgcatgccagccaagaagaagcagagggcccaggtgattgagttcttcatcgacgtggcccgcgagtgcttcaacatcggcaacttcaactccctcatggccatcatctccggcatgaacatgagccctgtctccaggctgaagaagacctgggccaaagtgaggacggccaagtttttcatcctcgagcaccagatggacccaacggggaatttctgcaactacaggacagccctgcgcggggcggcccaccgctccctgacggcccacagcagccgagagaagattgtcattcctttcttcagcctgctcatcaaagacatctacttcctgaatgagggctgcgccaaccgccttcccaatggacacgt

SEQ ID NO: 10514 - DNA, 936 bp, Homo sapiens
acgcgcagtgaggctcacgtgcccacccggcgcccctcacgagcgcggtgcccctcgcttgcccgtaggcccgggtccggaagttcggccccaaactgctgcagctgttggccgagtggaccgagaccttcccaagggacttccaggaagagtcgactatcgggcaccttaaggacgtcgtgggccgcatcgccccctgtgacgaggcataccggaagaggatgcatcagctcctacaggctctgcaccagaagctggcggctctgcgccagggccagaaggtctggtgggtgccgacaagcccatctcctacaggaccaagccaccagcctccatccacagggagctccttggtgtctgcagcgacccctacacactggcccagcagctgacccacgtggaactggagcggctgcggcacatcgggcctgaggagtttgtccaggcctttgtgaacaaggaccctctggccagcacaaagccctgcttcagtgacaagaccagcaacctggaggcttatgtgaaatggttcaacaggctgtgctacctggtggcaactgagatctgcatgccagccaagaagaagcagagggcccaggtgattgagttcttcatcgacgtggcccgcgagtgcttcaacatcggcaacttcaactccctcatggccatcatctccggcatgaacatgagccctgtctccaggctgaagaagacctgggccaaagtgaggacggccaagtttttcatcctcgagcaccagatggacccaacggggaatttctgcaactacaggacagccctgcgcggggcggcccaccgctccctgacggcccacagcagccgagagaagattgtcattcctttcttcagcctgctcatcaaagacatctacttcctgaatgagggctgcgccaaccgccttcccaatggacacgt

SEQ ID NO: 10515 - DNA, 328 bp, Homo sapiens
aaaaaagatggtaaaaggtacatgaatcaccatggactgcactgggcaagccattttagtgctgcaaatacgcagatacattcctctcacatatgtacagtgttttctcctctacagagtgtgtcttcactcgagctccaccagtcccctgtgtccaggtgaggcaggcattgttgttctggtttcattgacccagacctgcacttggccatatggccagcaaaggtggggctggttccttctcctcagcctatgctcattctgtagaacacaaatgcctgttgtcctctgatatttcactaaagtcttctccatctgaatcttactc

SEQ ID NO: 10516 - DNA, 372 bp, Homo sapiens
gaaaagcagaatgagctatcacatttatacctgttggatgcctactattaaaaaatggattagtaaggatgtggaataattggaactattgtacaccgttggtgaagtaaaaaatggcatggctattatggaaaataatatagttgctcctcaaaaattaaaaacagaactcccacttgatctagcaatctcacttttggatatttatccaaaagaattgaaatcaggatcttgaagggatacctgcaatgccatgttcattgcaacaccattcacaagagccaagatgtggaaacatcctcagtgtccactgatggatgaggggataaagaaaatgtggtatatacatacaagagattactattaatattc

SEQ ID NO: 10517 - DNA, 447 bp, Homo sapiens
ttttttttcacaaataggactttttatttgccactattaaaagtctgaacttcagacagattcttggactagtggttcatatccatcagttcgttcaactttagcacctgtcttgtccccagtggcttttccaaaactattaccttcaccacgaagctccataagttttcccaattcaaactagggcttcctcagcatttttacttttctaacgaagacatcacagagaggataaatagattggcaagccttttctatgtcttttccaatactgtctggaatcaacttattgaccacctctttccagtcatttgtctgtacctctcaggtcatgatttccatcatcttcttccagatttggaggacctgttggtgctgagcataagaggtcttccgtacctgattgttgcattttttagtaaaaccaacacagaacagatgaagcaa

SEQ ID NO: 10518 - DNA, 305 bp, Homo sapiens
ttttttttctcagcttcatgtgagtctataattatttcaaaataaaaagttaaaaagaaaacaaatggaaaaaagttatcaaacatgatttgtatcatgtcaaatggatatagagactaacttcaaaggaacagtttggccagtaggggaacagtttgaatatcaatgtgaataataattcaaatgaactgaaaaacatcaaatatatttaaatttatgagttcctaaaaataccaataaatgtagtcttcatatctggaagatgctaggaagcaatttgtttacaaattgcttctattgtttgg

SEQ ID NO: 10519 - DNA, 1657 bp, Homo sapiens
agggacccacgtgggagcctgggagcgggtggtcgtagctcggtagtccagttgtgggtaatcggggctgtttgttcctgtccgagagagctcggcggagacggctgtcgagtacccttcacctcggtgttgggagcctgggagcgaactgcggcgcgggttaccgctcccggggacgcagcaaggggcatcgagtccctggcgggagctgcgccatggcattgctctcgaccgtccggggcgcgacctggggtcgcctcgtcacccgtcatttctcccatgcagcgcggcatggggagcggcctggtggggaggagctaagccgcttgctgctggatgacctggtgccgacctctcggctggagcttctgtttggcatgaccccgtgtctcctggctctgcaggccgcccgccgctctgtggcccggctcctgctccaggcgggtaaagctgggctgcaggggaagcgggccgagctgctccggatggccgaggcgcgggacattccagttctgcggcccagacggcagaaactggacacaatgtgccgctaccaggtccaccagggtgtctgcatggagctgcccgctcactccagtagtcagcaagtccagcgcgggggctatggaggtgatggacgtgttctccactgatgacctcaccggatttttacagaccaaagcccagcagggctggctcgtggccggcacggtgggctgcccaagcacagaggatccccagtcctccgagatccccatcatgagttgcttggagttcctctgggaacggcctactctccttgtgctggggaatgagggctcaggtctatcccaggaggtgcaggcctcctgccagcttctcctcaccatcctgccccggcgccagctgcctcctggacttgagtccttgaacgtctctgtggctgcaggaattcttcttcactccatttgcagccagaggaagggtttccccacagagggggagagaaggcagcttctccaagacccccaagaaccctcagccaggtctgaagggctcagcatggctcagcacccagggctgtcttcaggcccagagaaagagaggcaaaatgagggctgacgtggactgtccacagtgttcatgtgctggagtcagggacggccgcacctgcctccgccggctccagtgtgcggggagcctctgcctgagtgtgcaccaggcccatgtttattgaccacagtctgggggggggggaaggggactgcggtggacaccagaggaagctgtttcctgttgtgatgttggacctgtagtaggacatggtgatttgttaatttccatgggaagccatgatggcctagcatggagggaatctgttcccaggccctgcctggaagttgagggaaagtttagacatctgcagagaggcaggcagcccagcccaggggacccgttcctcttgaaccagtcattgcctgtggcaaatgtgtgtatgagaatgtggggggtggagggcggggccctgatgtggagtagacagtgcgcacctcaggcccacacacggccccgccctggggccttgagcgcaggcctcatctttctgtgccgcgggactctgcacctacctcacagggttgttgtgaggctcaaataaaacatcactcagcacgtggga

SEQ ID NO: 10520 - DNA, 1833 bp, Homo sapiens
agggacccacgtgggagcctgggagcgggtggtcgtagctcggtagtccagttgtgggtaatcggggctgtttgttcctgtccgagagagctcggcggagacggctgtcgagtacccttcacctcggtgttgggagcctgggagcgaactgcggcgcgggttaccgctcccggggacgcagcaaggggcatcgagtccctggcgggagctgcgccatggcattgctctcgaccgtccggggcgcgacctggggtcgcctcgtcacccgtcatttctcccatgcagcgcggcatggggagcggcctggtggggaggagctaagccgcttgctgctggatgacctggtgccgacctctcggctggagcttctgtttggcatgaccccgtgtctcctggctctgcaggccgcccgccgctctgtggcccggctcctgctccaggcgggtaaagctgggctgcaggggaagcgggccgagctgctccggatggccgaggcgcgggacattccagttctgcggcccagacggcagaaactggacacaatgtgccgctaccaggtccaccagggtgtctgcatggaggtgagcccgctgcggccccggccttggagagaggccggggaggcgagcccaggcgacgacccccagcagttgtggctcgtcctcgatgggatccaggatccccggaattttggggctgtgctgcgttccgcacacttcctcggagtggataaggtcatcaccagccggagaaacagctgcccgctcactccagtagtcagcaagtccagcgcgggggctatggaggtgatggacgtgttctccactgatgacctcaccggatttttacagaccaaagcccagcagggctggctcgtggccggcacggtgggctgcccaagcacagaggatccccagtcctccgagatccccatcatgagttgcttggagttcctctgggaacggcctactctccttgtgctggggaatgagggctcaggtctatcccaggaggtgcaggcctcctgccagcttctcctcaccatcctgccccggcgccagctgcctcctggacttgagtccttgaacgtctctgtggctgcaggaattcttcttcactccatttgcagccagaggaagggtttccccacagagggggagagaaggcagcttctccaagacccccaagaaccctcagccaggtctgaagggctcagcatggctcagcacccagggctgtcttcaggcccagagaaagagaggcaaaatgagggctgacgtggactgtccacagtgttcatgtgctggagtcagggacggccgcacctgcctccgccggctccagtgtgcggggagcctctgcctgagtgtgcaccaggcccatgtttattgaccacagtctgggggggggggaaggggactgcggtggacaccagaggaagctgtttcctgttgtgatgttggacctgtagtaggacatggtgatttgttaatttccatgggaagccatgatggcctagcatggagggaatctgttcccaggccctgcctggaagttgagggaaagtttagacatctgcagagaggcaggcagcccagcccaggggacccgttcctcttgaaccagtcattgcctgtggcaaatgtgtgtatgagaatgtggggggtggagggcggggccctgatgtggagtagacagtgcgcacctcaggcccacacacggccccgccctggggccttgagcgcaggcctcatctttctgtgccgcgggactctgcacctacctcacagggttgttgtgaggctcaaataaaacatcactcagcacgtggga

SEQ ID NO: 10521 - DNA, 544 bp, Homo sapiens
gcgtgagagatcatggagctaggaagtagcctagcagggcttcacccaggctctcaccagcacaccactctcctggtgccccacagacgtctgcacctgcagggttgtcttggggttggttaagtgatgtcaagctgtggagcactgctcagaggcatacagtcggcactacttaaatgctagactctatcatgacttgacgactgtacttcgtcacacttgttgcctgttaagtccaagtttcatgaccgtctccctcctccccacactctaactgctctatttccaccccaactccctcgaaaggcaaatggtaacgaagtgcttccaggtagaagccggattgatttcatgtaattatccctgacaaaattaaatattacttgcaattagtcttgggcaatttctctgctgagacacagcgaggcagtggggtgaaaaagggctgagttggcccagcccctgctgggctgagggctgagtctgttggcagctgtgtgtgctctgcccgagaatgccctgtcgccaggacttaaacccacag

SEQ ID NO: 10522 - DNA, 680 bp, Homo sapiens
gggggcaggatgattccttgttgctcttttctctcttccatataaactttcaatctgcctgttaggttccagctttcactggagttgggttaaaggggtacatcgacctaagagggattcgtacgtcatctccggtatcattttcctatccctgatcatggtgtatctcatttatttaggtattagtagaattactcatagatgctttatattttactaatattatgattggaatttgtaagttacattcttaagctgttgctagaaaacagaagtgcgtatctgttttgaagatttgtatgccatctcttgatgctgtaactagcaatcctgctaaattcttacgaatgcaaagacatttgtctgtcaattcctttaccttttctgtgtagaaagtcatatctaggagtggatggtttgcccccttgtgtaaactgtcggtacgtttctggagccactgttccagcgctttgttccagatgagtttcctgagtaagcctggcctttactttcctgtgctgcacctggcaggttttgtcacgagggctctttgccgtcttcagtgagttaaggcgctttccttttttctgctctctggaagagctcttgtgaggtctgatcctcactgccttcaaggcttggaggctcacagttcaggttccaagtactgatttttcttc

SEQ ID NO: 10523 - DNA, 451 bp, Homo sapiens
agggccagaacctcagctttatgagctcgggaggtggctgtggttgagctgaggtggaagagtcgcctgtgggaagtacatggccttctttcctgcaggtcccacggctgctcagctgcagctggaggctggacgtgagtcactcccacaggcaggggtgtttttccctttatagccacagagcaggcccaggaagcaatgaaggtatgggcacggccgccccaggacaacggcatttgtgaggagaggggaaaatgcatttcagcagctgatggagaagtaagataggaagggaaagccagtgtttctgagagagagagagtgggtccagaaagctggacatcagagcagaatcttctcttacgataaaacagaagttcagcggtttcctcatgctagttctgtgttctaggtaccaaaaataaacttattttcgtaatatagagtgaaa

SEQ ID NO: 10524 - DNA, 1986 bp, Homo sapiens
tacaaagtgacatctggtgctccctcagaaagaatgtggccccagaggcatgccagtggctttagactctctgggaggacatgtttgagagcaacagccccttccccatcttttcctttcttctcagcagttataaatctctctgcctgcagtaagtagagtgagtggctggtgaggaggtttgttgatgacactgacaatatctggtgactccctccagatgtgcactcagcagtgagctgggcagaggcgtgggaaggacgttggctgggagcagacggcctctgcaaatgaatctctagtttcctgcaacctgggagtgtccccatgagttttactttcctactttatgaagtgaacctgctttctttgggatttcatgtactcctaatgctttttctctccaggtatttctttcctgctacatattaggactcccaaggcaagagtgcacctttatttagacctgggagtaaagggaaagagttgcctgtctttcgtgtgttttcagctttggctctgtgggatcagttatgcctcattcctgaaaagggcctttttatccccccagaatgcttttgctttgccaataccaccttcctcagcctgccttttggaaaggttgagaagctaaaaagtcaggtaagagaaggcagagatggacttcagaacctgatttttaaattttaaggcaaggctggctgccactggtgagagtgatgcagcagcctagcgtgttcccagcagaggtctagtctttgccctaagaagtcaccgcgcttatgaggttgctatcacagtgcatgtggtaggttagatttgagaaatggttaggattgttctgttggataagtgcagacacctgcccagggaagcagctctttttttgtaagagttttcttggttactgaaatcaaatgggggaccagtttgttataggagacatctgtggccagcaaatctgaacagcttcctagagggaaagtacctcttttaaactaagttattatagacagtgaatgaatcctacccttaaaagagatgacggcagggtaagtgcaaagtaaaacctccttgctctagtctcttgggagagtattgtaatgaaagcagcgtttacttcgttgttgttgcattggggtgaaaaatctgagatgctggaatgatggcaatgtttgccttctctccttcccttcctgacagccagtgtgggccaggctccactctccatcttcacaccctgcccttgctccagtatttccattctgtttttctcctctgtctctttctgtctttctctcaaactccatcctgcttccacccctgcccgcttttcttctcctttcctggaagtaatcattaaacaaaagaaaaagttgaatgttctttggtgagtttccttcttctctgccttttccttctttagccagttcccctcaacccctgtgcactccataggaaggacaaacttacctgtctgcttccttcccatgtgcttctccccaaattttcatatagatatatacgtacactccttttggaataaacgaagaggtacattatatttgacacaaacttgggagtgttaagaggtcataagtgtttacctatcagataaccatctgtggctctgtgttggattttttttataccattaggaaaatgggaatttttttataggcctgccatacttctactttgccaaatagcactttattatcaagatacacccatggctcatttcagactcactgaactttttttatatgaatgcacagtcgtcatattttgggcagtctgtgagttcttggtaactcatccccttactacaaaagcactaagtgaacaatacaaaagtataaaagcacaaatttgaacttacatagtttagtttaagtatgtttcactagaaaatcaaatatttagatttctcacattgaaaatgcttaggattgaggtttagctgcttcctttaaaaaaaaaaaa

SEQ ID NO: 10525 - DNA, 240 bp, Homo sapiens
ttctttttttctgcaaagctgctttataggtggtgctgcatttttccaaaagtaggtacagtaatccacacttaacccactggatatatgtttcaagaccctcagtggatgtctgaaaccacagatagcaccaaactctatatatactatgttttttctatacatacatacatacatacctataataaagtttaatttataaattaggcacagtaagagattaacaaaaactagtaatag

SEQ ID NO: 10526 - DNA, 2902 bp, Homo sapiens
aggtatagacctgttgccagcccaaaagcacctgtaggaggtagctggaagcccctgttgaaggtcctacccagtgaggaaaacatgattggggacccacttaagaaagcagtctagccatatttttgcaggacagctctgctattcagaggtaccacttccacccccagtttatttggattctccaaagccagaaggctggaacagctaactcacacaaacagcaaaaatggcagctcactcctccctctaggaactgtatcccaaagaggtttcaaaactccatcaaccaaagagcgctggtggtggtagctggagaccctcattgggaagtactttccagtgagaaggaatgaaacgggggacctgctttaacaggcagtctggccatgtctttttagagcacctgtactgtgctaggagatcctttccgccccccggtcagcttgggctcttcaaagcctgaaggctggaatggctaagttgctcaagcagcaaagatggtggcccactcctctttctggtagctccatcccagggaggtgcagtgctgctaccaatggttggctggaatctaagccagtaggtcttaccacgtgaggcattgttgaagtgggtcctacagaccatcactatcagccccctggattctgcctctttcctatgggtatgttcaggggtgtaacctgctttgctcgagttgcagctactttttctgggaagcctggaaagccagtatctaaggctcttgaatctgcgcaggcctaagtggcttatctgctgagactccatgtagctctgtgtgttaaactgaaggccttggtgaagtgggttcatgagggtatctcctcacctgaaggttgcagagatctgtgggagaatcatgggtttctagggtcacacatgcactcactgctttactgggtggggaggttcccttggctccatgttgttcccaggtggcccattgtcctgccttgctttactccattctccatagattgtttctttgattattcccaatgcaagtacctggatgtttcagttgcaggtgctgtatttatgtataccttgcattcctgtctatgagaactgcacagtctagctgcttctagtcagcaatctcgatcacttttctctaaagggaacctacttttttatattaaaaggattcaatatttttcaaaagcaaatttcaatgtaatttaactcttacatttgatgctgtgtcttcatttctagaatttatgtgaaagaacatggtcagtggttgcaccagagttgtgagaggttcttctatattagatggacagatttatatacttttccatggaggattaagtaaactgaaacctaagacacacgaagaaattctaagtggaaaggccacttattagttagtttacagcagtatcgtaagtgacaggatgataggagtgtggtaagtgatcaggataataatctgcttagtaagagaaacaatttgaattttagaaggaaattgccttaccatttgcaaattaaggtaattaaaatacagtgaatttcaaaatgcctttttaatgacaatgtgtgaacttaatttgttttaataaaccaaaattgttgttattgtgttaaggctattttacattgaatgtgtatcttgccactgatgttaacttatcccatcttacccaaggttgtaggtaacaatatactattgggtgacagtggactaacatctctagtgatccctttgtcagtggtctttaacttaaaataatttagagaatatggtttctacaacttacatttttgttttcttgtaactacagattattatgatggttgtaatgaagattatgagtataattggagctatatgtttctgaattctgaacaactatttataaaattttatcctacttttttctgttgaacatatgacttctctggtctgctaaacacatacagacctttagttttggtttacatggatttaaatatatagatatatcactgtaaaataaacttcaggtgtaacagatttatagagaaagtaatcatatttgtttatggttgtgtacctactttgagaagaaaagaaaaatattagaatgaacagataattttacaagtgttgatcacttaccagcaaaccagaaacttcagagattttgaaagcaaatctattttctctgctgtgtattaaattcatttatctaaaatgttattgctcctggcttagaatcatcttgtgcaaattctctttttttgttgtttgtctgtttgcctgttgctcaccatagacataattttcttttcataaaacattctttgtataatcacctcagagattatgaaagtgactttgataaaatttaatggtgttcacaaaataattttcacgtgagtaatttcacagtgcgtgtattgtatgttatttagtgtattttatattttgtttcaattagagaatgctattgaatccagtttttgtttagttactgttcattttactttataaaattgacataattgagtttattaaatttattgggccaatttaagtaaacagttgaacgtttcataagtcatgaggtctttttggcatatacatgaagtaaacaaagacaatactagctatgtaatagaagctacataattagaagtaaatattctttttgaaattggcctgtggtctcaggtgaaaaatggaaaatatctatagtaaaaaaaatgacattaattctgcatatgaagagagcataattgtacccatgccacacaattgacttcacaattggaaacaaggtggaaggaggtgggacattttaggcaaaactaaggtggaaaaccttgttaaatttttcaggttatgtttctacctttaaacatctactgggggaggcagaggcca

SEQ ID NO: 10527 - DNA, 2651 bp, Homo sapiens
aggtatagacctgttgccagcccaaaagcacctgtaggaggtagctggaagcccctgttgaaggtcctacccagtgaggaaaacatgattggggacccacttaagaaagcagtctagccatatttttgcaggacagctctgctattcagaggtaccacttccacccccagtttatttggattctccaaagccagaaggctggaacagctaactcacacaaacagcaaaaatggcagctcactcctccctctaggaactgtatcccaaagaggtttcaaaactccatcaaccaaagagcgctggtggtggtagctggagaccctcattgggaagtactttccagtgagaaggaatgaaacgggggacctgctttaacaggcagtctggccatgtctttttagagcacctgtactgtgctaggagatcctttccgccccccggtcagcttgggctcttcaaagcctgaaggctggaatggctaagttgctcaagcagcaaagatggtggcccactcctctttctggtagctccatcccagggaggtgcagtgctgctaccaatggttggctggaatctaagccagtaggtcttaccacgtgaggcattgttgaagtgggtcctacagaccatcactatcagccccctggattctgcctctttcctatgggtatgttcaggggtgtaacctgctttgctcgagttgcagctactttttctgggaagcctggaaagccagtatctaaggctcttgaatctgcgcaggcctaagtggcttatctgctgagactccatgtagctctgtgtgttaaactgaaggccttggtgaagtgggttcatgagggtatctcctcacctgaaggttgcagagatctgtgggagaatcatgggtttctagggtcacacatgcactcactgctttactgggtggggaggttcccttggctccatgttgttcccaggtggcccattgtcctgccttgctttactccattctccatagattgtttctttgattattcccaatgcaagtacctggatgtttcagttgcaggtgctgtatttatgtataccttgcattcctgtctatgagaactgcacagtctagctgcttctagtcagcaatctcgatcacttttctctaaagggaacctacttttttatattaaaaggattcaatatttttcaaaagcaaatttcaatgtaatttaactcttacatttgatgctgtgtcttcatttctagaatttatgtgaaagaacatggtcagtggttgcaccagagttgtgagaggttcttctatattagatggacagatttatatacttttccatggaggattaagtaaactgaaacctaagacacacgaagaaattctaagtggaaaggccacttattagttagtttacagcagtatcgtaagtgacaggatgataggagtgtggtaagtgatcaggataataatctgcttagtaagagaaacaatttgaattttagaaggaaattgccttaccatttgcaaattaaggtaattaaaatacagtgaatttcaaaatgcctttttaatgacaatgtgtgaacttaatttgttttaataaaccaaaattgttgttattgtgttaaggctattttacattgaatgtgtatcttgccactgatgttaacttatcccatcttacccaaggttgtaggtaacaatatactattgggtgacagtggactaacatctctagtgatccctttgtcagtggtctttaacttaaaataatttagagaatatggtttctacaacttacatttttgttttcttgtaactacagattattatgatggttgtaatgaagattatgagtataattggagctatatgtttctgaattctgaacaactatttataaaattttatcctacttttttctgttgaacatatgacttctctggtctgctaaacacatacagacctttagttttggtttacatggatttaaatatatagatatatcactgtaaaataaacttcaggtgtaacagatttatagagaaagtaatcatatttgtttatggttgtgtacctactttgagaagaaaagaaaaatattagaatgaacagataattttacaagtgttgatcacttaccagcaaaccagaaacttcagagattttgaaagcaaatctattttctctgctgtgtattaaattcatttatctaaaatgttattgctcctggcttagaatcatcttgtgcaaattctctttttttgttgtttgtctgtttgcctgttgctcaccatagacataattttcttttcataaaacattctttgtataatcacctcagagattatgaaagtgactttgataaaatttaatggtgttcacaaaataattttcacgtgagtaatttcacagtgcgtgtattgtatgtattaggtatatattgttgcattagagaatgtatgatcagttgttagtagtcctttactcataatggctatgggtttaaattttgggcattagtaccggccgtcaaaaccagaggctgggataagagaaagagatgttgttagccataaaatcttgatgaaaaaagggaaaacgggcacccattgagggaagaatagggaaggaggtgaagggacacaattgcggatga

SEQ ID NO: 10528 - DNA, 279 bp, Homo sapiens
ctaatgccacactgaggaggactattagaaccttatatttcctggaatctgaatcaaatgatgaaaggcatggccccatgtcccattcccccacaggaatagacgactgcagaaattacccttccaaaaaaagatgtctcttaaagaaagcagcaggcagctagaggaggaggagtaagagctgaggtaccccagaggcagcccccctgagtctagcacagactggcaccaaaggtgttcaatagcaatttgctggatgggtgaatatgtgggtgaatg

SEQ ID NO: 10529 - DNA, 358 bp, Homo sapiens
gctacagctcgaatgaatcgtttattcttctgcatcacttccagcctcgtccacagcctagccacacagcttcccaaccaacaacaagcaacacagccgtgggtccagattatagcccagtggggagggggaataggaaggtctcgaaagaacctgtgaagaccctgcacttggcatgttgcaaataggttgtgcttgcacccctaggccttgagttgcccacgttgggcaactggagcaggtggagctcctggccagttagctctcaccatgaacagcacatccatttacccaagagcaccacacaaatatcatcattttctatatgtgctatgtcctgaaacaaaaaggggggatg

SEQ ID NO: 10530 - DNA, 521 bp, Homo sapiens
cttttttttttttttttgagatggagtctcgctctgttgcccaggctggagtgcagtggcgcgatctcggctcactgcaagctccgcctcccgggttcacagcactatcctgcctcagcctccaaattagctgggactacaggcacccaccaccacgccccgctaatctttttgtatttttagtagagccaaggtttcaccgtgtgttagccaggactgtctcgatctcctgacctcctgacctcgtgatctgcccgcctcagccttccaaagtgctgggattacaggcacgagccactgtgcccggccggaggctagttaaacttaatcattaggttgagaaatttgaaaggctccaacaaccccaattttacatttgtatacagaaactcacaaaattactaagttgagtggaacctggaaggaacaataccgtgatgaagagaagggaaacgcctgggactgaagaacacatttcctactttctgctcatgaatacagacaataaagaattaatttcc

SEQ ID NO: 10531 - DNA, 549 bp, Homo sapiens
gtcacagagacttagtgaagtgcacacattgctcacctgggtgaactgaggtccagcgggggaaggcttcctcctgttgtaatcactaaccccaactctgtctcccttgcccgattcattcattcgttaattaattcatccaacatcctgtccccaagaagctcagtctggggacatactgatccagttaaatgcgagtgcttcctagttatacatggcgactgctgagaagggactccagagtccaggcacctacctcccaggggctcaccgttcactcctctagcctcatttagagctcgcattaagagcacgggatctggatccacactgtttggattcaaatcacaacttcaccacttagcagctgtgtgttctgggaaaatgacccaccttctctgtgcctccattttctcacctgtaaaacgggctcccaggctggtgggagggtttcaggtgtaagacatggagagtcctttagcgaacatgtagactggcaataaactcaataaatggtgactgttataattaatcctcggaaccatccta

SEQ ID NO: 10532 - DNA, 191 bp, Homo sapiens
gttgacccaaggctggagggcctctgttttaatgtgagctccttagctgtccccttgaattcccagaaagcgtggcagggcctgcctagttctgggtgctcatcccgaccccgcctgagggttttcagtgtgtgaattactgcagtaggaaatatggagaagtgattctcctccctttactacggtattgg

SEQ ID NO: 10533 - DNA, 466 bp, Homo sapiens
taagtgaacatctcggaatcataaaagtgaagcagttgtttacttggacagcagattacaggaaggagaaactaagtgtggtcaactgactagaaacagcaagacacgatagatcacaatggaaatgaaaaacaggagaaaactaaataaaccaatgtttattgcacatcaaattaccatactaggcacacgtgtccatattaaatggaagaatacgaacataacctaagacaaatgaagcaagagttaggaagactagagactaaaataaaatgaagcttgagaaaaggactgggaacacaatttaaaaactagcaaagggtaagtatttaaaggtgaatttggtgcaaggtgatctgcctgctagactgtggcatgttaatgaatgctagagagcaggctgaactgccaggatcctgttttacgtctgtaaactacaaaaaaaaaaaaaaaagcccccagaaat

SEQ ID NO: 10534 - DNA, 270 bp, Homo sapiens
taaatcccatatattaatcctaagactataaaacaggaaatacaattattttcaaaaatttatataccaactttcatttaaaatgtctatattcataaccacagaaaataggcatcaatcatccaataatatagatagaaagaaaaaagcaaaatagctagaggcttaatccaggtatcatagtaaatagataacttattttctaggtgaccaatttagaagcaatctactcaaatacatcctgaggtttgaaaaatgttattaaatctt

SEQ ID NO: 10535 - DNA, 442 bp, Homo sapiens
ttctcacccacagatgcgggcggcagcacatcacaagtaagcagcattcatcactctgcacaataaccactgtgacccagcctccctgcacaattgacacagttattgtggctatgacagcaagatcccaactaggaacacaattagcgtctattgcaagaaagaatgctctacattgttgtttagcattgaagcttttcagaaaggggaggaaaattattgtaaaggcaggctaacaaaacaataatgctccactagtgcccaaggttacagtggaggaggaggaggacaggagtggaagctatcacatcctagttgttcttcagtacatagctaaagaattgtaacaggaagcacttttataaagaataaaacaaacaaaaagaacttgtaaaaaagagcaattttatctttttcaaccaattatctcagtggatttttg

SEQ ID NO: 10536 - DNA, 308 bp, Homo sapiens
ggggcagtgtcttatatatgatacacattttatcatatcatcttctatagataatataatgattaacacaaaacactcttctacacacacagaatactcttgtatcactttgggttttttttccttcgtgtgtgtgtgtgtgtgtgtgtgtgtgtgtgtgtgtgtgtgttatgagacaaggtctggctctgtcacccaggctgcagtgcagtgttgcagtcttggcccatgccccaccgcagcctctggaatagctgtctgcaggccaggcacggtagctcaggcatgtcgtctcagcactcttggag

SEQ ID NO: 10537 - DNA, 3425 bp, Homo sapiens
agcggagcgcgagccgagccgcggccagctccggcgggcagggggggcgctggagcgcagcgcagcgcagccccatcagtccgcaaagcggaccgagctggaagtcgagcgctgccgcgggaggcgggcgatgggggcaggtgccaccggccgcgccatggacgggccgcgcctgctgctgttgctgcttctgggggtgtcccttggaggtgccaaggaggcatgccccacaggcctgtacacacacagcggtgagtgctgcaaagcctgcaacctgggcgagggtgtggcccagccttgtggagccaaccagaccgtgtgtgagccctgcctggacagcgtgacgttctccgacgtggtgagcgcgaccgagccgtgcaagccgtgcaccgagtgcgtggggctccagagcatgtcggcgccgtgcgtggaggccgacgacgccgtgtgccgctgcgcctacggctactaccaggatgagacgactgggcgctgcgaggcgtgccgcgtgtgcgaggcgggctcgggcctcgtgttctcctgccaggacaagcagaacaccgtgtgcgaggagtgccccgacggcacgtattccgacgaggccaaccacgtggacccgtgcctgccctgcaccgtgtgcgaggacaccgagcgccagctccgcgagtgcacacgctgggccgacgccgagtgcgaggagatccctggccgttggattacacggtccacacccccagagggctcggacagcacagcccccagcacccaggagcctgaggcacctccagaacaagacctcatagccagcacggtggcaggtgtggtgaccacagtgatgggcagctcccagcccgtggtgacccgaggcaccaccgacaacctcatccctgtctattgctccatcctggctgctgtggttgtgggccttgtggcctacatagccttcaagaggtggaacagctgcaagcagaacaagcaaggagccaacagccggccagtgaaccagacgcccccaccagagggagaaaaactccacagcgacagtggcatctccgtggacagccagagcctgcatgaccagcagccccacacgcagacagcctcgggccaggccctcaagggtgacggaggcctctacagcagcctgcccccagccaagcgggaggaggtggagaagcttctcaacggctctgcgggggacacctggcggcacctggcgggcgagctgggctaccagcccgagcacatagactcctttacccatgaggcctgccccgttcgcgccctgcttgcaagctgggccacccaggacagcgccacactggacgccctcctggccgccctgcgccgcatccagcgagccgacctcgtggagagtctgtgcagtgagtccactgccacatccccggtgtgagcccaaccggggagcccccgccccgccccacattccgacaaccgatgctccagccaacccctgtggagcccgcacccccaccctttggggggggcccgcctggcagaactgagctcctctgggcaggacctcagagtccaggccccaaaaccacagccctgtcagtgcagcccgtgtggccccttcacttctgaccacacttcctgtccagagagagaagtgcccctgctgcctccccaaccctgcccctgccccgtcaccatctcaggccacctgcccccttctcccacactgctaggtgggccagcccctcccaccacagcaggtgtcatatatggggggccaacaccagggatggtactagggggaagtgacaaggccccagagactcagagggaggaatcgaggaaccagagccatggactctacactgtgaacttggggaacaagggtggcatcccagtggcctcaaccctccctcagcccctcttgccccccaccccagcctaagatgaagaggatcggaggcttgtcagagctgggaggggttttcgaagctcagcccacccccctcattttggatataggtcagtgaggcccagggagaggccatgattcgcccaaagccagacagcaacggggaggccaagtgcaggctggcaccgccttctctaaatgaggggcctcaggtttgcctgagggcgaggggagggtggcaggtgaccttctgggaaatggcttgaagccaagtcagctttgccttccacgctgtctccagacccccaccccttccccactgcctgcccacccgtggagatgggatgcttgcctagggcctggtccatgatggagtcaggtttggggttcgtggaaagggtgctgcttccctctgcctgtccctctcaggcatgcctgtgtgacatcagtggcatggctccagtctgctgccctccatcccgacatggacccggagctaacactggcccctagaatcagcctaggggtcagggaccaaggacccctcaccttgcaacacacagacacacgcacacacacacacaggaggagaaatctcacttttctccatgagttttttctcttgggctgagactggatactgcccggggcagctgccagagaagcatcggagggaattgaggtctgctcggccgtcttcactcgcccccgggtttggcgggccaaggactgccgaccgaggctggagctggcgtctgtcttcaagggcttacacgtggaggaatgctcccccatcctccccttccctgcaaacatggggttggctgggcccagaaggttgtgatgaagaaaagcgggccagtgtgggaatgcggcaagaaggaattgacttcgactgtgacctgtggggatttctcccagctctagacaaccctgcaaaggactgttttttcctgagcttggccagaagggggccatgaggcctcagtggactttccaccccctccctggcctgttctgttttgcctgaagttggagtgagtgtggctcccctctatttagcatgacaagccccaggcaggctgtgcgctgacaaccaccgctccccagcccagggttcccccagccctgtggaagggactaggagcactgtagtaaatggcaattctttgacctcaacctgtgatgaggggaggaaactcacctgctggcccctcacctgggcacctggggagtgggacagagtctgggtgtatttattttcctccccagcaggtggggagggggtttgggggcttgcaagtatgttttagcatgtgtttggttctggggcccctttttactccccttgagctgagatggaacccttttggcccccgagctgggggccatgagctccagacccccagcaaccctcctatcacctcccctccttgcctcctgtgtaatcatttcttgggccctcctgaaacttacacacaaaacgttaagtgatgaacattaaatagcaaagaaagaaaaatagtacaaagag

SEQ ID NO: 10538 - DNA, 3703 bp, Homo sapiens
gagtctggggctgcgcgccgctccccacctagctgcgcgacccgagcgcagcgcccaccgcgctccgtgggctcccgcgcctcgaagggtcgggatccggtctgagcctctcctggctctcggtgcaagccgctgggcacctaacgagacgggggcgcccggacgcctcggattctgtagcgcggtatcccgggccaccgactcggcaaaggtcggcgggtcctccgggtggtccgacgagattgtcagatgtggcctgctttatggccatgaaccgaatgccctggaaggtctggcaacggaggaggcgtcttcactctccccgccagcatctttcatcagagcactgcgccccaaattccggctttacagatacggagactgaggctctgagagtttaaacgacttggccaagatctcacagcaagttgggccagagtcgtggctagactccccgacctgattcccagctcggtgtcccttggaggtgccaaggaggcatgccccacaggcctgtacacacacagcggtgagtgctgcaaagcctgcaacctgggcgagggtgtggcccagccttgtggagccaaccagaccgtgtgtgagccctgcctggacagcgtgacgttctccgacgtggtgagcgcgaccgagccgtgcaagccgtgcaccgagtgcgtggggctccagagcatgtcggcgccgtgcgtggaggccgacgacgccgtgtgccgctgcgcctacggctactaccaggatgagacgactgggcgctgcgaggcgtgccgcgtgtgcgaggcgggctcgggcctcgtgttctcctgccaggacaagcagaacaccgtgtgcgaggagtgccccgacggcacgtattccgacgaggccaaccacgtggacccgtgcctgccctgcaccgtgtgcgaggacaccgagcgccagctccgcgagtgcacacgctgggccgacgccgagtgcgaggagatccctggccgttggattacacggtccacacccccagagggctcggacagcacagcccccagcacccaggagcctgaggcacctccagaacaagacctcatagccagcacggtggcaggtgtggtgaccacagtgatgggcagctcccagcccgtggtgacccgaggcaccaccgacaacctcatccctgtctattgctccatcctggctgctgtggttgtgggccttgtggcctacatagccttcaagaggtggaacagctgcaagcagaacaagcaaggagccaacagccggccagtgaaccagacgcccccaccagagggagaaaaactccacagcgacagtggcatctccgtggacagccagagcctgcatgaccagcagccccacacgcagacagcctcgggccaggccctcaagggtgacggaggcctctacagcagcctgcccccagccaagcgggaggaggtggagaagcttctcaacggctctgcgggggacacctggcggcacctggcgggcgagctgggctaccagcccgagcacatagactcctttacccatgaggcctgccccgttcgcgccctgcttgcaagctgggccacccaggacagcgccacactggacgccctcctggccgccctgcgccgcatccagcgagccgacctcgtggagagtctgtgcagtgagtccactgccacatccccggtgtgagcccaaccggggagcccccgccccgccccacattccgacaaccgatgctccagccaacccctgtggagcccgcacccccaccctttggggggggcccgcctggcagaactgagctcctctgggcaggacctcagagtccaggccccaaaaccacagccctgtcagtgcagcccgtgtggccccttcacttctgaccacacttcctgtccagagagagaagtgcccctgctgcctccccaaccctgcccctgccccgtcaccatctcaggccacctgcccccttctcccacactgctaggtgggccagcccctcccaccacagcaggtgtcatatatggggggccaacaccagggatggtactagggggaagtgacaaggccccagagactcagagggaggaatcgaggaaccagagccatggactctacactgtgaacttggggaacaagggtggcatcccagtggcctcaaccctccctcagcccctcttgccccccaccccagcctaagatgaagaggatcggaggcttgtcagagctgggaggggttttcgaagctcagcccacccccctcattttggatataggtcagtgaggcccagggagaggccatgattcgcccaaagccagacagcaacggggaggccaagtgcaggctggcaccgccttctctaaatgaggggcctcaggtttgcctgagggcgaggggagggtggcaggtgaccttctgggaaatggcttgaagccaagtcagctttgccttccacgctgtctccagacccccaccccttccccactgcctgcccacccgtggagatgggatgcttgcctagggcctggtccatgatggagtcaggtttggggttcgtggaaagggtgctgcttccctctgcctgtccctctcaggcatgcctgtgtgacatcagtggcatggctccagtctgctgccctccatcccgacatggacccggagctaacactggcccctagaatcagcctaggggtcagggaccaaggacccctcaccttgcaacacacagacacacgcacacacacacacaggaggagaaatctcacttttctccatgagttttttctcttgggctgagactggatactgcccggggcagctgccagagaagcatcggagggaattgaggtctgctcggccgtcttcactcgcccccgggtttggcgggccaaggactgccgaccgaggctggagctggcgtctgtcttcaagggcttacacgtggaggaatgctcccccatcctccccttccctgcaaacatggggttggctgggcccagaaggttgtgatgaagaaaagcgggccagtgtgggaatgcggcaagaaggaattgacttcgactgtgacctgtggggatttctcccagctctagacaaccctgcaaaggactgttttttcctgagcttggccagaagggggccatgaggcctcagtggactttccaccccctccctggcctgttctgttttgcctgaagttggagtgagtgtggctcccctctatttagcatgacaagccccaggcaggctgtgcgctgacaaccaccgctccccagcccagggttcccccagccctgtggaagggactaggagcactgtagtaaatggcaattctttgacctcaacctgtgatgaggggaggaaactcacctgctggcccctcacctgggcacctggggagtgggacagagtctgggtgtatttattttcctccccagcaggtggggagggggtttgggggcttgcaagtatgttttagcatgtgtttggttctggggcccctttttactccccttgagctgagatggaacccttttggcccccgagctgggggccatgagctccagacccccagcaaccctcctatcacctcccctccttgcctcctgtgtaatcatttcttgggccctcctgaaacttacacacaaaacgttaagtgatgaacattaaatagcaaagaaagaaaaatagtacaaagag

SEQ ID NO: 10539 - DNA, 3372 bp, Homo sapiens
agcggagcgcgagccgagccgcggccagctccggcgggcagggggggcgctggagcgcagcgcagcgcagccccatcagtccgcaaagcggaccgagctggaagtcgagcgctgccgcgggaggcgggcgatgggggcaggtgccaccggccgcgccatggacgggccgcgcctgctgctgttgctgcttctgggggtgtcccttggaggtgccaaggaggcatgccccacaggcctgtacacacacagcggtgagtgctgcaaagcctgcaacctgggcgagggtgtggcccagccttgtggagccaaccagaccgtgtgtgagccctgcctggacagcgtgacgttctccgacgtggtgagcgcgaccgagccgtgcaagccgtgcaccgagtgcgtggggctccagagcatgtcggcgccgtgcgtggaggccgacgacgccgtgtgccgctgcgcctacggctactaccaggatgagacgactgggcgctgcgaggcgtgccgcgtgtgcgaggcgggctcgggcctcgtgttctcctgccaggacaagcagaacaccgtgtgcgaggagtgccccgacggcacgtattccgacgaggccaaccacgtggacccgtgcctgccctgcaccgtgtgcgaggacaccgagcgccagctccgcgagtgcacacgctgggccgacgccgagtgcgaggagatccctggccgttggattacacggtccacacccccagagggctcggacagcacagcccccagcacccaggagcctgaggcacctccagaacaagacctcatagccagcacggtggcaggtgtggtgaccacagtgatgggcagctcccagcccgtggtgacccgaggcaccaccgacaacctcatccctgtctattgctccatcctggctgctgtggttgtgggccttgtggcctacatagccttcaagaggtggaacagctgcaagcagaacaagcaaggagccaacagccggccagtgaaccagacgcccccaccagagggagaaaaactccacagcgacagtggcatctccgtggacagccagagcctgcatgaccagcagccccacacgcagacagcctcgggccaggccctcaagggtgacggaggcctctacagcagcctgcccccagccaagcgggaggaggtggagaagcttctcaacggctctgcgggggacacctggcggcacctggcgggcgagctgggctaccagcccgagcacatagactcctttacccatgaggcctgccccgttcgcgccctgcttgcaagctgggccacccaggacagcgccacactggacgccctcctggccgccctgcgccgcatccagcgagccgacctcgtggagagtctgtgcagtgagtccactgccacatccccggtgtgagcccaaccggggagcccccgccccgccccacattccgacaaccgatgctccagccaacccctgtggagcccgcacccccaccctttggggggggcccgcctggcagaactgagctcctctgggcaggacctcagagtccaggccccaaaaccacagccctgtcagtgcagcccgtgtggccccttcacttctgaccacacttcctgtccagagagagaagtgcccctgctgcctccccaaccctgcccctgccccgtcaccatctcaggccacctgcccccttctcccacactgctaggtgggccagcccctcccaccacagcaggtgtcatatatggggggccaacaccagggatggtactagggggaagtgacaaggccccagagactcagagggaggaatcgaggaaccagagccatggactctacactgtgaacttggggaacaagggtggcatcccagtggcctcaaccctccctcagcccctcttgccccccaccccagcctaagatgaagaggatcggaggcttgtcagagctgggaggggttttcgaagctcagcccacccccctcattttggatataggtcagtgaggcccagggagaggccatgattcgcccaaagccagacagcaacggggaggccaagtgcaggctggcaccgccttctctaaatgaggggcctcaggtttgcctgagggcgaggggagggtggcaggtgaccttctgggaaatggcttgaagccaagtcagctttgccttccacgctgtctccagacccccaccccttccccactgcctgcccacccgtggagatgggatgcttgcctagggcctggtccatgatggagtcaggtttggggttcgtggaaagggtgctgcttccctctgcctgtccctctcaggcatgcctgtgtgacatcagtggcatggctccagtctgctgccctccatcccgacatggacccggagctaacactggcccctagaatcagcctaggggtcagggaccaaggacccctcaccttgcaacacacagacacacgcacacacacacacaggaggagaaatctcacttttctccatgagttttttctcttgggctgagactggatactgcccggggcagctgccagagaagcatcggagggaattgaggtctgctcggccgtcttcactcgcccccgggtttggcgggccaaggactgccgaccgaggctggagctggcgtctgtcttcaagggcttacacgtggaggaatgctcccccatcctccccttccctgcaaacatggggttggctgggcccagaaggttgtgatgaagaaaagcgggccagtgtgggaatgcggcaagaaggaattgacttcgactgtgacctgtggggatttctcccagctctagacaaccctgcaaaggactgttttttccctggcctgttctgttttgcctgaagttggagtgagtgtggctcccctctatttagcatgacaagccccaggcaggctgtgcgctgacaaccaccgctccccagcccagggttcccccagccctgtggaagggactaggagcactgtagtaaatggcaattctttgacctcaacctgtgatgaggggaggaaactcacctgctggcccctcacctgggcacctggggagtgggacagagtctgggtgtatttattttcctccccagcaggtggggagggggtttgggggcttgcaagtatgttttagcatgtgtttggttctggggcccctttttactccccttgagctgagatggaacccttttggcccccgagctgggggccatgagctccagacccccagcaaccctcctatcacctcccctccttgcctcctgtgtaatcatttcttgggccctcctgaaacttacacacaaaacgttaagtgatgaacattaaatagcaaagaaagaaaaatagtacaaagag

SEQ ID NO: 10540 - DNA, 3340 bp, Homo sapiens
  misc_feature (3263)..(3263): n is a, c, g, or t
agcggagcgcgagccgagccgcggccagctccggcgggcagggggggcgctggagcgcagcgcagcgcagccccatcagtccgcaaagcggaccgagctggaagtcgagcgctgccgcgggaggcgggcgatgggggcaggtgccaccggccgcgccatggacgggccgcgcctgctgctgttgctgcttctgggggtgtcccttggaggtgccaaggaggcatgccccacaggcctgtacacacacagcggtgagtgctgcaaagcctgcaacctgggcgagggtgtggcccagccttgtggagccaaccagaccgtgtgtgagccctgcctggacagcgtgacgttctccgacgtggtgagcgcgaccgagccgtgcaagccgtgcaccgagtgcgtggggctccagagcatgtcggcgccgtgcgtggaggccgacgacgccgtgtgccgctgcgcctacggctactaccaggatgagacgactgggcgctgcgaggcgtgccgcgtgtgcgaggcgggctcgggcctcgtgttctcctgccaggacaagcagaacaccgtgtgcgaggagtgccccgacggcacgtattccgacgaggccaaccacgtggacccgtgcctgccctgcaccgtgtgcgaggacaccgagcgccagctccgcgagtgcacacgctgggccgacgccgagtgcgaggagatccctggccgttggattacacggtccacacccccagagggctcggacagcacagcccccagcacccaggagcctgaggcacctccagaacaagacctcatagccagcacggtggcaggtgtggtgaccacagtgatgggcagctcccagcccgtggtgacccgaggcaccaccgacaacctcatccctgtctattgctccatcctggctgctgtggttgtgggccttgtggcctacatagccttcaagaggtggaacagctgcaagcagaacaagcaaggagccaacagccggccagtgaaccagacgcccccaccagagggagaaaaactccacagcgacagtggcatctccgtggacagccagagcctgcatgaccagcagccccacacgcagacagcctcgggccaggccctcaagggtgacggaggcctctacagcagcctgcccccagccaagcgggaggaggtggagaagcttctcaacggctctgcgggggacacctggcggcacctggcgggcgagctgggctaccagcccgagcacatagactcctttacccatgaggcctgccccgttcgcgccctgcttgcaagctgggccacccaggacagcgccacactggacgccctcctggccgccctgcgccgcatccagcgagccgacctcgtggagagtctgtgcagtgagtccactgccacatccccggtgtgagcccaaccggggagcccccgccccgccccacattccgacaaccgatgctccagccaacccctgtggagcccgcacccccaccctttggggggggcccgcctggcagaactgagctcctctgggcaggacctcagagtccaggccccaaaaccacagccctgtcagtgcagcccgtgtggccccttcacttctgaccacacttcctgtccagagagagaagtgcccctgctgcctccccaaccctgcccctgccccgtcaccatctcaggccacctgcccccttctcccacactgctaggtgggccagcccctcccaccacagcaggtgtcatatatggggggccaacaccagggatggtactagggggaagtgacaaggccccagagactcagagggaggaatcgaggaaccagagccatggactctacactgtgaacttggggaacaagggtggcatcccagtggcctcaaccctccctcagcccctcttgccccccaccccagcctaagatgaagaggatcggaggcttgtcagagctgggaggggttttcgaagctcagcccacccccctcattttggatataggtcagtgaggcccagggagaggccatgattcgcccaaagccagacagcaacggggaggccaagtgcaggctggcaccgccttctctaaatgaggggcctcaggtttgcctgagggcgaggggagggtggcaggtgaccttctgggaaatggcttgaagccaagtcagctttgccttccacgctgtctccagacccccaccccttccccactgcctgcccacccgtggagatgggatgcttgcctagggcctggtccatgatggagtcaggtttggggttcgtggaaagggtgctgcttccctctgcctgtccctctcaggcatgcctgtgtgacatcagtggcatggctccagtctgctgccctccatcccgacatggacccggagctaacactggcccctagaatcagcctaggggtcagggaccaaggacccctcaccttgcaacacacagacacacgcacacacacacacaggaggagaaatctcacttttctccatgagttttttctcttgggctgagactggatactgcccggggcagctgccagagaagcatcggagggaattgaggtctgctcggccgtcttcactcgcccccgggtttggcgggccaaggactgccgaccgaggctggagctggcgtctgtcttcaagggcttacacgtggaggaatgctcccccatcctccccttccctgcaaacatggggttggctgggcccagaaggttgtgatgaagaaaagcgggccagtgtgggaatgcggcaagaaggaattgacttcgactgtgacctgtggggatttctcccagctctagacaaccctgcaaaggactgttttttcctgagcttggccagaagggggccatgaggcctcagtggactttccaccccctccctggcctgttctgttttgcctgaagttggagtgagtgtggctcccctctatttagcatgacaagccccaggcaggctgtgcgctgacaaccaccgctccccagcccagggttcccccagccctgtggaagggactaggagcactgtagtaaatggcaattctttgacctcaacctgtgatgaggggaggaaactcacctgctggcccctcacctgggcacctggggagtgggacagagtctgggtgtatttattttcctccccagcaggtggggagggggtttgggggcaaggaataattatttaacttctggtcagaggtgaaaccacctgttagaacccatacatcggggatggaactacccnaggaaaatgaactggggagggttaaccgaatattactcacatgcatgtctttgggtccaaacagggccttttgaatt

SEQ ID NO: 10541 - DNA, 2523 bp, Homo sapiens
agcggagcgcgagccgagccgcggccagctccggcgggcagggggggcgctggagcgcagcgcagcgcagccccatcagtccgcaaagcggaccgagctggaagtcgagcgctgccgcgggaggcgggcgatgggggcaggtgccaccggccgcgccatggacgggccgcgcctgctgctgttgctgcttctgggggtgtcccttggaggtgccaaggaggcatgccccacaggcctgtacacacacagcggtgagtgctgcaaagcctgcaacctgggcgagggtgtggcccagccttgtggagccaaccagaccgtgtgtgagccctgcctggacagcgtgacgttctccgacgtggtgagcgcgaccgagccgtgcaagccgtgcaccgagtgcgtggggctccagagcatgtcggcgccgtgcgtggaggccgacgacgccgtgtgccgctgcgcctacggctactaccaggatgagacgactgggcgctgcgaggcgtgccgcgtgtgcgaggcgggctcgggcctcgtgttctcctgccaggacaagcagaacaccgtgtgcgaggagtgccccgacggcacgtattccgacgaggccaaccacgtggacccgtgcctgccctgcaccgtgtgcgaggacaccgagcgccagctccgcgagtgcacacgctgggccgacgccgagtgcgaggagatccctggccgttggattacacggtccacacccccagagggctcggacagcacagcccccagcacccaggagcctgaggcacctccagaacaagacctcatagccagcacggtggcaggtgtggtgaccacagtgatgggcagctcccagcccgtggtgacccgaggcaccaccgacaacctcatccctgtctattgctccatcctggctgctgtggttgtgggccttgtggcctacatagccttcaagaggtggaacagctgcaagcagaacaagcaaggagccaacagccggccagtgaaccagacgcccccaccagagggagaaaaactccacagcgacagtggcatctccgtggacagccagagcctgcatgaccagcagccccacacgcagacagcctcgggccaggccctcaagggtgacggaggcctctacagcagcctgcccccagccaagcgggaggaggtggagaagcttctcaacggctctgcgggggacacctggcggcacctggcgggcgagctgggctaccagcccgagcacatagactcctttacccatgaggcctgccccgttcgcgccctgcttgcaagctgggccacccaggacagcgccacactggacgccctcctggccgccctgcgccgcatccagcgagccgacctcgtggagagtctgtgcagtgagtccactgccacatccccggtgtgagcccaaccggggagcccccgccccgccccacattccgacaaccgatgctccagccaacccctgtggagcccgcacccccaccctttggggggggcccgcctggcagaactgagctcctctgggcaggacctcagagtccaggccccaaaaccacagccctgtcagtgcagcccgtgtggccccttcacttctgaccacacttcctgtccagagagagaagtgcccctgctgcctccccaaccctgcccctgccccgtcaccatctcaggccacctgcccccttctcccacactgctaggtgggccagcccctcccaccacagcaggtgtcatatatggggggccaacaccagggatggtactagggggaagtgacaaggccccagagactcagagggaggaatcgaggaaccagagccatggactctacactgtgaacttggggaacaagggtggcatcccagtggcctcaaccctccctcagcccctcttgccccccaccccagcctaagatgaagaggatcggaggcttgtcagagctgggaggggttttcgaagctcagcccacccccctcattttggatataggtcagtgaggcccagggagaggccatgattcgcccaaagccagacagcaacggggaggccaagtgcaggctggcaccgccttctctaaatgaggggcctcaggtttgcctgagggcgaggggagggtggcaggtgaccttctgggaaatggcttgaagccaagtcagctttgccttccacgctgtctccagacccccaccccttccccactgcctgcccacccgtggagatgggatgcttgcctagggcctggtccatgatggagtcaggtttggggttcgtggaaagggtgctgcttccctctgcctgtccctctcaggcatgcctgtgtgacatcagtggcatggctccagtctgctgccctccatcccgacatggacccggagctaacactggcccctagaatcagcctaggggtcagggaccaaggacccctcactttcttgggccctcctgaaacttacacacaaaacgttaagtgatgaacattaaatagcaaagaaagaaaaatagtacaaagag

SEQ ID NO: 10542 - DNA, 4477 bp, Homo sapiens
  misc_feature (1950)..(1950): n is a, c, g, or t
  misc_feature (1992)..(1992): n is a, c, g, or t
aggtctcagccacgtgactgtgttccggctcggtaaagatggcggcgcccagggcggtagcgtgaaacttggtggaagacgctgaccagtcgtgttggaatcaaaacagcggggaccctgcgccatgtcgcgactgatcgtgaagaatctcccgaatgggatgaaggaggagcgtttcaggcagctgtttgccgccttcggcacgctgacagactgcagcctgaagttcaccaaagatggcaagttccgcaagtttggttttattggcttcaagtccgaggaagaggcccagaaggcacagaagcatttcaacaagagcttcatcgacacatcccggatcacagtggagttctgcaagtcattcggggacccggccaaacccagagcctggagcaaacatgcccagaaaccaagccagcccaagcagcctccaaaagactctactactccagaaattaagaaagatgagaagaagaaaaaggtggcaggtcaactggagaagctgaaggaggatacagagttccaggagtttctgtcagttcatcagaggcgggcgcaggcagccacttgggcgaatgatggcctggatgctgagccctcgaaagggaagagcaagccggccagtgactacctgaacttcgactccgattctgggcaggagagtgaggaggagggagccggggaggacctggaagaagaggcaagcctcgaaccaaaggcagctgtgcagaaggagctgtcggacatggattacctgaaatccaagatggtgaaggctgggtcgtcctcttcctcggaggaagaggaaagtgaagatgaagccgtgcactgtgatgaagggagtgaggccgaggaagaggattcctccgccaccccagtcctgcaggaaagagacagcaagggtgcaggccaagagcaagggatgccagctgggaaaaagagaccaccggaggccagagccgagacagagaaaccagcaaaccagaaggaacccaccacctgccacaccgtgaagctgcggggagccccgttcaatgtcacagagaaaaatgttatggaattcctggcacccctgaaaccagtggccattcgaattgtgagaaacgctcatgggaataaaacaggatacatctttgtggatttcagcaatgaagaggaagtgaagcaagctctgaaatgcaaccgggagtacatgggtgggcgctacatcgaggtgttcagggaaaagaacgtccccaccaccaagggtgcaccaaagaataccaccaaatcctggcaaggccggatactcggggagaacgaagaggaggaggacctggccgaatccggaaggctctttgtacggaacctgccctacaccagcaccgaggaggatctggagaagctcttctccaaatatggtcccctgtctgagctccactaccccatcgacagcctgaccaagaaacccaagggttttgcattcatcaccttcatgttccctgagcacgctgtgaaggcctactcggaggtggacgggcaggtattccagggcaggatgctccacgtgttaccatctaccatcaagaaggaagccagcgaggatgccagtgccctgggatcgtcgtcctacaagaagaagaaggaggcccaggacaaagccaacagtgccagctctcacaactggaacacactattcatggggccgaatgccgtggccgatgccatcgcacagaagtacaacgccaccaagagtcaagtgtttgaccacgagaccaagggcagcgtggccgtgcgcgtggctctgggggaaacccagctcgtccaggaagtgcggcgttttctcatagacaacggggtcagcctggattccttcagccaggctgcagcagagcgaagcaagactgtgattctggtcaagaacctcccggcaggcaccctggcggccgagctgcaggagaccttcggccnttttggcagcctgggccgcgtgctgctgccagagggcggaancactgccatcgtggagttcctggagcccctggaggcccgcaaggccttcaggcatctggcctattccaagttccatcatgtccccctctatctggagtgggctccagttggcgtcttctccagcgcagccccacagaagaaaaagctccaagacacaccttcagaacccatggaaaaggacccagcagagccagaaacagtgcctgatggcgaaaccccagaagatgaaaatccaacagaggaaggagcagacaactcttcagcaaagatggaagaggaggaggaggaagaggaagaagaagaagagagcctcccaggatgtactctgtttattaagaatctcaattttgacacaacagaagagaagctgaaggaagtgttttcaaaagtggggacagtgaagagctgctccatctccaagaagaagaacaaagcaggagtgctcctttccatggggtttggatttgtggaatacaggaagccggagcaagcccagaaagctctcaagcagctccagggtcacgtcgtggacggccacaagctggaagtgaggatctcggaacgagccactaagccagccgtgacattggctcggaagaaacaagttcccagaaagcagaccacctccaagatcctggtgcggaacatccccttccaggcccacagccgggagatccgagagctcttcagcacctttggggagttgaagacggtccgcctgccaaagaagatgactgggacaggcacacacagaggcttcggctttgtggacttcctcaccaagcaggatgcgaagagagccttcaacgccctgtgtcacagcacccacttgtacgggcggaggctggtgctggagtgggccgactccgaggtgaccctgcaggccctgcggcggaagacggccgctcactttcacgagcccccgaagaaaaagcggtctgtggtgttggacgagatcctggagcagctggaaggcagtgacagcgacagcgaggagcagacccttcagctgtgagctggcaccgagagggctggagtgcagtggcgtgatctgggctcacctccctggttcaagcgattgtcccgcctcagcctcccaaggctgggattacaggtatgcaccaccacgcccggctaattttgtatttttcatagagactgggtttcaccatgtagaccaggctggtctcgaattcctgacctcaagtgatccacctacctcggcctcccaaagtgtggggattacgggtgtgagccaccacgcctggctaattttttgtatttttggtagacggggtttcaccatgtgggccaggctggtcttgaactcccaacctcaagtgatccacccaccttgttctcccaaagtgctgagattacaggtgtgagccaccatgcccagcctgttcctaaccctttcaactggggggtctcaagtgggtgaggactccatggccacggcagcagaactgtctcttctgaaaaccagactccggggcccctgggtcagcacctctaggtcattccacagacttacacagtttaaagaaagagccagcgaacatggggtgatcctggggtgccactgggatcccaagccaggcccggaggtctgcctgtttcgtccccagaaacttgagctggcatcctccgctggtttgcactgggcacggggactggagagccaccaggccactgagcacagcatgctatcacttctcaggaagttgtgagggtgaggagaatagccgggcccactctgcagaggggaggaacaggcacaggctagaggcacgggctgatagagtgagtcctctccctcattcattcattcattcattcattcatccatcagacacctgctgggcatctgctgtgtgcgagacactgtgctgggtgccccagacacaagacagaaactcgggtcgctctgtgtgcctccacactggccttccctgctgcgtggacgcaggctctgtctcctaggctttaagccccatgcatcaggtggaagacaatttccagcagcctctgcccgcttgtttttcctcctctccttttcctgccgccttggtcttttttgtcttttgtgcagggccgtctctcgcagcgcccgtctgtgctccgcagcgtctaggaaaggattagtgtgagcagagcatgcaggctttggtgaacagagccgagcttggtttcaacatctaattcaatttgttctgccgagattgaaatatgaaatggttgccagtcaaacgttcaaaggacggggaagggagagtgagcgcatgctgaaatttaaattttaatgaaaatgactttaaccctttggtacaccttgcaaaatgtaacccatcctcccatcctgtgaaagcggcctctcgggttagagcttttccacccacttctcttccactgagcttcactaataatatgtaatcatttttttcagccgtcttaataataaaagattaatagaatgcttgca

SEQ ID NO: 10543 - DNA, 4177 bp, Homo sapiens
  misc_feature (1950)..(1950): n is a, c, g, or t
  misc_feature (1992)..(1992): n is a, c, g, or t
aggtctcagccacgtgactgtgttccggctcggtaaagatggcggcgcccagggcggtagcgtgaaacttggtggaagacgctgaccagtcgtgttggaatcaaaacagcggggaccctgcgccatgtcgcgactgatcgtgaagaatctcccgaatgggatgaaggaggagcgtttcaggcagctgtttgccgccttcggcacgctgacagactgcagcctgaagttcaccaaagatggcaagttccgcaagtttggttttattggcttcaagtccgaggaagaggcccagaaggcacagaagcatttcaacaagagcttcatcgacacatcccggatcacagtggagttctgcaagtcattcggggacccggccaaacccagagcctggagcaaacatgcccagaaaccaagccagcccaagcagcctccaaaagactctactactccagaaattaagaaagatgagaagaagaaaaaggtggcaggtcaactggagaagctgaaggaggatacagagttccaggagtttctgtcagttcatcagaggcgggcgcaggcagccacttgggcgaatgatggcctggatgctgagccctcgaaagggaagagcaagccggccagtgactacctgaacttcgactccgattctgggcaggagagtgaggaggagggagccggggaggacctggaagaagaggcaagcctcgaaccaaaggcagctgtgcagaaggagctgtcggacatggattacctgaaatccaagatggtgaaggctgggtcgtcctcttcctcggaggaagaggaaagtgaagatgaagccgtgcactgtgatgaagggagtgaggccgaggaagaggattcctccgccaccccagtcctgcaggaaagagacagcaagggtgcaggccaagagcaagggatgccagctgggaaaaagagaccaccggaggccagagccgagacagagaaaccagcaaaccagaaggaacccaccacctgccacaccgtgaagctgcggggagccccgttcaatgtcacagagaaaaatgttatggaattcctggcacccctgaaaccagtggccattcgaattgtgagaaacgctcatgggaataaaacaggatacatctttgtggatttcagcaatgaagaggaagtgaagcaagctctgaaatgcaaccgggagtacatgggtgggcgctacatcgaggtgttcagggaaaagaacgtccccaccaccaagggtgcaccaaagaataccaccaaatcctggcaaggccggatactcggggagaacgaagaggaggaggacctggccgaatccggaaggctctttgtacggaacctgccctacaccagcaccgaggaggatctggagaagctcttctccaaatatggtcccctgtctgagctccactaccccatcgacagcctgaccaagaaacccaagggttttgcattcatcaccttcatgttccctgagcacgctgtgaaggcctactcggaggtggacgggcaggtattccagggcaggatgctccacgtgttaccatctaccatcaagaaggaagccagcgaggatgccagtgccctgggatcgtcgtcctacaagaagaagaaggaggcccaggacaaagccaacagtgccagctctcacaactggaacacactattcatggggccgaatgccgtggccgatgccatcgcacagaagtacaacgccaccaagagtcaagtgtttgaccacgagaccaagggcagcgtggccgtgcgcgtggctctgggggaaacccagctcgtccaggaagtgcggcgttttctcatagacaacggggtcagcctggattccttcagccaggctgcagcagagcgaagcaagactgtgattctggtcaagaacctcccggcaggcaccctggcggccgagctgcaggagaccttcggccnttttggcagcctgggccgcgtgctgctgccagagggcggaancactgccatcgtggagttcctggagcccctggaggcccgcaaggccttcaggcatctggcctattccaagttccatcatgtccccctctatctggagtgggctccagttggcgtcttctccagcgcagccccacagaagaaaaagctccaagacacaccttcagaacccatggaaaaggacccagcagagccagaaacagtgcctgatggcgaaaccccagaagatgaaaatccaacagaggaaggagcagacaactcttcagcaaagatggaagaggaggaggaggaagaggaagaagaagaagagagcctcccaggatgtactctgtttattaagaatctcaattttgacacaacagaagagaagctgaaggaagtgttttcaaaagtggggacagtgaagagctgctccatctccaagaagaagaacaaagcaggagtgctcctttccatggggtttggatttgtggaatacaggaagccggagcaagcccagaaagctctcaagcagctccagggtcacgtcgtggacggccacaagctggaagtgaggatctcggaacgagccactaagccagccgtgacattggctcggaagaaacaagttcccagaaagcagaccacctccaagatcctggtgcggaacatccccttccaggcccacagccgggagatccgagagctcttcagcacctttggggagttgaagacggtccgcctgccaaagaagatgactgggacaggcacacacagaggcttcggctttgtggacttcctcaccaagcaggatgcgaagagagccttcaacgccctgtgtcacagcacccacttgtacgggcggaggctggtgctggagtgggccgactccgaggtgaccctgcaggccctgcggcggaagacggccgctcactttcacgagcccccgaagaaaaagcggtctgtggtgttggacgagatcctggagcagctggaaggcagtgacagcgacagcgaggagcagacccttcagctgtgagctggcaccgagagggtgtgtggctccggggccctggggaccgggacagccgctccagcttctgcactcaccaccatgtgggctggggggcggggcggggagcggcaggcggccccaccctgcactggtccaaggtcggaggagacaggggatgaggaaggcctcaggccactgcccagcggcccaggcatcctgggtttcaccagtgacgcgttctagcagacactgactgcgcacctgctctgtagcagacacggaagagtccaagggagcagccacgttaggaagagagacttgggaacagctacacagggagctagaacccctgctccccctgtccccaccccaggagagtaaggggacgagggccagctctctggcatcaggctgcttggacatgaaaccccgtctccaagctcaagctgggagaccctggcccagtttccttatctccttgggcccagccttccccttgctagctagttcttacttcataaggttttagagagaaataaacgcagtaatgcatgaagagtgccgggcatggtgctgagccctgttcctgctctccctccagggctgctgagctagaattcccacctatgtctttccaagggactgttcacggcttgggacttggtctctgtcctgccccatcctcgtcacttgggaccacgagccctggttcagtcacccagggaagcctcccagcggctcatgaagcatcgagctccaagcccagatgccaagctccctggctgagctgaatgatgtcactcatggtggacgcgttctgctcacgggcccagagccctgtgaaatgcatcaaggtcctctccgctggccagcagcatccccaggcttctctcaggcgcccgtgttcacattttctccagcctgagacgcagcctcccgcctggaagggcctgtgccagcaccaggcagagggcaagacggagagggcagagcaagaactgcactgcatctcactgcagtctgaatctagacatcgccattccccgaggtgcgacctcagactaatgacatcctggctgagcctctgtttttctctctaggaaatgggggtgataattgtgcctacctcagatagacagtgccagaattaagtgagtcaagccaagtaaagcccagagaagattctcatcagca

SEQ ID NO: 10544 - DNA, 3615 bp, Homo sapiens
  misc_feature (1950)..(1950): n is a, c, g, or t
  misc_feature (1992)..(1992): n is a, c, g, or t
aggtctcagccacgtgactgtgttccggctcggtaaagatggcggcgcccagggcggtagcgtgaaacttggtggaagacgctgaccagtcgtgttggaatcaaaacagcggggaccctgcgccatgtcgcgactgatcgtgaagaatctcccgaatgggatgaaggaggagcgtttcaggcagctgtttgccgccttcggcacgctgacagactgcagcctgaagttcaccaaagatggcaagttccgcaagtttggttttattggcttcaagtccgaggaagaggcccagaaggcacagaagcatttcaacaagagcttcatcgacacatcccggatcacagtggagttctgcaagtcattcggggacccggccaaacccagagcctggagcaaacatgcccagaaaccaagccagcccaagcagcctccaaaagactctactactccagaaattaagaaagatgagaagaagaaaaaggtggcaggtcaactggagaagctgaaggaggatacagagttccaggagtttctgtcagttcatcagaggcgggcgcaggcagccacttgggcgaatgatggcctggatgctgagccctcgaaagggaagagcaagccggccagtgactacctgaacttcgactccgattctgggcaggagagtgaggaggagggagccggggaggacctggaagaagaggcaagcctcgaaccaaaggcagctgtgcagaaggagctgtcggacatggattacctgaaatccaagatggtgaaggctgggtcgtcctcttcctcggaggaagaggaaagtgaagatgaagccgtgcactgtgatgaagggagtgaggccgaggaagaggattcctccgccaccccagtcctgcaggaaagagacagcaagggtgcaggccaagagcaagggatgccagctgggaaaaagagaccaccggaggccagagccgagacagagaaaccagcaaaccagaaggaacccaccacctgccacaccgtgaagctgcggggagccccgttcaatgtcacagagaaaaatgttatggaattcctggcacccctgaaaccagtggccattcgaattgtgagaaacgctcatgggaataaaacaggatacatctttgtggatttcagcaatgaagaggaagtgaagcaagctctgaaatgcaaccgggagtacatgggtgggcgctacatcgaggtgttcagggaaaagaacgtccccaccaccaagggtgcaccaaagaataccaccaaatcctggcaaggccggatactcggggagaacgaagaggaggaggacctggccgaatccggaaggctctttgtacggaacctgccctacaccagcaccgaggaggatctggagaagctcttctccaaatatggtcccctgtctgagctccactaccccatcgacagcctgaccaagaaacccaagggttttgcattcatcaccttcatgttccctgagcacgctgtgaaggcctactcggaggtggacgggcaggtattccagggcaggatgctccacgtgttaccatctaccatcaagaaggaagccagcgaggatgccagtgccctgggatcgtcgtcctacaagaagaagaaggaggcccaggacaaagccaacagtgccagctctcacaactggaacacactattcatggggccgaatgccgtggccgatgccatcgcacagaagtacaacgccaccaagagtcaagtgtttgaccacgagaccaagggcagcgtggccgtgcgcgtggctctgggggaaacccagctcgtccaggaagtgcggcgttttctcatagacaacggggtcagcctggattccttcagccaggctgcagcagagcgaagcaagactgtgattctggtcaagaacctcccggcaggcaccctggcggccgagctgcaggagaccttcggccnttttggcagcctgggccgcgtgctgctgccagagggcggaancactgccatcgtggagttcctggagcccctggaggcccgcaaggccttcaggcatctggcctattccaagttccatcatgtccccctctatctggagtgggctccagttggcgtcttctccagcgcagccccacagaagaaaaagctccaagacacaccttcagaacccatggaaaaggacccagcagagccagaaacagtgcctgatggcgaaaccccagaagatgaaaatccaacagaggaaggagcagacaactcttcagcaaagatggaagaggaggaggaggaagaggaagaagaagaagagagcctcccaggatgtactctgtttattaagaatctcaattttgacacaacagaagagaagctgaaggaagtgttttcaaaagtggggacagtgaagagctgctccatctccaagaagaagaacaaagcaggagtgctcctttccatggggtttggatttgtggaatacaggaagccggagcaagcccagaaagctctcaagcagctccagggtcacgtcgtggacggccacaagctggaagtgaggatctcggaacgagccactaagccagccgtgacattggctcggaagaaacaagttcccagaaagcagaccacctccaagatcctggtgcggaacatccccttccaggcccacagccgggagatccgagagctcttcagcacctttggggagttgaagacggtccgcctgccaaagaagatgactgggacaggcacacacagaggcttcggctttgtggacttcctcaccaagcaggatgcgaagagagccttcaacgccctgtgtcacagcacccacttgtacgggcggaggctggtgctggagtgggccgactccgaggtgaccctgcaggccctgcggcggaagacggccgctcactttcacgagcccccgaagaaaaagcggtctgtggtgttggacgagatcctggagcagctggaaggcagtgacagcgacagcgaggagcagacccttcagctgtgagctggcaccgagaggggctgctgagctagaattcccacctatgtctttccaagggactgttcacggcttgggacttggtctctgtcctgccccatcctcgtcacttgggaccacgagccctggttcagtcacccagggaagcctcccagcggctcatgaagcatcgagctccaagcccagatgccaagctccctggctgagctgaatgatgtcactcatggtggacgcgttctgctcacgggcccagagccctgtgaaatgcatcaaggtcctctccgctggccagcagcatccccaggcttctctcaggcgcccgtgttcacattttctccagcctgagacgcagcctcccgcctggaagggcctgtgccagcaccaggcagagggcaagacggagagggcagagcaagaactgcactgcatctcactgcagtctgaatctagacatcgccattccccgaggtgcgacctcagactaatgacatcctggctgagcctctgtttttctctctaggaaatgggggtgataattgtgcctacctcagatagacagtgccagaattaagtgagtcaagccaagtaaagcccagagaagattctcatcagca

SEQ ID NO: 10545 - DNA, 3544 bp, Homo sapiens
  misc_feature (1950)..(1950): n is a, c, g, or t
  misc_feature (1992)..(1992): n is a, c, g, or t
aggtctcagccacgtgactgtgttccggctcggtaaagatggcggcgcccagggcggtagcgtgaaacttggtggaagacgctgaccagtcgtgttggaatcaaaacagcggggaccctgcgccatgtcgcgactgatcgtgaagaatctcccgaatgggatgaaggaggagcgtttcaggcagctgtttgccgccttcggcacgctgacagactgcagcctgaagttcaccaaagatggcaagttccgcaagtttggttttattggcttcaagtccgaggaagaggcccagaaggcacagaagcatttcaacaagagcttcatcgacacatcccggatcacagtggagttctgcaagtcattcggggacccggccaaacccagagcctggagcaaacatgcccagaaaccaagccagcccaagcagcctccaaaagactctactactccagaaattaagaaagatgagaagaagaaaaaggtggcaggtcaactggagaagctgaaggaggatacagagttccaggagtttctgtcagttcatcagaggcgggcgcaggcagccacttgggcgaatgatggcctggatgctgagccctcgaaagggaagagcaagccggccagtgactacctgaacttcgactccgattctgggcaggagagtgaggaggagggagccggggaggacctggaagaagaggcaagcctcgaaccaaaggcagctgtgcagaaggagctgtcggacatggattacctgaaatccaagatggtgaaggctgggtcgtcctcttcctcggaggaagaggaaagtgaagatgaagccgtgcactgtgatgaagggagtgaggccgaggaagaggattcctccgccaccccagtcctgcaggaaagagacagcaagggtgcaggccaagagcaagggatgccagctgggaaaaagagaccaccggaggccagagccgagacagagaaaccagcaaaccagaaggaacccaccacctgccacaccgtgaagctgcggggagccccgttcaatgtcacagagaaaaatgttatggaattcctggcacccctgaaaccagtggccattcgaattgtgagaaacgctcatgggaataaaacaggatacatctttgtggatttcagcaatgaagaggaagtgaagcaagctctgaaatgcaaccgggagtacatgggtgggcgctacatcgaggtgttcagggaaaagaacgtccccaccaccaagggtgcaccaaagaataccaccaaatcctggcaaggccggatactcggggagaacgaagaggaggaggacctggccgaatccggaaggctctttgtacggaacctgccctacaccagcaccgaggaggatctggagaagctcttctccaaatatggtcccctgtctgagctccactaccccatcgacagcctgaccaagaaacccaagggttttgcattcatcaccttcatgttccctgagcacgctgtgaaggcctactcggaggtggacgggcaggtattccagggcaggatgctccacgtgttaccatctaccatcaagaaggaagccagcgaggatgccagtgccctgggatcgtcgtcctacaagaagaagaaggaggcccaggacaaagccaacagtgccagctctcacaactggaacacactattcatggggccgaatgccgtggccgatgccatcgcacagaagtacaacgccaccaagagtcaagtgtttgaccacgagaccaagggcagcgtggccgtgcgcgtggctctgggggaaacccagctcgtccaggaagtgcggcgttttctcatagacaacggggtcagcctggattccttcagccaggctgcagcagagcgaagcaagactgtgattctggtcaagaacctcccggcaggcaccctggcggccgagctgcaggagaccttcggccnttttggcagcctgggccgcgtgctgctgccagagggcggaancactgccatcgtggagttcctggagcccctggaggcccgcaaggccttcaggcatctggcctattccaagttccatcatgtccccctctatctggagtgggctccagttggcgtcttctccagcgcagccccacagaagaaaaagctccaagacacaccttcagaacccatggaaaaggacccagcagagccagaaacagtgcctgatggcgaaaccccagaagatgaaaatccaacagaggaaggagcagacaactcttcagcaaagatggaagaggaggaggaggaagaggaagaagaagaagagagcctcccaggatgtactctgtttattaagaatctcaattttgacacaacagaagagaagctgaaggaagtgttttcaaaagtggggacagtgaagagctgctccatctccaagaagaagaacaaagcaggagtgctcctttccatggggtttggatttgtggaatacaggaagccggagcaagcccagaaagctctcaagcagctccagggtcacgtcgtggacggccacaagctggaagtgaggatctcggaacgagccactaagccagccgtgacattggctcggaagaaacaagttcccagaaagcagaccacctccaagatcctggtgcggaacatccccttccaggcccacagccgggagatccgagagctcttcagcacctttggggagttgaagacggtccgcctgccaaagaagatgactgggacaggcacacacagaggcttcggctttgtggacttcctcaccaagcaggatgcgaagagagccttcaacgccctgtgtcacagcacccacttgtacgggcggaggctggtgctggagtgggccgactccgaggtgaccctgcaggccctgcggcggaagacggccgctcactttcacgagcccccgaagaaaaagcggtctgtggtgttggacgagatcctggagcagctggaaggcagtgacagcgacagcgaggagcagacccttcagctgtgagctggcaccgagagggtgtgtggctccggggccctggggaccgggacagccgctccagcttctgcactcaccaccatgtgggctggggggcggggcggggagcggcaggcggccccaccctgcactggtccaaggtcggaggagacaggggatgaggaaggcctcaggccactgcccagcggcccaggcatcctgggtttcaccagtgacgcgttctagcagacactgactgcgcacctgctctgtagcagacacggaagagtccaagggagcagccacgttaggaagagagacttgggaacagctacacagggagctagaacccctgctccccctgtccccaccccaggagagtaaggggacgagggccagctctctggcatcaggctgcttggacatgaaaccccgtctccaagctcaagctgggagaccctggcccagtttccttatctccttgggcccagccttccccttgctagctagttcttacttcataaggttttagagagaaataaacgcagtaatgcatgaagagtg

SEQ ID NO: 10546 - DNA, 3895 bp, Homo sapiens
  misc_feature (1950)..(1950): n is a, c, g, or t
  misc_feature (1992)..(1992): n is a, c, g, or t
aggtctcagccacgtgactgtgttccggctcggtaaagatggcggcgcccagggcggtagcgtgaaacttggtggaagacgctgaccagtcgtgttggaatcaaaacagcggggaccctgcgccatgtcgcgactgatcgtgaagaatctcccgaatgggatgaaggaggagcgtttcaggcagctgtttgccgccttcggcacgctgacagactgcagcctgaagttcaccaaagatggcaagttccgcaagtttggttttattggcttcaagtccgaggaagaggcccagaaggcacagaagcatttcaacaagagcttcatcgacacatcccggatcacagtggagttctgcaagtcattcggggacccggccaaacccagagcctggagcaaacatgcccagaaaccaagccagcccaagcagcctccaaaagactctactactccagaaattaagaaagatgagaagaagaaaaaggtggcaggtcaactggagaagctgaaggaggatacagagttccaggagtttctgtcagttcatcagaggcgggcgcaggcagccacttgggcgaatgatggcctggatgctgagccctcgaaagggaagagcaagccggccagtgactacctgaacttcgactccgattctgggcaggagagtgaggaggagggagccggggaggacctggaagaagaggcaagcctcgaaccaaaggcagctgtgcagaaggagctgtcggacatggattacctgaaatccaagatggtgaaggctgggtcgtcctcttcctcggaggaagaggaaagtgaagatgaagccgtgcactgtgatgaagggagtgaggccgaggaagaggattcctccgccaccccagtcctgcaggaaagagacagcaagggtgcaggccaagagcaagggatgccagctgggaaaaagagaccaccggaggccagagccgagacagagaaaccagcaaaccagaaggaacccaccacctgccacaccgtgaagctgcggggagccccgttcaatgtcacagagaaaaatgttatggaattcctggcacccctgaaaccagtggccattcgaattgtgagaaacgctcatgggaataaaacaggatacatctttgtggatttcagcaatgaagaggaagtgaagcaagctctgaaatgcaaccgggagtacatgggtgggcgctacatcgaggtgttcagggaaaagaacgtccccaccaccaagggtgcaccaaagaataccaccaaatcctggcaaggccggatactcggggagaacgaagaggaggaggacctggccgaatccggaaggctctttgtacggaacctgccctacaccagcaccgaggaggatctggagaagctcttctccaaatatggtcccctgtctgagctccactaccccatcgacagcctgaccaagaaacccaagggttttgcattcatcaccttcatgttccctgagcacgctgtgaaggcctactcggaggtggacgggcaggtattccagggcaggatgctccacgtgttaccatctaccatcaagaaggaagccagcgaggatgccagtgccctgggatcgtcgtcctacaagaagaagaaggaggcccaggacaaagccaacagtgccagctctcacaactggaacacactattcatggggccgaatgccgtggccgatgccatcgcacagaagtacaacgccaccaagagtcaagtgtttgaccacgagaccaagggcagcgtggccgtgcgcgtggctctgggggaaacccagctcgtccaggaagtgcggcgttttctcatagacaacggggtcagcctggattccttcagccaggctgcagcagagcgaagcaagactgtgattctggtcaagaacctcccggcaggcaccctggcggccgagctgcaggagaccttcggccnttttggcagcctgggccgcgtgctgctgccagagggcggaancactgccatcgtggagttcctggagcccctggaggcccgcaaggccttcaggcatctggcctattccaagttccatcatgtccccctctatctggagtgggctccagttggcgtcttctccagcgcagccccacagaagaaaaagctccaagacacaccttcagaacccatggaaaaggacccagcagagccagaaacagtgcctgatggcgaaaccccagaagatgaaaatccaacagaggaaggagcagacaactcttcagcaaagatggaagaggaggaggaggaagaggaagaagaagaagagagcctcccaggatgtactctgtttattaagaatctcaattttgacacaacagaagagaagctgaaggaagtgttttcaaaagtggggacagtgaagagctgctccatctccaagaagaagaacaaagcaggagtgctcctttccatggggtttggatttgtggaatacaggaagccggagcaagcccagaaagctctcaagcagctccagggtcacgtcgtggacggccacaagctggaagtgaggatctcggaacgagccactaagccagccgtgacattggctcggaagaaacaagttcccagaaagcagaccacctccaagatcctggtgcggaacatccccttccaggcccacagccgggagatccgagagctcttcagcacctttggggagttgaagacggtccgcctgccaaagaagatgactgggacaggcacacacagaggcttcggctttgtggacttcctcaccaagcaggatgcgaagagagccttcaacgccctgtgtcacagcacccacttgtacgggcggaggctggtgctggagtgggccgactccgaggtgaccctgcaggccctgcggcggaagacggccgctcactttcacgagcccccgaagaaaaagcggtctgtggtgttggacgagatcctggagcagctggaaggcagtgacagcgacagcgaggagcagacccttcagctgtgagctggcaccgagagggtgtgtggctccggggccctggggaccgggacagccgctccagcttctgcactcaccaccatgtgggctggggggcggggcggggagcggcaggcggccccaccctgcactggtccaagctcaagctgggagaccctggcccagtttccttatctccttgggcccagccttccccttgctagctagttcttacttcataaggttttagagagaaataaacgcagtaatgcatgaagagtgccgggcatggtgctgagccctgttcctgctctccctccagggctgctgagctagaattcccacctatgtctttccaagggactgttcacggcttgggacttggtctctgtcctgccccatcctcgtcacttgggaccacgagccctggttcagtcacccagggaagcctcccagcggctcatgaagcatcgagctccaagcccagatgccaagctccctggctgagctgaatgatgtcactcatggtggacgcgttctgctcacgggcccagagccctgtgaaatgcatcaaggtcctctccgctggccagcagcatccccaggcttctctcaggcgcccgtgttcacattttctccagcctgagacgcagcctcccgcctggaagggcctgtgccagcaccaggcagagggcaagacggagagggcagagcaagaactgcactgcatctcactgcagtctgaatctagacatcgccattccccgaggtgcgacctcagactaatgacatcctggctgagcctctgtttttctctctaggaaatgggggtgataattgtgcctacctcagatagacagtgccagaattaagtgagtcaagccaagtaaagcccagagaagattctcatcagca

SEQ ID NO: 10547 - DNA, 4306 bp, Homo sapiens
  misc_feature (1950)..(1950): n is a, c, g, or t
  misc_feature (1992)..(1992): n is a, c, g, or t
aggtctcagccacgtgactgtgttccggctcggtaaagatggcggcgcccagggcggtagcgtgaaacttggtggaagacgctgaccagtcgtgttggaatcaaaacagcggggaccctgcgccatgtcgcgactgatcgtgaagaatctcccgaatgggatgaaggaggagcgtttcaggcagctgtttgccgccttcggcacgctgacagactgcagcctgaagttcaccaaagatggcaagttccgcaagtttggttttattggcttcaagtccgaggaagaggcccagaaggcacagaagcatttcaacaagagcttcatcgacacatcccggatcacagtggagttctgcaagtcattcggggacccggccaaacccagagcctggagcaaacatgcccagaaaccaagccagcccaagcagcctccaaaagactctactactccagaaattaagaaagatgagaagaagaaaaaggtggcaggtcaactggagaagctgaaggaggatacagagttccaggagtttctgtcagttcatcagaggcgggcgcaggcagccacttgggcgaatgatggcctggatgctgagccctcgaaagggaagagcaagccggccagtgactacctgaacttcgactccgattctgggcaggagagtgaggaggagggagccggggaggacctggaagaagaggcaagcctcgaaccaaaggcagctgtgcagaaggagctgtcggacatggattacctgaaatccaagatggtgaaggctgggtcgtcctcttcctcggaggaagaggaaagtgaagatgaagccgtgcactgtgatgaagggagtgaggccgaggaagaggattcctccgccaccccagtcctgcaggaaagagacagcaagggtgcaggccaagagcaagggatgccagctgggaaaaagagaccaccggaggccagagccgagacagagaaaccagcaaaccagaaggaacccaccacctgccacaccgtgaagctgcggggagccccgttcaatgtcacagagaaaaatgttatggaattcctggcacccctgaaaccagtggccattcgaattgtgagaaacgctcatgggaataaaacaggatacatctttgtggatttcagcaatgaagaggaagtgaagcaagctctgaaatgcaaccgggagtacatgggtgggcgctacatcgaggtgttcagggaaaagaacgtccccaccaccaagggtgcaccaaagaataccaccaaatcctggcaaggccggatactcggggagaacgaagaggaggaggacctggccgaatccggaaggctctttgtacggaacctgccctacaccagcaccgaggaggatctggagaagctcttctccaaatatggtcccctgtctgagctccactaccccatcgacagcctgaccaagaaacccaagggttttgcattcatcaccttcatgttccctgagcacgctgtgaaggcctactcggaggtggacgggcaggtattccagggcaggatgctccacgtgttaccatctaccatcaagaaggaagccagcgaggatgccagtgccctgggatcgtcgtcctacaagaagaagaaggaggcccaggacaaagccaacagtgccagctctcacaactggaacacactattcatggggccgaatgccgtggccgatgccatcgcacagaagtacaacgccaccaagagtcaagtgtttgaccacgagaccaagggcagcgtggccgtgcgcgtggctctgggggaaacccagctcgtccaggaagtgcggcgttttctcatagacaacggggtcagcctggattccttcagccaggctgcagcagagcgaagcaagactgtgattctggtcaagaacctcccggcaggcaccctggcggccgagctgcaggagaccttcggccnttttggcagcctgggccgcgtgctgctgccagagggcggaancactgccatcgtggagttcctggagcccctggaggcccgcaaggccttcaggcatctggcctattccaagttccatcatgtccccctctatctggagtgggctccagttggcgtcttctccagcgcagccccacagaagaaaaagctccaagacacaccttcagaacccatggaaaaggacccagcagagccagaaacagtgcctgatggcgaaaccccagaagatgaaaatccaacagaggaaggagcagacaactcttcagcaaagatggaagaggaggaggaggaagaggaagaagaagaagagagcctcccaggatgtactctgtttattaagaatctcaattttgacacaacagaagagaagctgaaggaagtgttttcaaaagtggggacagtgaagagctgctccatctccaagaagaagaacaaagcaggagtgctcctttccatggggtttggatttgtggaatacaggaagccggagcaagcccagaaagctctcaagcagctccagggtcacgtcgtggacggccacaagctggaagtgaggatctcggaacgagccactaagccagccgtgacattggctcggaagaaacaagttcccagaaagcagaccacctccaagatcctggtgcggaacatccccttccaggcccacagccgggagatccgagagctcttcagcacctttggggagttgaagacggtccgcctgccaaagaagatgactgggacaggcacacacagaggcttcggctttgtggacttcctcaccaagcaggatgcgaagagagccttcaacgccctgtgtcacagcacccacttgtacgggcggaggctggtgctggagtgggccgactccgaggtgaccctgcaggccctgcggcggaagacggccgctcactttcacgagcccccgaagaaaaagcggtctgtggtgttggacgagatcctggagcagctggaaggcagtgacagcgacagcgaggagcagacccttcagctgtgagctggcaccgagagggtgtgtggctccggggccctggggaccgggacagccgctccagcttctgcactcaccaccatgtgggctggggggcggggcggggagcggcaggcggccccaccctgcactggtccaaggtcggaggagacaggggatgaggaaggcctcaggccactgcccagcggcccaggcatcctgggtttcaccagtgacgcgttctagcagacactgactgcgcacctgctctgtagcagacacggaagagtccaagggagcagccacgttaggaagagagacttgggaacagctacacagggagctagaacccctgctccccctgtccccaccccaggagagtaaggggacgagggccagctctctggcatcaggctgcttggacatgaaaccccgtctccaagctcaagctgggagaccctggcccagtttccttatctccttgggcccagccttccccttgctagctagttcttacttcataaggttttagagagaaataaacgcagtaatgcatgaagagtgccgggcatggtgctgagccctgttcctgctctccctccagggctgctgagctagaattcccacctatgtctttccaagggactgttcacggcttgggacttggtctctgtcctgccccatcctcgtcacttgggaccacgagccctggttcagtcacccagggaagcctcccagcggctcatgaagcatcgagctccaagcccagatgccaagctccctggctgagctgaatgatgtcactcatggtggacgcgttctgctcacgggcccagagccctgtgaaatgcatcaaggtcctctccgctggccagcagcatccccaggcttctctcaggcgcccgtgttcacattttctccagcctgagacgcagcctcccgcctggaagggcctgtgccagcaccaggcagagggcaagacggagagggcagagcaagaactgcactgcatctcactgcagtctgaatctagacatcgccattccccgaggtgcgacctcagactaatgacatcctggctgagcctctgtttttctctctaggaaatgggggtgataattgtgcctacctcagatagacagtgccagaattaagtgagtcaagccaagtaaagcccagagaagattctcatcagcaaaaaaaaaaaaaaaacccgggcgattcatgtccggggcgcgacaacaggtattaaatgggcccgtgcctctgttccgacccttttggacaagggaatccggcccatggggcgatatgaaaccgcccaaa

SEQ ID NO: 10548 - DNA, 3744 bp, Homo sapiens
  misc_feature (1950)..(1950): n is a, c, g, or t
  misc_feature (1992)..(1992): n is a, c, g, or t
aggtctcagccacgtgactgtgttccggctcggtaaagatggcggcgcccagggcggtagcgtgaaacttggtggaagacgctgaccagtcgtgttggaatcaaaacagcggggaccctgcgccatgtcgcgactgatcgtgaagaatctcccgaatgggatgaaggaggagcgtttcaggcagctgtttgccgccttcggcacgctgacagactgcagcctgaagttcaccaaagatggcaagttccgcaagtttggttttattggcttcaagtccgaggaagaggcccagaaggcacagaagcatttcaacaagagcttcatcgacacatcccggatcacagtggagttctgcaagtcattcggggacccggccaaacccagagcctggagcaaacatgcccagaaaccaagccagcccaagcagcctccaaaagactctactactccagaaattaagaaagatgagaagaagaaaaaggtggcaggtcaactggagaagctgaaggaggatacagagttccaggagtttctgtcagttcatcagaggcgggcgcaggcagccacttgggcgaatgatggcctggatgctgagccctcgaaagggaagagcaagccggccagtgactacctgaacttcgactccgattctgggcaggagagtgaggaggagggagccggggaggacctggaagaagaggcaagcctcgaaccaaaggcagctgtgcagaaggagctgtcggacatggattacctgaaatccaagatggtgaaggctgggtcgtcctcttcctcggaggaagaggaaagtgaagatgaagccgtgcactgtgatgaagggagtgaggccgaggaagaggattcctccgccaccccagtcctgcaggaaagagacagcaagggtgcaggccaagagcaagggatgccagctgggaaaaagagaccaccggaggccagagccgagacagagaaaccagcaaaccagaaggaacccaccacctgccacaccgtgaagctgcggggagccccgttcaatgtcacagagaaaaatgttatggaattcctggcacccctgaaaccagtggccattcgaattgtgagaaacgctcatgggaataaaacaggatacatctttgtggatttcagcaatgaagaggaagtgaagcaagctctgaaatgcaaccgggagtacatgggtgggcgctacatcgaggtgttcagggaaaagaacgtccccaccaccaagggtgcaccaaagaataccaccaaatcctggcaaggccggatactcggggagaacgaagaggaggaggacctggccgaatccggaaggctctttgtacggaacctgccctacaccagcaccgaggaggatctggagaagctcttctccaaatatggtcccctgtctgagctccactaccccatcgacagcctgaccaagaaacccaagggttttgcattcatcaccttcatgttccctgagcacgctgtgaaggcctactcggaggtggacgggcaggtattccagggcaggatgctccacgtgttaccatctaccatcaagaaggaagccagcgaggatgccagtgccctgggatcgtcgtcctacaagaagaagaaggaggcccaggacaaagccaacagtgccagctctcacaactggaacacactattcatggggccgaatgccgtggccgatgccatcgcacagaagtacaacgccaccaagagtcaagtgtttgaccacgagaccaagggcagcgtggccgtgcgcgtggctctgggggaaacccagctcgtccaggaagtgcggcgttttctcatagacaacggggtcagcctggattccttcagccaggctgcagcagagcgaagcaagactgtgattctggtcaagaacctcccggcaggcaccctggcggccgagctgcaggagaccttcggccnttttggcagcctgggccgcgtgctgctgccagagggcggaancactgccatcgtggagttcctggagcccctggaggcccgcaaggccttcaggcatctggcctattccaagttccatcatgtccccctctatctggagtgggctccagttggcgtcttctccagcgcagccccacagaagaaaaagctccaagacacaccttcagaacccatggaaaaggacccagcagagccagaaacagtgcctgatggcgaaaccccagaagatgaaaatccaacagaggaaggagcagacaactcttcagcaaagatggaagaggaggaggaggaagaggaagaagaagaagagagcctcccaggatgtactctgtttattaagaatctcaattttgacacaacagaagagaagctgaaggaagtgttttcaaaagtggggacagtgaagagctgctccatctccaagaagaagaacaaagcaggagtgctcctttccatggggtttggatttgtggaatacaggaagccggagcaagcccagaaagctctcaagcagctccagggtcacgtcgtggacggccacaagctggaagtgaggatctcggaacgagccactaagccagccgtgacattggctcggaagaaacaagttcccagaaagcagaccacctccaagatcctggtgcggaacatccccttccaggcccacagccgggagatccgagagctcttcagcacctttggggagttgaagacggtccgcctgccaaagaagatgactgggacaggcacacacagaggcttcggctttgtggacttcctcaccaagcaggatgcgaagagagccttcaacgccctgtgtcacagcacccacttgtacgggcggaggctggtgctggagtgggccgactccgaggtgaccctgcaggccctgcggcggaagacggccgctcactttcacgagcccccgaagaaaaagcggtctgtggtgttggacgagatcctggagcagctggaaggcagtgacagcgacagcgaggagcagacccttcagctgtgagctggcaccgagaggggctgctgagctagaattcccacctatgtctttccaagggactgttcacggcttgggacttggtctctgtcctgccccatcctcgtcacttgggaccacgagccctggttcagtcacccagggaagcctcccagcggctcatgaagcatcgagctccaagcccagatgccaagctccctggctgagctgaatgatgtcactcatggtggacgcgttctgctcacgggcccagagccctgtgaaatgcatcaaggtcctctccgctggccagcagcatccccaggcttctctcaggcgcccgtgttcacattttctccagcctgagacgcagcctcccgcctggaagggcctgtgccagcaccaggcagagggcaagacggagagggcagagcaagaactgcactgcatctcactgcagtctgaatctagacatcgccattccccgaggtgcgacctcagactaatgacatcctggctgagcctctgtttttctctctaggaaatgggggtgataattgtgcctacctcagatagacagtgccagaattaagtgagtcaagccaagtaaagcccagagaagattctcatcagcaaaaaaaaaaaaaaaacccgggcgattcatgtccggggcgcgacaacaggtattaaatgggcccgtgcctctgttccgacccttttggacaagggaatccggcccatggggcgatatgaaaccgcccaaa

SEQ ID NO: 10549 - DNA, 3710 bp, Homo sapiens
  misc_feature (1483)..(1483): n is a, c, g, or t
  misc_feature (1525)..(1525): n is a, c, g, or t
gtggcgaatccggcacgaggggtcaactggagaagctgaaggaggatacagagttccaggagtttctgtcagttcatcagaggcgggcgcaggcagccacttgggcgaatgatggcctggatgctgagccctcgaaagggaagagcaagccggccagtgactacctgaacttcgactccgattctgggcaggagagtgaggaggagggagccggggaggacctggaagaagaggcaagcctcgaaccaaaggcagctgtgcagaaggagctgtcggacatggattacctgaaatccaagatggtgaaggctgggtcgtcctcttcctcggaggaagaggaaagtgaagatgaagccgtgcactgtgatgaagggagtgaggccgaggaagaggattcctccgccaccccagtcctgcaggaaagagacagcaagggtgcaggccaagagcaagggatgccagctgggaaaaagagaccaccggaggccagagccgagacagagaaaccagcaaaccagaaggaacccaccacctgccacaccgtgaagctgcggggagccccgttcaatgtcacagagaaaaatgttatggaattcctggcacccctgaaaccagtggccattcgaattgtgagaaacgctcatgggaataaaacaggatacatctttgtggatttcagcaatgaagaggaagtgaagcaagctctgaaatgcaaccgggagtacatgggtgggcgctacatcgaggtgttcagggaaaagaacgtccccaccaccaagggtgcaccaaagaataccaccaaatcctggcaaggccggatactcggggagaacgaagaggaggaggacctggccgaatccggaaggctctttgtacggaacctgccctacaccagcaccgaggaggatctggagaagctcttctccaaatatggtcccctgtctgagctccactaccccatcgacagcctgaccaagaaacccaagggttttgcattcatcaccttcatgttccctgagcacgctgtgaaggcctactcggaggtggacgggcaggtattccagggcaggatgctccacgtgttaccatctaccatcaagaaggaagccagcgaggatgccagtgccctgggatcgtcgtcctacaagaagaagaaggaggcccaggacaaagccaacagtgccagctctcacaactggaacacactattcatggggccgaatgccgtggccgatgccatcgcacagaagtacaacgccaccaagagtcaagtgtttgaccacgagaccaagggcagcgtggccgtgcgcgtggctctgggggaaacccagctcgtccaggaagtgcggcgttttctcatagacaacggggtcagcctggattccttcagccaggctgcagcagagcgaagcaagactgtgattctggtcaagaacctcccggcaggcaccctggcggccgagctgcaggagaccttcggccnttttggcagcctgggccgcgtgctgctgccagagggcggaancactgccatcgtggagttcctggagcccctggaggcccgcaaggccttcaggcatctggcctattccaagttccatcatgtccccctctatctggagtgggctccagttggcgtcttctccagcgcagccccacagaagaaaaagctccaagacacaccttcagaacccatggaaaaggacccagcagagccagaaacagtgcctgatggcgaaaccccagaagatgaaaatccaacagaggaaggagcagacaactcttcagcaaagatggaagaggaggaggaggaagaggaagaagaagaagagagcctcccaggatgtactctgtttattaagaatctcaattttgacacaacagaagagaagctgaaggaagtgttttcaaaagtggggacagtgaagagctgctccatctccaagaagaagaacaaagcaggagtgctcctttccatggggtttggatttgtggaatacaggaagccggagcaagcccagaaagctctcaagcagctccagggtcacgtcgtggacggccacaagctggaagtgaggatctcggaacgagccactaagccagccgtgacattggctcggaagaaacaagttcccagaaagcagaccacctccaagatcctggtgcggaacatccccttccaggcccacagccgggagatccgagagctcttcagcacctttggggagttgaagacggtccgcctgccaaagaagatgactgggacaggcacacacagaggcttcggctttgtggacttcctcaccaagcaggatgcgaagagagccttcaacgccctgtgtcacagcacccacttgtacgggcggaggctggtgctggagtgggccgactccgaggtgaccctgcaggccctgcggcggaagacggccgctcactttcacgagcccccgaagaaaaagcggtctgtggtgttggacgagatcctggagcagctggaaggcagtgacagcgacagcgaggagcagacccttcagctgtgagctggcaccgagagggtgtgtggctccggggccctggggaccgggacagccgctccagcttctgcactcaccaccatgtgggctggggggcggggcggggagcggcaggcggccccaccctgcactggtccaaggtcggaggagacaggggatgaggaaggcctcaggccactgcccagcggcccaggcatcctgggtttcaccagtgacgcgttctagcagacactgactgcgcacctgctctgtagcagacacggaagagtccaagggagcagccacgttaggaagagagacttgggaacagctacacagggagctagaacccctgctccccctgtccccaccccaggagagtaaggggacgagggccagctctctggcatcaggctgcttggacatgaaaccccgtctccaagctcaagctgggagaccctggcccagtttccttatctccttgggcccagccttccccttgctagctagttcttacttcataaggttttagagagaaataaacgcagtaatgcatgaagagtgccgggcatggtgctgagccctgttcctgctctccctccagggctgctgagctagaattcccacctatgtctttccaagggactgttcacggcttgggacttggtctctgtcctgccccatcctcgtcacttgggaccacgagccctggttcagtcacccagggaagcctcccagcggctcatgaagcatcgagctccaagcccagatgccaagctccctggctgagctgaatgatgtcactcatggtggacgcgttctgctcacgggcccagagccctgtgaaatgcatcaaggtcctctccgctggccagcagcatccccaggcttctctcaggcgcccgtgttcacattttctccagcctgagacgcagcctcccgcctggaagggcctgtgccagcaccaggcagagggcaagacggagagggcagagcaagaactgcactgcatctcactgcagtctgaatctagacatcgccattccccgaggtgcgacctcagactaatgacatcctggctgagcctctgtttttctctctaggaaatgggggtgataattgtgcctacctcagatagacagtgccagaattaagtgagtcaagccaagtaaagcccagagaagattctcatcagca

SEQ ID NO: 10550 - DNA, 2188 bp, Homo sapiens
ggcaggactttctctctgtctcaagagttgctgaagctcagcacaagttggggatcacggtgccccttcctgccactgcccgcagaggcagaacccctttacctagtgggctttttgcagttggccccagggctctggtgggtttgacattatttcatggatttgatgtttttgtttttgtttttgttttgatgggggttcagtgcctgatggcgaaaccccagaagatgaaaatccaacagaggaaggagcagacaactcttcagcaaagatggaagaggaggaggaggaagaggaagaagaagaagagagcctcccaggatgtactctgtttattaagaatctcaattttgacacaacagaagagaagctgaaggaagtgttttcaaaagtggggacagtgaagagctgctccatctccaagaagaagaacaaagcaggagtgctcctttccatggggtttggatttgtggaatacaggaagccggagcaagcccagaaagctctcaagcagctccagggtcacgtcgtggacggccacaagctggaagtgaggatctcggaacgagccactaagccagccgtgacattggctcggaagaaacaagttcccagaaagcagaccacctccaagatcctggtgcggaacatccccttccaggcccacagccgggagatccgagagctcttcagcacctttggggagttgaagacggtccgcctgccaaagaagatgactgggacaggcacacacagaggcttcggctttgtggacttcctcaccaagcaggatgcgaagagagccttcaacgccctgtgtcacagcacccacttgtacgggcggaggctggtgctggagtgggccgactccgaggtgaccctgcaggccctgcggcggaagacggccgctcactttcacgagcccccgaagaaaaagcggtctgtggtgttggacgagatcctggagcagctggaaggcagtgacagcgacagcgaggagcagacccttcagctgtgagctggcaccgagagggtgtgtggctccggggccctggggaccgggacagccgctccagcttctgcactcaccaccatgtgggctggggggcggggcggggagcggcaggcggccccaccctgcactggtccaaggtcggaggagacaggggatgaggaaggcctcaggccactgcccagcggcccaggcatcctgggtttcaccagtgacgcgttctagcagacactgactgcgcacctgctctgtagcagacacggaagagtccaagggagcagccacgttaggaagagagacttgggaacagctacacagggagctagaacccctgctccccctgtccccaccccaggagagtaaggggacgagggccagctctctggcatcaggctgcttggacatgaaaccccgtctccaagctcaagctgggagaccctggcccagtttccttatctccttgggcccagccttccccttgctagctagttcttacttcataaggttttagagagaaataaacgcagtaatgcatgaagagtgccgggcatggtgctgagccctgttcctgctctccctccagggctgctgagctagaattcccacctatgtctttccaagggactgttcacggcttgggacttggtctctgtcctgccccatcctcgtcacttgggaccacgagccctggttcagtcacccagggaagcctcccagcggctcatgaagcatcgagctccaagcccagatgccaagctccctggctgagctgaatgatgtcactcatggtggacgcgttctgctcacgggcccagagccctgtgaaatgcatcaaggtcctctccgctggccagcagcatccccaggcttctctcaggcgcccgtgttcacattttctccagcctgagacgcagcctcccgcctggaagggcctgtgccagcaccaggcagagggcaagacggagagggcagagcaagaactgcactgcatctcactgcagtctgaatctagacatcgccattccccgaggtgcgacctcagactaatgacatcctggctgagcctctgtttttctctctaggaaatgggggtgataattgtgcctacctcagatagacagtgccagaattaagtgagtcaagccaagtaaagcccagagaagattctcatcagca

SEQ ID NO: 10551 - DNA, 1870 bp, Homo sapiens
aggtctcagccacgtgactgtgttccggctcggtaaagatggcggcgcccagggcggtagcgtgaaacttggtggaagacgctgaccagtcgtgttggaatcaaaacagcggggaccctgcgccatgtcgcgactgatcgtgaagaatctcccgaatgggatgaaggaggagcgtttcaggcagctgtttgccgccttcggcacgctgacagactgcagcctgaagttcaccaaagatggcaagttccgcaagtttggttttattggcttcaagtccgaggaagaggcccagaaggcacagaagcatttcaacaagagcttcatcgacacatcccggatcacagtggagttctgcaagtcattcggggacccggccaaacccagagcctggagcaaacatgcccagaaaccaagccagcccaagcagcctccaaaagactctactactccagaaattaagaaagatgagaagaagaaaaaggtggcaggtcaactggagaagctgaaggaggatacagagttccaggagtttctgtcagttcatcagaggcgggcgcaggcagccacttgggcgaatgatggcctggatgctgagccctcgaaagggaagagcaagccggccagtgactacctgaacttcgactccgattctgggcaggagagtgaggaggagggagccggggaggacctggaagaagaggcaagcctcgaaccaaaggcagctgtgcagaaggagctgtcggacatggattacctgaaatccaagatggtgaaggctgggtcgtcctcttcctcggaggaagaggaaagtgaagatgaagccgtgcactgtgatgaagggagtgaggccgaggaagaggattcctccgccaccccagtcctgcaggaaagagacagcaagggtgcaggccaagagcaagggatgccagctgggaaaaagagaccaccggaggccagagccgagacagagaaaccagcaaaccagaaggaacccaccacctgccacaccgtgaagctgcggggagccccgttcaatgtcacagagaaaaatgttatggaattcctggcacccctgaaaccagtggccattcgaattgtgagaaacgctcatgggaataaaacaggatacatctttgtggatttcagcaatgaagaggaagtgaagcaagctctgaaatgcaaccgggagtacatgggtgggcgctacatcgaggtgttcagggaaaagaacgtccccaccaccaagggtgcaccaaagaataccaccaaatcctggcaaggccggatactcggggagaacgaagaggaggaggacctggccgaatccggaaggctctttgtacggaacctgccctacaccagcaccgaggaggatctggagaagctcttctccaaatatggtcccctgtctgagctccactaccccatcgacagcctgaccaagaaacccaagggttttgcattcatcaccttcatgttccctgagcacgctgtgaaggcctactcggaggtggacgggcaggtattccagggcaggatgctccacgtgttaccatctaccatcaagaaggaagccagcgaggatgccagtgccctgggatcgtcgtcctacaagaagaagaaggaggcccaggacaaagccaacagtgccagctctcacaactggaacacactattcatggggccgaatgccgtggccgatgccatcgcacagaagtacaacgccaccaagagtcaagtgtttgaccacgagaccaagggcagcgtggccgtgcgcgtggctctgggggaaacccaccttccccttgctagctagttcttacttcataaggttttagagagaaataaacgcagtaatgcatgaagagtg

SEQ ID NO: 10552 - DNA, 1152 bp, Homo sapiens
aggtctcagccacgtgactgtgttccggctcggtaaagatggcggcgcccagggcggtagcgtgaaacttggtggaagacgctgaccagtcgtgttggaatcaaaacagcggggaccctgcgccatgtcgcgactgatcgtgaagaatctcccgaatgggatgaaggaggagcgtttcaggcagctgtttgccgccttcggcacgctgacagactgcagcctgaagttcaccaaagatggcaagttccgcaagtttggttttattggcttcaagtccgaggaagaggcccagaaggcacagaagcatttcaacaagagcttcatcgacacatcccggatcacagtggagttctgcaagtcattcggggacccggccaaacccagagcctggagcaaacatgcccagaaaccaagccagcccaagcagcctccaaaagactctactactccagaaattaagaaagatgagaagaagaaaaaggtggcaggtcaactggagaagctgaaggaggatacagagttccaggagtttctgtcagttcatcagaggcgggcgcaggcagccacttgggcgaatgatggcctggatgctgagccctcgaaagggaagagcaagccggccagtgactacctgaacttcgactccgattctgggcaggagagtgaggaggagggagccggggaggacctggaagaagaggcaagcctcgaaccaaaggcagctgtgcagaaggagctgtcggacatggattacctgaaatccaagatggtgaaggcctcaggccactgcccagcggcccaggcatcctgggtttcaccagtgacgcgttctagcagacactgactgcgcacctgctctgtagcagacacggaagagtccaagggagcagccacgttaggaagagagacttgggaacagctacacagggagctagaacccctgctccccctgtccccaccccaggagagtaaggggacgagggccagctctctggcatcaggctgcttggacatgaaaccccgtctccaagctcaagctgggagaccctggcccagtttccttatctccttgggcccagccttccccttgctagctagttcttacttcataaggttttagagagaaataaacgcagtaatgcatgaagagtg

SEQ ID NO: 10553 - DNA, 437 bp, Homo sapiens
taaaatctcacaaaagaagagatgcatagggaagagtctagaagagtcccaaatgtgaagtgtccattttcctataaaatcaggacatgttacccttccagtatggatatgaaatatcaacatgtgtcccactgttcagagttttattggggctccattacctagtcatgattgattgattgattgattgcccaggtggttgaactcagtctccaggttgaccgatactgtatgacgcagatgccctaccccagatcacatggttagtctttctggcatggccagcgttcacccggtgactctcagttatggtcgctaagctactagataaaaggattaggcccttattcaaactggttgaatgcttgtcaactgtcaccagagtccatccacagaataaatagaaatataagaggcaaacagacaaaaaaaaaata

SEQ ID NO: 10554 - DNA, 399 bp, Homo sapiens
tctgataaaactttatttatggacactgaaatttggatttcatataattttcatttgttatgaagtatcttcttttgactttttttcaaccattaaaaaatgaaaaaaggccagggtggcggctcacgcttataatcctagcacttcgggaggctgaggtaggaggattgcctgaggacaggagtttgagaccaacctgggcaacatagtgagacccccctaccaacctctataaaaaattagccaagcatggtagcatgtgcctgtagtcccagctacttggaagactgaggtgggaggattgcttgagcccaggagacagaggttgcatgagctatgatcatgccactgccttccagcctggatgacagagtgagaccctatctctaaaaaaaaaaa

SEQ ID NO: 10555 - DNA, 388 bp, Homo sapiens
taaaaaatacatcacattgttacatgcataatgcattcttatgtgttatgtattagtaacagtgtctataatttttaacgatggacattttggttccaagtctttgactttggttctgtatatatcctagcaaataaccccccactagaactgaagggcattttgcaggaaatgtactgaatgaaagccccattgcaactgccatgtctgcacctgtcatcctggaaactccattatgaacattctgaactgagaacttcagtggatgaggccattcaattccctatcaaaccatacatcttccagcagatccccagcccacagcattttcctcatcccccagggaccatggtttctccttccactgatggctgtaccctggggtgca

SEQ ID NO: 10556 - DNA, 311 bp, Homo sapiens
  misc_feature (280)..(280): n is a, c, g, or t
  misc_feature (285)..(285): n is a, c, g, or t
tccactgggtgtggtattcctcaagctgtttcttctggcatcggtttcagtaacgcgagtgtttccagtaagttgatttggggcaggctccgtagctgtcggtgtccatccgtcacgcctgaactccgcaggccctggcaattcttaatgttgcttggctgtgtcgtcttttttccttcattaatctcaccagaagtttgtccatttcaccagtattttattttaatttatttattttgagaggaagtcttgctgtgagccaagactgcgccactgcacntccancctgggcgaaagagcgagactcagtc

SEQ ID NO: 10557 - DNA, 422 bp, Homo sapiens
aatgcatcaaatcaaccaatgattatttaaaaacagcagctacaaaaactctgcaaagcgggtgggaatttcctgcttgggtctagcctccgtgtttcccgcgcacagcccggtctttaccctggatgcttccgaaccggcatcatctggcatctccgacagtcttgatgcgacttaacgcatggtaagaacccatcagagaaggccaaagggatttccagagacaggtagaggcactgcgctgggcagcaccagggaggaatattatcttttcaagcagctggactctgacctagaagccggaactcctgagtactgaggtcagcacctctctcacacacccccagctataagcttgaaggaagcccctccccttctctgggccttgatttcccctcctgctcagtggggacgttcttggt

SEQ ID NO: 10558 - DNA, 276 bp, Homo sapiens
acgaacatcacacgccggggcctgttgtggggtgggggactaggggagggataatattaggagaaatacctaatgtagatgacaggttgatgggtgcagctcaccaccaaggtacatgtatatctaggtaacaaaccggcacgttctgcacatgtatctgaacttaaagtataatttaaaaaaatttttaatacagcttaataagcatcctccatccagtttttgtacttactggaatgatttcacctttccatgtattaaaatcttttgcctgtt

SEQ ID NO: 10559 - DNA, 388 bp, Homo sapiens
  misc_feature (6)..(6): n is a, c, g, or t
  misc_feature (25)..(25): n is a, c, g, or t
  misc_feature (89)..(89): n is a, c, g, or t
  misc_feature (97)..(97): n is a, c, g, or t
atgaanaaaacccaaagttatccgnctggaatccataatacatgagttcctaatacacccctggtagatagaattatcctagttcttanacttttanttgttgttgagatggagttgcactccagcctggcaaaatactggtggccaggcatggtggctcatgcctgtaattctagcactttgggaggctgaggtaggtgggtagcttgagtccagcctgggcaacatagtgaaaccctgtctctaccaaaaatacaaaaattagctgggtgtggtggtgtgtgcggtagttccagctgggaggattgggtgagcccgggaggtggaggttgtggcgagccgagatggcgccattgcattccagcgtgggcaacaagagcaaaactct

SEQ ID NO: 10560 - DNA, 2595 bp, Homo sapiens
  misc_feature (466)..(466): n is a, c, g, or t
  misc_feature (1048)..(1048): n is a, c, g, or t
taaaatactttcagttttcacattttgacaactggcaatcttgaatggtcaaaaatgaattatctgtgttataccatttgggccttgtttgcttgtttttgcctctggttcttacatttatcattaaaatctccactgtagaaagcagttgggtgaagcaaggaggaaattgaaagtcaatccatatggatgttgcttagcagcttttgtaaagtacaataacaaatctccctcacaaatgagagaaactaaaaggacttgttaaataaaactccaaacttaagtctgcttctaggaattgtatttatttatcgtttcaagtatatcttttcatactgactatgagtaaagcaaagcaatagattgtttgaaagtctatagtttatgatgagctttgtcttttcttttcttcttacttcaggctttgagttacacaggtagccacatgaaagtccacttacccagnttagtagagaatgaaatcctgaaagaggatggatcaataattaaaaggtttgggttagcatggggtgatgctttgccaactaacaccataaaaatttttccaattttaagaaaagaaggggagaatccctacatctaccctaaagaggatagaaaactgcctactctcctgtattataatactttggtcaagtaatggatctattgaagtatcatccctgaagtatcctcttgatacttcaaacataatactaagtcatagcaagaatgagactcacgcttacacagtctgactccctgggttttagcaagccatcaacttagttgaagccagcctgatggtattacattgtgtcgatagattcagagagcataggaagaagaatctaatcgatggatcacagattaattttgtgaccagctatattcagctcaatcttagtaaatcattactttgaatggtatgtgctttcttttaacagctgctttatgattctgcatgtgagtggccaataacataagcatgagtttgatatccatgaaacaaatatacctagcgatgctgaaacctggggctttaatnagttaagcaagtgtcatgaaagcagtaagcagcacatttttacgcttatacaagggggctgactgtgaggcacactggtctgcccaggtctctgttatggatttgatgtataaacttgggcactgttccacagatctactctggcttctcactggtcctctaacagcactgtaagtattgagattaataaaatgtgctcagcttctcggtgaaaagacacaatggaaatccaagttacaattgtgcttctcacttcattgaaaagggagaaagattgtcattcagagtatgctacagaactattttaagcctttagaacataataattagaacagcaaaattaaaggttctgtcacaattccacccaccaatcaaatgggaaaagagcagcagctaggaatttaaaagagtgtaattgctctctcagaacttaaaaaatgctacatgaattaaggataaaatgccttttatactctcaacttttaagtcttttattcaattattcagatgaaaccacataatccacgcatgcactaacatcatgggctcttcaaacaggaatagatttagagatcaattaatccaaagttctcaattacagctggtgaatttgaagccaggaatatagacaactccatagagtttccacagctagttagttatggaagctagttagttacagaactctatttatgatgtacaacatttattttatacattgttaaagatatcatatacatgtgcatattcagaaacacattggcctacatttgcctacacagaatatcacgaaatgtcctataatggaggcttaacccctggcatcaatgctataaaggcttctactagcttttagcagaaatagtcagaaaagtgcctttttgaagaaaaaaaaaatggctgccgcgtatttaggaaaacatcagatttcaatcattggaatcaaatttgaccttttcatcagcaagaacaaatttaagtttgcttccagatgcagaacaattcatatagtattaaaggaaaaaggggagtagaagaacataagggaagaaggaagaaggaaacaaggatgtccaaaaaaaagctgaaagtattttagctgaagtaagttatttttaaaaatcaggatgatcgtaacaaatgcatagaggtattggatgatggcagaacttccaacttctgaacaatgaaaacataaggaaaatgctgggtaaagctacaaaaactgatcatttcctatggcggttttaagtgtagatgcatagtgtatggttatggactcaggctctggaatctttgactcttggtcccactgtgtgctaattctgttattttttgtttggactattgcttaaattctcggagattcaatttctttatttgttatactagtgtctggcccatacaacacattcgtcaaatacttgtggaatgaggacccgcatttggaagtgtatagtgaaaaaggctgctctgcctatggagtagccattttttattcctttgctttcctaataaacttgcttttactttactctaaaaaaaaa

SEQ ID NO: 10561 - DNA, 421 bp, Homo sapiens
ctcttaggaacaagggagaaggccaagactttaaaatctgcacttctcaaatgcatacatggaagccagtggggtttaggcagttctctttgtcctaagcttgagagagagtgtagatttccctccctggtcaacttctagtcccttcttcctaacctgaagtcctacttctgtgtctgataagcggaatcaagtgactgagaattctgctactcttttagccctgtgaccttgaataaaacgtttaatctctctaagcctattttcctatctgtaaaatggaggatttacttcctttcagggttgttttgtggattgaacaaccgtgatgttttatgtggatgaatgtaaaacacctagaataatgaatggcacgtaaaatatgttaaataaatgttagatggctttctgaaaaaaaaag

SEQ ID NO: 10562 - DNA, 289 bp, Homo sapiens
gaaaaatattgagtgttaaggcttgctgtgccagacacttggctaggtgtaggataaaagaaatagggagcttttgattacagtctagaaggtgagacacattatacatttatttgtgtgggtatctgttaagtgcgaagtgttaagtgctataaagaaaaagcatagggtagtagaagggagtttaaaaggaacacttccctgaacagaaatgggctataaactgagaccttagggatgggtaagtaacccaggccgaataagaagagtctcccaggaggaggacatg

SEQ ID NO: 10563 - DNA, 11364 bp, Homo sapiens
  misc_feature (11336)..(11339): n is a, c, g, or t
gttggttggagtggcctcactcttacctgccaacctgggaggttgatgatgaacatgtctttaccttttctttggagtttgcttaccttattaatatttgctgaagtaaatggcgaagcgtggagaacttgagctgcagagacaaaaaagaagcatcaatctccaacagcctcgaatggctacagagagaggaaatttggtgtttcttacggggtctgctcaaaacattgagtttagaaccggatccctgggaaaaattaaattaaatgatgaagatctcagtgagtgtttacatcagatccagaaaaacaaagaagatattatagagttaaaagggagtgcaattggtctgcctcaaaatatatctagtcaaatctatcagcttaattccaagctggtggatcttgagagaaaattccaaggcttgcagcagactgttgacaaaaaggtttgcagcagcaatccttgccagaatggtggaacctgcctcaatctgcatgattcctttttttgtatctgtcccccacagtggaagggtcctctctgctcagctgatgttaacgaatgtgagatttactcaggaacacccttgagctgccagaatggaggcacatgtgttaatacaatgggaagttacagttgtcactgcccacctgagacgtacggaccccagtgtgcatccaaatatgacgactgtgaagggggttctgtggcacgctgtgtccatggcatctgtgaggatttaatgcgagagcaagctggagagcccaagtacagctgcgtctgtgatgctgggtggatgtcttcacccaacagccctgcctgcacgctggacagagacgagtgcagcttccagcccgggccttgctccacacttgtgcagtgtttcaacactcaaggctctttctactgtggggcctgtccaacaggctggcaaggcaatggatatatttgcgaagatatcaatgaatgtgagataaataatggcggctgttctgtggctccacccgttgagtgtgtgaatacacctgggtcttcccactgccaggcctgtccaccagggtaccagggtgacggaagagtgtgcacactcacagacatctgctcagtcagtaatggaggctgccacccagatgcctcatgctcctcaactctaggttccttacctctctgcacgtgtctcccgggttatactggaaatggttatgggccaaatggatgtgtgcagctcagtaatatttgcctaagtcacccctgtctaaatggacaatgcatcgacactgtctctggttatttttgtaagtgtgactcaggttggacaggtgtcaactgtacagaaaacatcaatgagtgtttgagcaacccctgtttgaatggaggaacttgtgttgatggcgttgattctttcagttgtgaatgcacacgtctctggactggagctctctgtcaggttcctcagcaagtttgtggagagtccctctcaggaataaatggaagcttcagctacaggagcccggatgttggttatgttcatgatgttaactgcttctgggttatcaaaactgaaatgggaaaggtcctgcgtatcactttcacttttttccggttagaatccatggacaactgtccacacgagtttcttcaggtttatgatggagattcctcttctgcttttcaacttggaagattttgtggctccagcctccctcatgaactcctcagcagtgacaatgctctctattttcatctctattctgaacatttaagaaatgggagaggctttacagtaagatgggaaacacagcaaccagagtgtggaggtatcctgactggtccttacggttctattaagtctccggggtatcctggaaactatcccccaggaagagattgtgtctggattgttgtaactagtcctgacctcctggtaacatttacttttgggaccttgagcctcgagcaccatgatgactgcaacaaagattaccttgagattcgagatggtcctttgtatcaggacccccttcttgggaagttctgcaccactttctctgtcccaccgctccagactactggcccctttgccagaattcacttccattcagactcccagattagtgaccaaggcttccatatcacctacttaacatcaccttcggatctgcgttgtggtgggaactacacggacccagagggtgaactcttcttgcctgagttgtctgggcctttcactcacaccaggcaatgcgtctatatgatgaagcagccccagggagaacaaatacaaatcaacttcacccacgtggagctgcaatgccagagtgacagttctcagaattacattgaggttcgagatggtgaaaccttacttggaaaagtctgtggcaacggaaccatctctcacattaaatccattactaatagtgtctggatcaggtttaaaatagatgcttctgttgaaaaagctagtttcagagctgtttatcaagtcgcttgcggggatgaattaactggagaaggggtcattcgctcgcctttttttcctaacgtgtatcctggagaaagaacctgtaggtggaccatccaccagccccaaagccaagtcattctcctcaacttcactgtctttgaaattggaagttctgcccactgtgaaacagattatgttgagattggtagcagttccattttgggttctcctgaaaataaaaagtattgcggtacagacataccttcatttataacatctgtgtacaattttctttatgtcacattcgtgaaaagttcttctactgaaaaccatggtttcatggctaagttcagtgctgaggatttggcatgtggagaaattcttacagaatcaacagggaccattcaaagtcctggccatccaaatgtctacccccacggtatcaactgtacttggcatatattagtccaacctaatcacctgattcatttaatgttcgaaacatttcatctggagtttcattacaattgcacaaacgactacttggaagtttatgacaccgactctgagacatcccttggaagatactgtggaaagtcgatcccgccatctctcacaagcagtggtaactcattgatgctggtgtttgtgactgactccgacctcgcttatgaaggcttcttaataaactatgaagcaatcagtgcagcaacagcatgtttgcaagactacacagatgatttggggacattcacttctccaaacttccccaataattatcccaacaactgggaatgcatttatcggatcacagtgagaactggccaactgattgcagtgcacttcacaaacttctccttggaggaagccattggaaactattatacagattttctggaaatcagagatggaggctatgaaaaatcaccattgctgggaatattctatggctcaaatctacccccaacaatcatctctcatagtaacaaactatggttaaaatttaagagtgaccaaatagacacaaggtctggattctcagcttactgggatgggtcatcaacaggttgcgggggtaatctcaccacttcaagcggtacgttcatatctcccaactacccgatgccctattaccacagctctgaatgctactggtggttgaaatctagccacggcagcgcatttgaactggaattcaaagactttcacttggagcatcatccaaactgcactttagattacctggctgtatatgatggcccaagtagcaactctcatctgctaactcagctttgtggggatgagaaaccccctcttattcgttctagtggagacagcatgtttataaaactgaggacagatgaaggtcagcaaggacgtggcttcaaggctgaataccggcagacatgtgagaatgtggtaatagtcaatcaaacctatggcatcttagagagtatagggtatccgaatccttattctgaaaatcagcattgcaactggaccatccgggcaacaacaggcaacactgtgaactacacatttttagcatttgacttggaacatcacataaactgctccacagattatttagagctctatgatggaccacggcagatgggacgctactgtggagtagacctgccccctccagggagtactacaagctccaagcttcaagtgctgctccttacagatggggttggccgccgtgagaaaggatttcagatgcagtggtttgtttacggttgtggtggagagctgtctggggccacaggctccttcagcagccccgggttccccaacaggtatccaccaaacaaggagtgtatctggtacattaggacggaccccgggagtagcattcagctcaccatccatgacttcgatgtggagtatcattcaaggtgcaactttgatgtcttggagatctatggaggccccgatttccactctcccagaatagcccaactgtgtacccagagatcacctgagaaccccatgcaggtctccagcactggaaatgagctagcaattcgattcaagaccgacttgtccataaatgggagaggcttcaatgcgtcatggcaagcagtcactggaggttgtggtgggattttccaggctcccagtggagagattcattctccaaattaccccagtccttataggagcaacacagactgttcttgggtcattcgggttgacagatatcatcgtgttctcttgaacttcactgactttgatcttgaaccacaagactcttgtattatggcatacgatggcttaagctccacaatgtcccgccttgccaggacgtgtggaagggagcagctggctaaccccatcgtctcctcaggaaacagcctcttcttgagatttcagtctggcccttccagacagaacagaggcttccgagctcaattcaggcaagcctgcggaggccacatcctcaccagctcatttgatactgtttcctctccacggttccctgccaattatccaaacaatcagaactgcagctggatcattcaagcgcaacctccattaaatcatatcaccctctcttttacccactttgaacttgaaagaagcacaacgtgtgcacgtgactttgtagaaattttggatggcggccacgaagacgcgcccctccgaggccgttactgtggcaccgacatgccccatcctatcacatccttcagcagcgccctgacgctgagattcgtctctgattctagcatcagtgctgggggtttccacaccacggtcaccgcatcagtgtcggcttgtggtggaacgttctacatggctgaaggcatcttcaacagccctggctacccagacatttatccccctaatgtggaatgtgtctggaacatcatcagttcccctggcaaccggctccagctgtcttttatatctttccagttggaagactctcaggactgcagcagagattttgtggagatccgtgaaggaaatgccacgggtcacttggtgggacgatactgtggaaactccttccctctcaattattcttccatcgttggacataccctgtgggtcagatttatctcagatggttctggcagcggcacgggcttccaggccacatttatgaagatatttggcaatgataatattgtgggaactcatgggaaagtcgcctctcctttctggcctgaaaactacccacataactccaattaccaatggacagtaaatgtgaatgcatctcacgttgtccatggtagaatcttggagatggacatagaagaaatacaaaactgctattatgacaaattaaggatctatgatgggcctagcattcacgcccgcctaattggagcttactgtggtacccagactgaatctttcagctccactggaaattctttgacatttcatttttactccgactcttcaatctcggggaagggattccttctggagtggtttgcagtggatgcacctgatggtgttttacctaccattgctccaggtgcttgtggtggcttcctgaggacgggagatgcacccgtgtttctcttctccccgggctggcctgacagttacagtaatagagtggactgtacgtggctcatccaggctcccgactctaccgtggaactcaacattctttccctggacattgaatctcaccgaacgtgtgcctatgatagccttgtgatacgagatggagataataacttggcccagcagctagcagttctctgtggcagagagatccctgggcccatccggtctactggagagtacatgttcatccgcttcacctcggactccagtgtaaccagggcaggcttcaatgcatcctttcacaagagctgcggtggatatttgcatgcagacagagggatcatcacgtcccccaagtatccagagacttacccatccaacctcaactgttcttggcacgtcctggtccaaagtggcctgaccattgctgtccattttgaacagcctttccagattccaaatggagattcttcttgcaaccagggggattacttggtgctaagaaatggtcctgatatctattctccacccttgggaccccctggaggaaatggtcatttttgtggcagtcatgcttcatcaactctgttcacctcggataatcaaatgtttgttcagtttatttctgatcacagtaatgaagggcaaggatttaaaatcaaatatgaggcaaagagtttagcctgtgggggcaacgtctacatccatgatgctgattctgctgggtatgtgacctcccccaaccaccctcataattatcccccgcacgctgattgcatttggatcttagcggctccaccggaaacacgcatacagctgcaatttgaagatcgattcgatattgaagtaacacccaactgtacttccaactaccttgagttgcgggatggagtggattcggatgcaccaatactttccaaattttgtgggacatctttgcccagcagtcagtggtcctcaggagaggttatgtatttgagatttcgatctgacaacagccccacacatgtgggattcaaggccaagtattctatagctcagtgtgggggaagagtaccagggcaaagtggtgttgttgaaagcattggacatccaacacttccatacagagacaacttattctgtgagtggcatctccaggggctctctggacactatctcaccatctcttttgaagactttaaccttcagaattcttctggctgtgaaaaagacttcgtggagatctgggacaatcatacctctggaaacatcttgggcagatactgtggaaacaccattcctgacagcatagacacttctagcaatactgctgtggtcaggtttgtcacagacggctctgtgactgcctcaggattcagactgcgatttgaatccagtatggaagagtgtggtggggatcttcagggctctattggaacatttacttctcccaactacccgaacccaaatcctcatggccggatctgcgagtggagaatcactgccccggagggaaggcggatcaccctaatgtttaacaacctgaggctggccacgcatccgtcctgcaacaatgagcatgtgatagtattcaatggcattagaagtaactcaccccagctagagaaactgtgtagtagtgtgaatgtaagcaatgagattaaatcttcaggaaacacaatgaaagtcatttttttcacggatggatccaggccatatggcggcttcactgcttcctatacctccagtgaagatgcagtgtgtggtgggtctcttccaaatactcctgaaggaaactttacttctcctggctatgacggagtcaggaattactcaagaaacctgaactgcgaatggactctcagcaatccaaatcagggaaattcatccatttccattcactttgaagatttttacctagaaagtcaccaagactgtcaatttgatgtcctcgagtttcgagtgggtgatgctgatgggcccctgatgtggagactttgtggtccttcaaagcctacattgccattggttataccttattctcaggtatggattcactttgtcaccaacgaacgtgtagaacacattggattccatgcaaagtattcctttacagattgtggcggaatacagataggtgacagtggagtgatcacaagccccaactatccaaatgcttatgacagcctgacccactgctcttggctgttggaggccccacaagggcacaccatcactctcacatttagtgactttgatattgaaccccatacaacttgtgcttgggactctgtcactgtcaggaatggtgggtcccctgaatcacccatcataggacaatactgtggaaattcaaaccccaggacaatacagtcaggttccaatcagctggtcgtgacttttaactcagaccattcattgcaaggtggtggattttatgctacgtggaacacacaaactttaggttgtggtggaatatttcattctgataatggtacaatcagatcccctcactggcctcagaattttcccgaaaacagcagatgttcctggacggccattactcacaaaagtaaacacttggagatcagctttgacaacaacttcctaatccccagcggtgatggacaatgtcagaatagcttcgtgaaggtgtgggcaggaactgaggaggtggacaaagccctgctagccactggctgtgggaacgtggctccgggtcccgttatcacaccaagtaacacattcactgccgtcttccagtctcaggaggcaccagctcagggcttctccgcgtcctttgttagccgatgtggaagtaatttcactggcccttcaggttacatcatttctccaaattacccaaaacaatatgacaacaacatgaattgcacctatgtcatagaggctaatcctctgtcagtggtcctcttgacttttgtgtccttccacttagaagctcgttccgctgtgacgggaagctgtgtcaacgatggcgtgcacattatcagaggttacagcgtcatgtccaccccatttgctactgtgtgtggggatgagatgccagctcccctcaccatcgctgggccggttctgcttaacttctactccaacgagcaaatcacagacttcggattcaagttttcctataggataatctcctgtggtggtgtgttcaatttctcttctggaatcatcacaagtcctgcctattcatacgcagactacccaaatgatatgcactgtctgtataccatcaccgttagtgacgacaaggtgatcgagctcaagttcagtgattttgatgtggttccctccacctcctgctcccatgactacctggcaatttacgatggtgccaataccagcgatccccttcttggcaaattctgcggttccaagcgcccaccaaatgtgaagagcagcaataatagtatgctcctggtgttcaagacagattcatttcagacagcaaaaggctggaagatgtctttccggcagacattggggcctcagcaaggatgtggtggttatctgacaggctcgaataatacctttgcctctcctgattctgattcgaatggaatgtatgacaagaatttaaactgtgtatggatcataattgcacctgtaaacaaagtaattcacctcaccttcaatacatttgctctggaggcagcaagtactaggcaaagatgcctttatgattatgtaaagttatatgatggggatagtgaaaatgcgaacttggctggaacgttttgtggttccacagtacctgctccttttatctcttctggtaacttccttacggttcaattcatcagtgacttaacattagagagggaaggatttaatgctacatacaccatcatggacatgccttgtggtggaacgtacaatgcaacttggaccccacaaaatatttcatcacccaattcatcagacccagatgtcccattttccatctgtacttgggtcattgattcccctccgcatcagcaggtcaagataactgtgtgggcattacagctgacctcgcaagactgcacgcagaattacttacagcttcaggactcaccgcagggtcacggaaattcaagatttcagttctgtggcagaaatgcttcggctgtgccagtgttttattcttctatgagtactgcaatggtcattttcaaatctggagttgtaaacagaaactctagaatgagtttcacctatcagattgcagattgcaacagagactatcacaaggcatttggcaacctgagaagccctggatggccagataactacgacaatgacaaggattgcaccgttactctcacagccccccagaaccacaccatttccctcttttttcattcacttggcatcgagaactcagttgaatgcagaaacgatttcttggaggtgagaaatggaagtaacagcaattcaccattactgggcaagtactgtggaactctgctgccaaaccctgtcttctctcaaaataatgaactatacctacgatttaagagtgatagtgtaacttctgatcgtggatatgaaatcatctggacttcatcaccctctggatgtggtggaactctttatggagacagaggctcattcaccagccccggctatccaggcacatacccaaacaacacgtactgcgagtgggtccttgttgctcctgctggaaggcttgtcaccatcaacttctacttcatcagcattgacgatccaggagactgtgtccagaactatctcacactctatgatgggcccaacgccagctctccatcctctggaccatactgcggaggcgacaccagcatagctcccttcgtggcttcctcaaatcaggtcttcataaaatttcatgctgattatgcacggcgtccatccgcattccgattaacttgggacagctaagtgggtaacaactcgtgttcactcagcactttccctctgcagcacgctggacagcactctgccatcctgatacatgacccctgctgatgccacagagaataagctgaacttgtatggtttttcaccaaaccatggatagaatcaatatttgtaggccaggcgtggtggctcacccccctgtattctcagcactttgggaggccgaggcaggttgatcacctgaggtcaggagtttgagactagcctggccagcatggtgaaacctcatccctctaacaatataataattagccaggcgtggtggtgggtgcctgtaattccagccactcgagaagctgaggcaggagaattgcttgaacccaggaggcagaggttgcagtgagctaagatcacaccactacactccagcctgggcgannnngtaagactccatctcaaaaaaaaaa

SEQ ID NO: 10564 - DNA, 720 bp, Homo sapiens
gttggttggagtggcctcactcttacctgccaacctgggaggttgatgatgaacatgtctttaccttttctttggagtttgcttaccttattaatatttgctgaagtaaatggcgaagcgtggagaacttgagctgcagagacaaaaaagaagcatcaatctccaacagcctcgaatggctacagagagaggaaatttggtgtttcttacggggtctgctcaaaacattgagtttagaaccggatccctgggaaaaattaaattaaatgatgaagatctcagtgagtgtttacatcagatccagaaaaacaaagaagatattatagagttaaaagggagtgcaattggtctgcctcaaaatatatctagtcaaatctatcagcttaattccaagctggtggatcttgagagaaaattccaaggcttgcagcagactgttgacaaaaaggtttgcagcagcaatccttgccagaatggtggaacctgcctcaatctgcatgattcctttttttgtatctgtcccccacagtggaaggtgagtcatctactctttggttaagaatgatggcaggtcagcatctgtggtttccttggaatcatcaggcatatttaattctccatctaaagtttctaggattctgtggcctcccaaatcaaattgaaatataccaggtatgctaaaacccaaacagtggtgagtatgattgtataacccaccaa

SEQ ID NO: 10565 - DNA, 3857 bp, Homo sapiens
  misc_feature (3829)..(3832): n is a, c, g, or t
agcggatcacctcctaggaaatatgcagtaagatggattgtgtgcctgaaggttaaactctttttccaacaggtattcaatggcattagaagtaactcaccccagctagagaaactgtgtagtagtgtgaatgtaagcaatgagattaaatcttcaggaaacacaatgaaagtcatttttttcacggatggatccaggccatatggcggcttcactgcttcctatacctccagtgaagatgcagtgtgtggtgggtctcttccaaatactcctgaaggaaactttacttctcctggctatgacggagtcaggaattactcaagaaacctgaactgcgaatggactctcagcaatccaaatcagggaaattcatccatttccattcactttgaagatttttacctagaaagtcaccaagactgtcaatttgatgtcctcgagtttcgagtgggtgatgctgatgggcccctgatgtggagactttgtggtccttcaaagcctacattgccattggttataccttattctcaggtatggattcactttgtcaccaacgaacgtgtagaacacattggattccatgcaaagtattcctttacagattgtggcggaatacagataggtgacagtggagtgatcacaagccccaactatccaaatgcttatgacagcctgacccactgctcttggctgttggaggccccacaagggcacaccatcactctcacatttagtgactttgatattgaaccccatacaacttgtgcttgggactctgtcactgtcaggaatggtgggtcccctgaatcacccatcataggacaatactgtggaaattcaaaccccaggacaatacagtcaggttccaatcagctggtcgtgacttttaactcagaccattcattgcaaggtggtggattttatgctacgtggaacacacaaactttaggttgtggtggaatatttcattctgataatggtacaatcagatcccctcactggcctcagaattttcccgaaaacagcagatgttcctggacggccattactcacaaaagtaaacacttggagatcagctttgacaacaacttcctaatccccagcggtgatggacaatgtcagaatagcttcgtgaaggtgtgggcaggaactgaggaggtggacaaagccctgctagccactggctgtgggaacgtggctccgggtcccgttatcacaccaagtaacacattcactgccgtcttccagtctcaggaggcaccagctcagggcttctccgcgtcctttgttagccgatgtggaagtaatttcactggcccttcaggttacatcatttctccaaattacccaaaacaatatgacaacaacatgaattgcacctatgtcatagaggctaatcctctgtcagtggtcctcttgacttttgtgtccttccacttagaagctcgttccgctgtgacgggaagctgtgtcaacgatggcgtgcacattatcagaggttacagcgtcatgtccaccccatttgctactgtgtgtggggatgagatgccagctcccctcaccatcgctgggccggttctgcttaacttctactccaacgagcaaatcacagacttcggattcaagttttcctataggataatctcctgtggtggtgtgttcaatttctcttctggaatcatcacaagtcctgcctattcatacgcagactacccaaatgatatgcactgtctgtataccatcaccgttagtgacgacaaggtgatcgagctcaagttcagtgattttgatgtggttccctccacctcctgctcccatgactacctggcaatttacgatggtgccaataccagcgatccccttcttggcaaattctgcggttccaagcgcccaccaaatgtgaagagcagcaataatagtatgctcctggtgttcaagacagattcatttcagacagcaaaaggctggaagatgtctttccggcagacattggggcctcagcaaggatgtggtggttatctgacaggctcgaataatacctttgcctctcctgattctgattcgaatggaatgtatgacaagaatttaaactgtgtatggatcataattgcacctgtaaacaaagtaattcacctcaccttcaatacatttgctctggaggcagcaagtactaggcaaagatgcctttatgattatgtaaagttatatgatggggatagtgaaaatgcgaacttggctggaacgttttgtggttccacagtacctgctccttttatctcttctggtaacttccttacggttcaattcatcagtgacttaacattagagagggaaggatttaatgctacatacaccatcatggacatgccttgtggtggaacgtacaatgcaacttggaccccacaaaatatttcatcacccaattcatcagacccagatgtcccattttccatctgtacttgggtcattgattcccctccgcatcagcaggtcaagataactgtgtgggcattacagctgacctcgcaagactgcacgcagaattacttacagcttcaggactcaccgcagggtcacggaaattcaagatttcagttctgtggcagaaatgcttcggctgtgccagtgttttattcttctatgagtactgcaatggtcattttcaaatctggagttgtaaacagaaactctagaatgagtttcacctatcagattgcagattgcaacagagactatcacaaggcatttggcaacctgagaagccctggatggccagataactacgacaatgacaaggattgcaccgttactctcacagccccccagaaccacaccatttccctcttttttcattcacttggcatcgagaactcagttgaatgcagaaacgatttcttggaggtgagaaatggaagtaacagcaattcaccattactgggcaagtactgtggaactctgctgccaaaccctgtcttctctcaaaataatgaactatacctacgatttaagagtgatagtgtaacttctgatcgtggatatgaaatcatctggacttcatcaccctctggatgtggtggaactctttatggagacagaggctcattcaccagccccggctatccaggcacatacccaaacaacacgtactgcgagtgggtccttgttgctcctgctggaaggcttgtcaccatcaacttctacttcatcagcattgacgatccaggagactgtgtccagaactatctcacactctatgatgggcccaacgccagctctccatcctctggaccatactgcggaggcgacaccagcatagctcccttcgtggcttcctcaaatcaggtcttcataaaatttcatgctgattatgcacggcgtccatccgcattccgattaacttgggacagctaagtgggtaacaactcgtgttcactcagcactttccctctgcagcacgctggacagcactctgccatcctgatacatgacccctgctgatgccacagagaataagctgaacttgtatggtttttcaccaaaccatggatagaatcaatatttgtaggccaggcgtggtggctcacccccctgtattctcagcactttgggaggccgaggcaggttgatcacctgaggtcaggagtttgagactagcctggccagcatggtgaaacctcatccctctaacaatataataattagccaggcgtggtggtgggtgcctgtaattccagccactcgagaagctgaggcaggagaattgcttgaacccaggaggcagaggttgcagtgagctaagatcacaccactacactccagcctgggcgannnngtaagactccatctcaaaaaaaaaa

SEQ ID NO: 10566 - DNA, 1352 bp, Homo sapiens
gttggttggagtggcctcactcttacctgccaacctgggaggttgatgatgaacatgtctttaccttttctttggagtttgcttaccttattaatatttgctgaagtaaatggcgaagcgtggagaacttgagctgcagagacaaaaaagaagcatcaatctccaacagcctcgaatggctacagagagaggaaatttggtgtttcttacggggtctgctcaaaacattgagtttagaaccggatccctgggaaaaattaaattaaatgatgaagatctcagtgagtgtttacatcagatccagaaaaacaaagaagatattatagagttaaaagggagtgcaattggtctgcctcaaaatatatctagtcaaatctatcagcttaattccaagctggtggatcttgagagaaaattccaaggcttgcagcagactgttgacaaaaaggtttgcagcagcaatccttgccagaatggtggaacctgcctcaatctgcatgattcctttttttgtatctgtcccccacagtggaagggtcctctctgctcagctgatgttaacgaatgtgagatttactcaggaacacccttgagctgccagaatggaggcacatgtgttaatacaatgggaagttacagaaatccttgctctaacatccccaaggaaccggaagaaggctcccgtgattggcacagagagtaagcatggcctggtgcaaaaggagctgaagacttaggaagagccggagcattgaaggggagccactgaatggccttaagtagaaaaggggacaccccaccacaccagtgtccccagctgtactctttccatgtattagcaagctcatagttttgggtaaagagagctttattcaatgctatgtcaaaatgtgaccataacgaggtcaaagattaaactgaggttcaatgaatgaagtaactctctctgaccacagtcatcattatcagtacagctctatcttctcttctgacttattctgtcaagtgacttgtccacagaattctcctgctcagctcaggcatcactttctgcaggaaactttcccttccctttttaagcagagtgaggcatctcagggcctctatgttcccatcatgctctagggatatccatcgtcaaagctttgctgatgacacacacattgtctttctaaaaacgaagtccaaaaaattaaggcagatcaatgccaaacttacttttgtacagttctttgaagtcaccttttaaactagacagtgtctttccttatagtttggctggtctcttttattttgtgatttttaaaagattaataaataaattctgctatagaatgaacaaatcctttcaa

SEQ ID NO: 10567 - DNA, 5079 bp, Homo sapiens
gttggttggagtggcctcactcttacctgccaacctgggaggttgatgatgaacatgtctttaccttttctttggagtttgcttaccttattaatatttgctgaagtaaatggcgaagcgtggagaacttgagctgcagagacaaaaaagaagcatcaatctccaacagcctcgaatggctacagagagaggaaatttggtgtttcttacggggtctgctcaaaacattgagtttagaaccggatccctgggaaaaattaaattaaatgatgaagatctcagtgagtgtttacatcagatccagaaaaacaaagaagatattatagagttaaaagggagtgcaattggtctgcctcaaaatatatctagtcaaatctatcagcttaattccaagctggtggatcttgagagaaaattccaaggcttgcagcagactgttgacaaaaaggtttgcagcagcaatccttgccagaatggtggaacctgcctcaatctgcatgattcctttttttgtatctgtcccccacagtggaagggtcctctctgctcagctgatgttaacgaatgtgagatttactcaggaacacccttgagctgccagaatggaggcacatgtgttaatacaatgggaagttacagttgtcactgcccacctgagacgtacggaccccagtgtgcatccaaatatgacgactgtgaagggggttctgtggcacgctgtgtccatggcatctgtgaggatttaatgcgagagcaagctggagagcccaagtacagctgcgtctgtgatgctgggtggatgtcttcacccaacagccctgcctgcacgctggacagagacgagtgcagcttccagcccgggccttgctccacacttgtgcagtgtttcaacactcaaggctctttctactgtggggcctgtccaacaggctggcaaggcaatggatatatttgcgaagatatcaatgaatgtgagataaataatggcggctgttctgtggctccacccgttgagtgtgtgaatacacctgggtcttcccactgccaggcctgtccaccagggtaccagggtgacggaagagtgtgcacactcacagacatctgctcagtcagtaatggaggctgccacccagatgcctcatgctcctcaactctaggttccttacctctctgcacgtgtctcccgggttatactggaaatggttatgggccaaatggatgtgtgcagctcagtaatatttgcctaagtcacccctgtctaaatggacaatgcatcgacactgtctctggttatttttgtaagtgtgactcaggttggacaggtgtcaactgtacagaaaacatcaatgagtgtttgagcaacccctgtttgaatggaggaacttgtgttgatggcgttgattctttcagttgtgaatgcacacgtctctggactggagctctctgtcaggttcctcagcaagtttgtggagagtccctctcaggaataaatggaagcttcagctacaggagcccggatgttggttatgttcatgatgttaactgcttctgggttatcaaaactgaaatgggaaaggtcctgcgtatcactttcacttttttccggttagaatccatggacaactgtccacacgagtttcttcaggtttatgatggagattcctcttctgcttttcaacttggaagattttgtggctccagcctccctcatgaactcctcagcagtgacaatgctctctattttcatctctattctgaacatttaagaaatgggagaggctttacagtaagatgggaaacacagcaaccagagtgtggaggtatcctgactggtccttacggttctattaagtctccggggtatcctggaaactatcccccaggaagagattgtgtctggattgttgtaactagtcctgacctcctggtaacatttacttttgggaccttgagcctcgagcaccatgatgactgcaacaaagattaccttgagattcgagatggtcctttgtatcaggacccccttcttgggaagttctgcaccactttctctgtcccaccgctccagactactggcccctttgccagaattcacttccattcagactcccagattagtgaccaaggcttccatatcacctacttaacatcaccttcggatctgcgttgtggtgggaactacacggacccagagggtgaactcttcttgcctgagttgtctgggcctttcactcacaccaggcaatgcgtctatatgatgaagcagccccagggagaacaaatacaaatcaacttcacccacgtggagctgcaatgccagagtgacagttctcagaattacattgaggttcgagatggtgaaaccttacttggaaaagtctgtggcaacggaaccatctctcacattaaatccattactaatagtgtctggatcaggtttaaaatagatgcttctgttgaaaaagctagtttcagagctgtttatcaagtcgcttgcggggatgaattaactggagaaggggtcattcgctcgcctttttttcctaacgtgtatcctggagaaagaacctgtaggtggaccatccaccagccccaaagccaagtcattctcctcaacttcactgtctttgaaattggaagttctgcccactgtgaaacagattatgttgagattggtagcagttccattttgggttctcctgaaaataaaaagtattgcggtacagacataccttcatttataacatctgtgtacaattttctttatgtcacattcgtgaaaagttcttctactgaaaaccatggtttcatggctaagttcagtgctgaggatttggcatgtggagaaattcttacagaatcaacagggaccattcaaagtcctggccatccaaatgtctacccccacggtatcaactgtacttggcatatattagtccaacctaatcacctgattcatttaatgttcgaaacatttcatctggagtttcattacaattgcacaaacgactacttggaagtttatgacaccgactctgagacatcccttggaagatactgtggaaagtcgatcccgccatctctcacaagcagtggtaactcattgatgctggtgtttgtgactgactccgacctcgcttatgaaggcttcttaataaactatgaagcaatcagtgcagcaacagcatgtttgcaagactacacagatgatttggggacattcacttctccaaacttccccaataattatcccaacaactgggaatgcatttatcggatcacagtgagaactggccaactgattgcagtgcacttcacaaacttctccttggaggaagccattggaaactattatacagattttctggaaatcagagatggaggctatgaaaaatcaccattgctgggaatattctatggctcaaatctacccccaacaatcatctctcatagtaacaaactatggttaaaatttaagagtgaccaaatagacacaaggtctggattctcagcttactgggatgggtcatcaacaggttgcgggggtaatctcaccacttcaagcggtacgttcatatctcccaactacccgatgccctattaccacagctctgaatgctactggtggttgaaatctagccacggcagcgcatttgaactggaattcaaagactttcacttggagcatcatccaaactgcactttagattacctggctgtatatgatggcccaagtagcaactctcatctgctaactcagctttgtggggatgagaaaccccctcttattcgttctagtggagacagcatgtttataaaactgaggacagatgaaggtcagcaaggacgtggcttcaaggctgaataccggcagacatgtgagaatgtggtaatagtcaatcaaacctatggcatcttagagagtatagggtatccgaatccttattctgaaaatcagcattgcaactggaccatccgggcaacaacaggcaacactgtgaactacacatttttagcatttgacttggaacatcacataaactgctccacagattatttagagctctatgatggaccacggcagatgggacgctactgtggagtagacctgccccctccagggagtactacaagctccaagcttcaagtgctgctccttacagatggggttggccgccgtgagaaaggatttcagatgcagtggtttgtttacggttgtggtggagagctgtctggggccacaggctccttcagcagccccgggttccccaacaggtatccaccaaacaaggagtgtatctggtacattaggacggaccccgggagtagcattcagctcaccatccatgacttcgatgtggagtatcattcaaggtgcaactttgatgtcttggagatctatggaggccccgatttccactctcccagaatagcccaactgtgtacccagagatcacctgagaaccccatgcaggtctccagcactggaaatgagctagcaattcgattcaagaccgacttgtccataaatgggagaggcttcaatgcgtcatggcaagcagtcactggaggttgtggtgggattttccaggctcccagtggagagattcattctccaaattaccccagtccttataggagcaacacagactgttcttgggtcattcgggttgacagatatcatcgtgttctcttgaacttcactgactttgatcttgaaccacaagactcttgtattatggtttaatcatacttggtcggacgtcagacagatggggtttgtatattggctctgcactgctaagcgtgtgattgggcaagtcatgtatgttttcagagctcagttttccctgctgcaaagtggaactgtaagaatcaaatgtaaacaaatgtatttaagtacctatcagtgtctggttcagataagtatttgctgctattcctaatttttctattacaatgactcctgcttctattactattaacgctatgttaaagatcttaaggaatcttttaaaaaaattttctccctgagcaagatgaaacttagtaaacaagataaaaaatccagtagaaaaa

SEQ ID NO: 10568 - DNA, 335 bp, Homo sapiens
gtaaatagcaaagagctgtcttttactggagaagccaatctgattggtttcttgattctgggattgtcatgctctgtccctcacttgtccatgtttgcccagctgtatttaaacttcaatattgcaaataattttaaattaacagcagccatttctttttaacagacaaagggagaaagttctagtttctttttatcaataaataagaatcctggttagaataaggaaattgcattaatggaaattggggctgggtgctgtggctcactcctgtactcacaaacactttgggaggccgaggcagggggatcacctgaggtcaggagtttgaaacc

SEQ ID NO: 10569 - DNA, 581 bp, Homo sapiens
tgtccctttatctacttattccagatcatctggatgatgcttaataccacaagcacctattcctctattcattcatttttagtgcatttggattttctggagcattggtcggtcctgagttgaaattcattaattgtcatggtctaatgagaaaaaataggcttaattaaaaaaatgcatctgcgtcaagtataggccaaatgatatcacagagtgctgtttttagaagggagaaaaatgttcgggaaatggggtctttatgtagcacgtggcagctcaggcatgatgaatgcaagggaatctgggccattgcagtcggcaccgtattcaaattgaaagcagcaacttagtttcagcaaaacaatataatcctttacatgccactaatgttattttgagttttattggctttgcagttttgggtttaattagtgcattcattttatagtggtatgagactacaagcatataaatcattttgtatttctatatatttaagtgagttataataaaaataactggtcaaccctggaggtccttgaggatttttttttctttaaaaggaaagtaccttattcaag

SEQ ID NO: 10570 - DNA, 337 bp, Homo sapiens
taactttaagtagactatctactgctactaggaaacagaagattttgcttaggagacagatttttgtaaaagttggggaaaccataagaggctttgccaatctttttgcctagaaaagtgtaaaatgaaaaccaggattctgtaattattattgaagttgtctgctttctgattaacacattcagaaagagagaggcttgtatctgtcaagcaagtatctttcaagagacacttttcaggcaaagaaaaagtcacaactggcattgaagctgagggtcatagtgattttttttttaaagctttctgattaaaataaaagaacaaccgttccatgagg

SEQ ID NO: 10571 - DNA, 2051 bp, Homo sapiens
  misc_feature (1)..(1): n is a, c, g, or t
ncagcgcctccgcacctggtaggtgctcagttaacgtgggagaaatgaagagtgaaggtgccgcacatcttggatattctccaggacatggtgggcgggtgctatgagttttcctgttctgcagatgaagaggctgcggctcaggaatatgaacaacccggccaaagccacaaaacaaggaagcaccggcagggccgggattcaggtctgggtttgtctgactccagagcccagtgccttgttctccatggctgctgtgtgctacctctttgatgaacatctagatttgtgtccttctctgaggggtccccagatttcagcagttcgaggccagctcagcttttcctttcaccaatggcctagaagaggccaacaaggtagctttgaggctgccccaaagtggagagtggcagtgaaacattggacgccagagtgagggccacagcgcagtggcctatatgggtttagagcgtgaggcctccacgtggacttgaatgcagaccccaggcctgcccgtgttgaccttgggcaagtgacttaacctctctgagcctccattgccccacctgtaaaatgaggggtttatagtacctgcttcataaagttgctatggagatgacacgagaagccataggaccccggtgccatttggaggacccctcgtggggggcacttttcccaggccaggcacccccttcatcccggagcccctcagtggcttggaactcctccgtctcagacccagcttcaacagagtggcccagggctgggtccgtaacctcccagagtccgaggagctgtagccctagcctgaatcttcagttccccagtctcgggggcctggtaacatccggagccaagacttgtggacagcacttcacagttgaagaagggccttcacacacaaaacctgattgcaaatggcttcagaggtcaccaagttcagtcgtcccaaaacatgggtgtgtttcaaaattacctggggatgttgttccaaatccagacaactggactgtcccagacttgcagcatcagagtctcctgagtcgaggaatctgtattattaatagcaaccagggccgggtgtcgtggctcacgcctgtcatcccagcactttgggaggccgaggcaggaggatcacctgaggtcaggagtttgagaccagtctggccaaaatagtggaaccccgtcgctactaaaaatacaaaaatgagtcggacatggtggtgcatgcctgtaatcccagctacttgggaggctgagacaggagaatcacttgaactaggaggcagaggttgcagtgagccgagattgcgccactgcaccccagcctggacaacagagtgagactccttctcaaaagtaaataaataaatagcaaccagtactccaggtgattccagcataacttatccatggtttgtgtcattaggagtccacatccacacctctgctctttcctgttcctgtagtgtacactcccccggtgacagggtgctcactggcaccccatcttcctgtgaataactcaaataattagaaaatgttccttttactgagatgcagttggtcttcatctattcatgctctaaacagttcctaagcgctgactgtgcgctagacactgccaggcccgggcctcgaggaggaaaagacagtagggaagacattatagagcatgaagtcaccataattttccctaaagcatgcttattgacaattgaggaacaaagtgttgtggagcagaagaaggagtccctcaccctaggtgtgagatgggattctggaagcttcctgaaggatttgagtgggaccttgtgggaggcgtgagagtccatgaagggggtgtgagggggagggtatttctggaaagtggaccagcatgtgcaaaaatatgtaactgcagccaccaggtatgaaaaggagcctggtggggagaccactgcacccaaaacaaatcctttcttcttctgagaatgtgactttttctggtgttgtaaaaaagaaaaaaaaaagaatgctcattgtaaaaataaaaaaataataataag

SEQ ID NO: 10572 - DNA, 3290 bp, Homo sapiens
  misc_feature (1)..(1): n is a, c, g, or t
ncagcgcctccgcacctggtaggtgctcagttaacgtgggagaaatgaagagtgaaggtgccgcacatcttggatattctccaggacatggtgggcgggtgctatgagttttcctgttctgcagatgaagaggctgcggctcaggaatatgaacaacccggccaaagccacaaaacaaggaagcaccggcagggccgggattcaggtctgggtttgtctgactccagagcccagtgccttgttctccatggctgctgtgtgctacctctttgatgaacatctagatttgtgtccttctctgaggggtccccagatttcagcagttcgaggccagctcagcttttcctttcaccaatggcctagaagaggccaacaaggtagctttgaggctgccccaaagtggagagtggcagtgaaacattggacgccagagtgagggccacagcgcagtggcctatatgggtttagagcgtgaggcctccacgtggacttgaatgcagaccccaggcctgcccgtgttgaccttgggcaagtgacttaacctctctgagcctccattgccccacctgtaaaatgaggggtttatagtacctgcttcataaagttgctatggagatgacacgagaagccataggaccccggtgccatttggaggacccctcgtggggggcacttttcccaggccaggcacccccttcatcccggagcccctcagtggcttggaactcctccgtctcagacccagcttcaacagagtggcccagggctgggtccgtaacctcccagagtccgaggagctgtagccctagcctgaatcttcagttccccagtctcgggggcctggtaacatccggagccaagacttgtggacagcacttcacagttgaagaagggccttcacacacaaaacctgattgcaaatggcttcagaggtcaccaagttcagtcgtcccaaaacatgggtgtgtttcaaaattacctggggatgttgttccaaatccagacaactggactgtcccagacttgcagcatcagagtctcctgagtcgaggaatctgtattattaatagcaaccagggccgggtgtcgtggctcacgcctgtcatcccagcactttgggaggccgaggcaggaggatcacctgaggtcaggagtttgagaccagtctggccaaaatagtggaaccccgtcgctactaaaaatacaaaaatgagtcggacatggtggtgcatgcctgtaatcccagctacttgggaggctgagacaggagaatcacttgaactaggaggcagaggttgcagtgagccgagattgcgccactgcaccccagcctggacaacagagtgagactccttctcaaaagtaaataaataaatagcaaccagtactccaggtgattccagcataacttatccatggtttgtgtcattaggagtccacatccacacctctgctctttcctgttcctgtagtgtacactcccccggtgacagggtgctcactggcaccccatcttcctgtgaataactcaaataattagaaaatgttccttttactgagatgcagttggtcttcatctattcatgctctaaacagttcctaagcgctgactgtgcgctagacactgccaggcccgggcctcgaggaggaaaagacagtagggaagacattatagagcatgaagtcaccataattttccctaaagcatgcttattgacaattgaggaacaaagtgttgtggagcagaagaaggagtccctcaccctaggtgtgagatgggattctggaagcttcctgaaggatttgagtgggaccttgtgggaggcgtgagagtccatgaagggggtgtgagggggagggtatttctggaaagtggaccagcatgtgcaaaaatatggaactgagcacgggtgcagggtgttctgcagaagggagaaggctgtgctagaggagccagtgagggccagcatggggtgggcttcactaaggaaatggggaaggttttagtgatgggtcttgctgggtgctgtgtggggcgcatattggagaagggtaatgccagaagccaggaagcctgcaagggatgaggccatgggaatggagagaaggggccacccactgggcacctaacaggacaggtgcaaagtggggtgcttattaagattccttctttccactccattttgagcaggctgcttaaagtggtggtgatgatgatgatgatgatggcagctttatatcgagtgcctcagtgcttgggctggtagtagtttctctacatatcttatttctaattctcagaacaaccctgagagaaagatattgttgtccccactttacagatgtggatatttaggccaaaaggaggaagtgacttgtccaggggcagacaccaaatgggaatctgattccagtggatgtctcttttcagtgcactgggtggtcaatgcccactcgctctgaaatcatctgactgtgatgccctgccttggagtttagaagttgagtgcaggcttgggagtcagactggatggggtaggttctaactctgccactgctagccggatgaacttgagcaagtcatttcacatctccgagcctctgtttctccaagtgtaagatgaggacaagtataaaacctcctttatgggtttgttgtgaacacagtgcagggcacatttataataagagctcagtcaatggtaggtttcatgcaactgctgctctaggctggaaaagttgttcttgcactggatgcagcatgagaagctggctgctaagatgtcactgggggtcactaaagctgaagcctgaaggaaagcctctcattgctgtagagctctccctgcctctctctctgggggcgatggggaaggtcaggagtccagcccattcccagggtgtgtgggatagcgattgcattttccttttgctctggagtttcactccccttctgggtcccaagggcccaatggcctgacttttagaattgcttgcaattggtgttttctcttgaatttgggggctgccatttaaagccaggtttccatgagctgaagaccagccattcaagaatctgaaaagtagacaagaggactccagttgcctcaggttggttctgctgtgctctggaaagtaactgcagccaccaggtatgaaaaggagcctggtggggagaccactgcacccaaaacaaatcctttcttcttctgagaatgtgactttttctggtgttgtaaaaaagaaaaaaaaaagaatgctcattgtaaaaataaaaaaataataataag

SEQ ID NO: 10573 - DNA, 3002 bp, Homo sapiens
  misc_feature (1)..(1): n is a, c, g, or t
ncagcgcctccgcacctggtaggtgctcagttaacgtgggagaaatgaagagtgaaggtgccgcacatcttggatattctccaggacatggtgggcgggtgctatgagttttcctgttctgcagatgaagaggctgcggctcaggaatatgaacaacccggccaaagccacaaaacaaggaagcaccggcagggccgggattcaggtctgggtttgtctgactccagagcccagtgccttgttctccatggctgctgtgtgctacctctttgatgaacatctagatttgtgtccttctctgaggggtccccagatttcagcagttcgaggccagctcagcttttcctttcaccaatggcctagaagaggccaacaaggtagctttgaggctgccccaaagtggagagtggcagtgaaacattggacgccagagtgagggccacagcgcagtggcctatatgggtttagagcgtgaggcctccacgtggacttgaatgcagaccccaggcctgcccgtgttgaccttgggcaagtgacttaacctctctgagcctccattgccccacctgtaaaatgaggggtttatagtacctgcttcataaagttgctatggagatgacacgagaagccataggaccccggtgccatttggaggacccctcgtggggggcacttttcccaggccaggcacccccttcatcccggagcccctcagtggcttggaactcctccgtctcagacccagcttcaacagagtggcccagggctgggtccgtaacctcccagagtccgaggagctgtagccctagcctgaatcttcagttccccagtctcgggggcctggtaacatccggagccaagacttgtggacagcacttcacagttgaagaagggccttcacacacaaaacctgattgcaaatggcttcagaggtcaccaagttcagtcgtcccaaaacatgggtgtgtttcaaaattacctggggatgttgttccaaatccagacaactggactgtcccagacttgcagcatcagagtctcctgagtcgaggaatctgtattattaatagcaaccagggccgggtgtcgtggctcacgcctgtcatcccagcactttgggaggccgaggcaggaggatcacctgaggtcaggagtttgagaccagtctggccaaaatagtggaaccccgtcgctactaaaaatacaaaaatgagtcggacatggtggtgcatgcctgtaatcccagctacttgggaggctgagacaggagaatcacttgaactaggaggcagaggttgcagtgagccgagattgcgccactgcaccccagcctggacaacagagtgagactccttctcaaaagtaaataaataaatagcaaccagtactccaggtgattccagcataacttatccatggtttgtgtcattaggagtccacatccacacctctgctctttcctgttcctgtagtgtacactcccccggtgacagggtgctcactggcaccccatcttcctgtgaataactcaaataattagaaaatgttccttttactgagatgcagttggtcttcatctattcatgctctaaacagttcctaagcgctgactgtgcgctagacactgccaggcccgggcctcgaggaggaaaagacagtagggaagacattatagagcatgaagtcaccataattttccctaaagcatgcttattgacaattgaggaacaaagtgttgtggagcagaagaaggagtccctcaccctaggtgtgagatgggattctggaagcttcctgaaggatttgagtgggaccttgtgggaggcgtgagagtccatgaagggggtgtgagggggagggtatttctggaaagtggaccagcatgtgcaaaaatatggaactgagcacgggtgcagggtgttctgcagaagggagaaggctgtgctagaggagccagtgagggccagcatggggtgggcttcactaaggaaatggggaaggttttagtgatgggtcttgctgggtgctgtgtggggcgcatattggagaagggtaatgccagaagccaggaagcctgcaagggatgaggccatgggaatggagagaaggggccacccactgggcacctaacaggacaggtgcaaagtggggtgcttattaagattccttctttccactccattttgagcaggctgcttaaagtggtggtgatgatgatgatgatgatggcagctttatatcgagtgcctcagtgcttgggctggtagtagtttctctacatatcttatttctaattctcagaacaaccctgagagaaagatattgttgtccccactttacagatgtggatatttaggccaaaaggaggaagtgacttgtccaggggcagacaccaaatgggaatctgattccagtggatgtctcttttcagtgcactgggtggtcaatgcccactcgctctgaaatcatctgactgtgatgccctgccttggagtttagaagttgagtgcaggcttgggagtcagactggatggggtaggttctaactctgccactgctagccggatgaacttgagcaagtcatttcacatctccgagcctctgtttctccaagtgtaagatgaggacaagtataaaacctcctttatgggtttgttgtgaacacagtgcagggcacatttataataagagctcagtcaatggtaggtttcatgcaactgctgctctaggctggaaaagttgttcttgcactggatgcagcatgagaagctggctgctaagatgtcactgggggtcactaaagctgaagcctgaaggaaagcctctcattgctgtagagctctccctgcctctctctctgggggcgatggggaaggtcaggagtccagcccattcccagggtgtgtgggatagcgattgcattttccttttgctctggagtttcactccccttctgggtcccaagggcccaatggcctgaccaggcttcagtggggtaccga

SEQ ID NO: 10574 - DNA, 741 bp, Homo sapiens
gcatgacaagaccagttagggattgttggttgcaggatacagtgatcatttagtagatctgatcaatcaaaagagctacaatccaaaagcaactattgggaaaggcctagaagcatctctaggaccattgtttcttagacctatactcatagaattgcctctcttctcagcaaaacctggaaatccaccggaagataaaacagtctgagcaggagctagcctatctggaaaggagagaacgagagggaaagtttaaaggaagaggaaatgatcgcagggaaaagctccagtcttttgactctccagaaaggaaacggattaagtactccagggaaactgacaggaagtgatggtgtctgcttcttttgctgatcgtaaacttgttgataaagaagatatcgacactagcagcaaaggaggctgtgtccaacaggctactggctggaggaaagggacaggcctgggatatggccatcctggattggcttcatcagaggaggctgaaggccggatgaggggccccagtgttggagcctcaggaagaaccagcaaaagacagtccaacgagacttatcgagatgctgttcgaagagtcatgtttgctcgatataaagaactcgattaagaaaggagacaagttccatgggatacaacctccctcttgttttgtttgtctctccttttcttttgttactgttcttgctgctagaacttttttaaataaactttttttcaatgtga

SEQ ID NO: 10575 - DNA, 1194 bp, Homo sapiens
ggacttcccagtctcgtgagtcatacaactctcaggcctgtgctgcaaatgacacttgcttaggagtaaggtgaagggtattttatagctctaatggtttgtacagttcttaaacatgtattgattgctaacaactgctgtctttctcccagcttgccccaccaccagtctttgtgcataagcacaattttggacatagttatttgtacttatttatgcttttacaccttcttccttttataaagattttagctggtttatgacttgagttgaaacaaggaaaaaaagaggagacctgaaatggtctgtcccctgccaaccagaagcctcctgtggtatccaaacagaatagttgcctcagtctgtcagcacttctgtctttgaaggtggtttctgcttgaaaagtggtgactattagcatagcctggggataattgcttttttttcttctctcgggatacctttttttttttttttttccagatactttcttgctcttgtcgactttgtttttccagaagatttagcctgtggttaaaatgtttcgggtccccacgtgaactctctgtgggattacccaattctggggtaccttcaccagatcaccagtgctaaagagggcaaaggatcttcttggttaatagaaaaggctgttttggaatgaatctcaaagtccagaaacatcgagacttttcttcaatacttttttctatttggggtagcaactttacctagtgtaggggagggaggggttagttgggagggcttgtgtttaaggggttcagaaacaggggatttaagtgtgtcttttgtgtttgcaaggcactaacaccactcccgtctgtatttaaatgctgtccccaggttacgactatggctatgtctgcgtggagttttcactcttggaagatgccatcggatgcatggaggccaaccaggttgctttatacttcggtcaaatgatgctggaaggatatatttttttatatatggggagggagggtttcaaatgattttactttggaaaggtacaagaagtctatctgtggagcatactgtattccaaccatcggttgtgaggaaaatctttaaaaaggctggaaagctttctctagaaaacttaatgggcacagagtgcattttaaaagctagagcccagttgcttttggactagattccaaagacaatagttgg

SEQ ID NO: 10576 - DNA, 336 bp, Homo sapiens
aaaattagctgggcgtggtggtgggcacctgtagtcccagctacttgggaggctgaggcaggagaatggtgtgaacccgggaggcggagcttgcagtgagctgagatcacgccaccgcactccagcctgggcgacagagcaagactccgtctcaaaaaaaaaaaaaaaaaaaaaaaagagtcttactgctcattctttcaggagtgtctggaccacccaacctgcttgctgtctaggttggttcctttcactgcaaaatgaggaacagaggatttctcgataggaactgtaggattaagtactcgtcaaatgccacttggtagcagccttaagaat

SEQ ID NO: 10577 - DNA, 4010 bp, Homo sapiens
agtaagagtctgcgggaccggcagctgtacttcatctcccagcgggccgagcgctgaaggcagcggcgcggcgcctttgtggtagcagtggccccgcgcggaggaagttccggtgtccgcggcgctgggtcggtggcggaggctgaggagaaggaggagcgggccgtggaggcttcgccgcctaggtactgctataaccagaatttggtagaaaaaggatttacttgttggggccctcttgataaaaagagatgtggggggattctcgacctgctaacagaactggaccttttcggactgggtgaaagctttttctgcagcagtcatgttgaaaaccttgtgttgactttcctcgtgttctgaaatgggagcataaaagtttactccgccacttcgtcttaaaatagcaaaactttgctgttttctgcagatctaggaccttgttacagaactctgccaaaaaaaaatgtttacagaagaatgtgctgtgattagagaagaatatgctggtgtgtagatttcaaactctctggacaatatgaataacactgtctttgtttctacagtgggagccaagaagaaaggtttgctcccgggtggaacagggattatcctcctcctccccttaagagtcatgctcaagagagacactctggcaactttcctggcagagattcacttccctttgatttccaggggcattcggggcctccttttgcaaatgtagaggagcattctttcagctatggagctagagacggaccgcatggtgactatcgaggaggggagggacctggacatgatttcagggggggagatttttcgtcttctgatttccagagcagagattcatcacagttggacttcaggggtagggacatacattctggggattttcgggatagagaaggaccacctatggactataggggtggagatggtacttctatggattatagaggtagggaggcacctcatatgaactacagagacagggatgctcacgctgttgacttcagaggtagggatgctcctccatctgacttcaggggccggggcacttatgatttagattttagaggccgggatggatcccatgcagattttaggggaagggatttatcagatttggattttagggccagagaacagtcccgttctgattttaggaatagagatgtatctgatttggactttagagacaaagacggaacacaagtagactttagaggccgaggttcaggtactactgatctagactttagggacagggatacgccacattcagatttcagaggtagacaccgatctaggactgatcaggattttaggggcagagagatgggatcttgtatggaatttaaagatagggagatgccccctgtggatccaaatattttggattacattcagccctctacacaagatagagaacattctggtatgaatgtgaacaggagagaagaatccacacatgaccatacgatagaaaggcctgcttttggcattcagaagggagaatttgagcattcagaaacaagagaaggagaaacacaaggtgtagcctttgaacatgagtctccagcagactttcagaacagccaaagtccagttcaagaccaagataagtcacagctttctggacgtgaagagcagagttcagatgctggtctgtttaaagaagaaggcggtctggactttcttgggcggcaagacaccgattacagaagcatggagtaccgtgatgtggatcataggctgccaggaagccagatgtttggctatggccagagcaagtcttttccagagggcaaaactgcccgagatgcccaacgggaccttcaggatcaagattataggaccggcccaagtgaggagaaacccagcaggcttattcgattaagtggggtacctgaagatgccacaaaagaagagattcttaatgcttttcggactcctgatggcatgcctgtaaagaacttgcagttgaaggagtataacacaggttacgactatggctatgtctgcgtggagttttcactcttggaagatgccatcggatgcatggaggccaaccagggaactctaatgatccaggacaaagaagttaccctggagtatgtatcaagcctggatttttggtactgcaaacgatgtaaggcaaacattggtgggcaccgatcttcctgttcattctgcaagaacccaagagaagtgacagaggccaagcaagaattaataacctaccctcagcctcagaaaacatccataccagcaccattggaaaaacagcccaaccagcccctaagaccagctgataaggaacctgaacccaggaagagggaagaaggccaagagtcacgcttaggacatcaaaagagagaagcagaaaggtatctgcctccttctcgaagggaagggccaactttccgaagagaccgagagagggagtcatggtctggagagacacgccaggatggagagagcaaaactatcatgctaaagcgtatctatcgttccacaccacctgaggtgatagtggaagtgctggagccctatgtccgccttactactgccaacgtccgtatcatcaagaacagaacaggccctatggggcatacctatggctttattgacctcgactcccatgcggaagctcttcgtgtggtgaagatcttacagaaccttgatccgccatttagcattgatgggaagatggtagctgtaaacctggccactggaaaacgaagaaatgattctggggaccattctgaccacatgcattactatcagggtaaaaaatatttccgagataggaggggaggtggcagaaattcagactggtcttcagatacaaatcgacaaggacaacagtcatcatctgactgctacatatatgattctgctactggctactattatgaccccttggcaggaacttattatgaccccaatacccagcaagaagtctatgtgccccaggatcctggattacctgaggaagaagagatcaaggaaaaaaaacccaccagtcaaggaaagtcaagtagcaagaaggaaatgtctaaaagagatggcaaggagaaaaaagacagaggagtgacgaggtttcaggaaaatgccagtgaagggaaggcccctgcagaagacgtctttaagaagcccctgcctcctactgtgaagaaggaagagagtccccctccacctaaagtggtaaacccactgatcggcctcttgggtgaatatggaggagacagtgactatgaggaggaagaagaggaggaacagacccctcccccacagccccgcacagcacagccccagaagcgagaggagcaaaccaagaaggagaatgaagaagacaaactcactgactggaataaactggcttgtctgctttgcagaaggcagtttcccaataaagaagttctgatcaaacaccagcagctgtcagacctgcacaagcaaaacctggaaatccaccggaagataaaacagtctgagcaggagctagcctatctggaaaggagagaacgagagggaaagtttaaaggaagaggaaatgatcgcagggaaaagctccagtcttttgactctccagaaaggaaacggattaagtactccagggaaactgacagtgatcgtaaacttgttgataaagaagatatcgacactagcagcaaaggaggctgtgtccaacaggctactggctggaggaaagggacaggcctgggatatggccatcctggattggcttcatcagaggaggctgaaggccggatgaggggccccagtgttggagcctcaggaagaaccagcaaaagacagtccaacgagacttatcgagatgctgttcgaagagtcatgtttgctcgatataaagaactcgattaagaaaggagacaagttccatgggatacaacctccctcttgttttgtttgtctctccttttcttttgttactgttcttgctgctagaacttttttaaataaactttttttcaatgtga

SEQ ID NO: 10578 - DNA, 3875 bp, Homo sapiens
agtaagagtctgcgggaccggcagctgtacttcatctcccagcgggccgagcgctgaaggcagcggcgcggcgcctttgtggtagcagtggccccgcgcggaggaagttccggtgtccgcggcgctgggtcggtggcggaggctgaggagaaggaggagcgggccgtggaggcttcgccgcctaggtactgctataaccagaatttggtagaaaaaggatttacttgttggggccctcttgataaaaagagatgtggggggattctcgacctgctaacagaactggaccttttcgatctaggaccttgttacagaactctgccaaaaaaaaatgtttacagaagaatgtgctgtgattagagaagaatatgctggtgtgtagatttcaaactctctggacaatatgaataacactgtctttgtttctacagtgggagccaagaagaaaggtttgctcccgggtggaacagggattatcctcctcctccccttaagagtcatgctcaagagagacactctggcaactttcctggcagagattcacttccctttgatttccaggggcattcggggcctccttttgcaaatgtagaggagcattctttcagctatggagctagagacggaccgcatggtgactatcgaggaggggagggacctggacatgatttcagggggggagatttttcgtcttctgatttccagagcagagattcatcacagttggacttcaggggtagggacatacattctggggattttcgggatagagaaggaccacctatggactataggggtggagatggtacttctatggattatagaggtagggaggcacctcatatgaactacagagacagggatgctcacgctgttgacttcagaggtagggatgctcctccatctgacttcaggggccggggcacttatgatttagattttagaggccgggatggatcccatgcagattttaggggaagggatttatcagatttggattttagggccagagaacagtcccgttctgattttaggaatagagatgtatctgatttggactttagagacaaagacggaacacaagtagactttagaggccgaggttcaggtactactgatctagactttagggacagggatacgccacattcagatttcagaggtagacaccgatctaggactgatcaggattttaggggcagagagatgggatcttgtatggaatttaaagatagggagatgccccctgtggatccaaatattttggattacattcagccctctacacaagatagagaacattctggtatgaatgtgaacaggagagaagaatccacacatgaccatacgatagaaaggcctgcttttggcattcagaagggagaatttgagcattcagaaacaagagaaggagaaacacaaggtgtagcctttgaacatgagtctccagcagactttcagaacagccaaagtccagttcaagaccaagataagtcacagctttctggacgtgaagagcagagttcagatgctggtctgtttaaagaagaaggcggtctggactttcttgggcggcaagacaccgattacagaagcatggagtaccgtgatgtggatcataggctgccaggaagccagatgtttggctatggccagagcaagtcttttccagagggcaaaactgcccgagatgcccaacgggaccttcaggatcaagattataggaccggcccaagtgaggagaaacccagcaggcttattcgattaagtggggtacctgaagatgccacaaaagaagagattcttaatgcttttcggactcctgatggcatgcctgtaaagaacttgcagttgaaggagtataacacaggttacgactatggctatgtctgcgtggagttttcactcttggaagatgccatcggatgcatggaggccaaccagggaactctaatgatccaggacaaagaagttaccctggagtatgtatcaagcctggatttttggtactgcaaacgatgtaaggcaaacattggtgggcaccgatcttcctgttcattctgcaagaacccaagagaagtgacagaggccaagcaagaattaataacctaccctcagcctcagaaaacatccataccagcaccattggaaaaacagcccaaccagcccctaagaccagctgataaggaacctgaacccaggaagagggaagaaggccaagagtcacgcttaggacatcaaaagagagaagcagaaaggtatctgcctccttctcgaagggaagggccaactttccgaagagaccgagagagggagtcatggtctggagagacacgccaggatggagagagcaaaactatcatgctaaagcgtatctatcgttccacaccacctgaggtgatagtggaagtgctggagccctatgtccgccttactactgccaacgtccgtatcatcaagaacagaacaggccctatggggcatacctatggctttattgacctcgactcccatgcggaagctcttcgtgtggtgaagatcttacagaaccttgatccgccatttagcattgatgggaagatggtagctgtaaacctggccactggaaaacgaagaaatgattctggggaccattctgaccacatgcattactatcagggtaaaaaatatttccgagataggaggggaggtggcagaaattcagactggtcttcagatacaaatcgacaaggacaacagtcatcatctgactgctacatatatgattctgctactggctactattatgaccccttggcaggaacttattatgaccccaatacccagcaagaagtctatgtgccccaggatcctggattacctgaggaagaagagatcaaggaaaaaaaacccaccagtcaaggaaagtcaagtagcaagaaggaaatgtctaaaagagatggcaaggagaaaaaagacagaggagtgacgaggtttcaggaaaatgccagtgaagggaaggcccctgcagaagacgtctttaagaagcccctgcctcctactgtgaagaaggaagagagtccccctccacctaaagtggtaaacccactgatcggcctcttgggtgaatatggaggagacagtgactatgaggaggaagaagaggaggaacagacccctcccccacagccccgcacagcacagccccagaagcgagaggagcaaaccaagaaggagaatgaagaagacaaactcactgactggaataaactggcttgtctgctttgcagaaggcagtttcccaataaagaagttctgatcaaacaccagcagctgtcagacctgcacaagcaaaacctggaaatccaccggaagataaaacagtctgagcaggagctagcctatctggaaaggagagaacgagagggaaagtttaaaggaagaggaaatgatcgcagggaaaagctccagtcttttgactctccagaaaggaaacggattaagtactccagggaaactgacagtgatcgtaaacttgttgataaagaagatatcgacactagcagcaaaggaggctgtgtccaacaggctactggctggaggaaagggacaggcctgggatatggccatcctggattggcttcatcagaggaggctgaaggccggatgaggggccccagtgttggagcctcaggaagaaccagcaaaagacagtccaacgagacttatcgagatgctgttcgaagagtcatgtttgctcgatataaagaactcgattaagaaaggagacaagttccatgggatacaacctccctcttgttttgtttgtctctccttttcttttgttactgttcttgctgctagaacttttttaaataaactttttttcaatgtga

SEQ ID NO: 10579 - DNA, 3774 bp, Homo sapiens
agtaagagtctgcgggaccggcagctgtacttcatctcccagcgggccgagcgctgaaggcagcggcgcggcgcctttgtggtagcagtggccccgcgcggaggaagttccggtgtccgcggcgctgggtcggtggcggaggctgaggagaaggaggagcgggccgtggaggcttcgccgcctaggtactgctataaccagaatttggtagaaaaaggatttacttgttggggccctcttgataaaaagagatgtggggggattctcgacctgctaacagaactggaccttttcgtgggagccaagaagaaaggtttgctcccgggtggaacagggattatcctcctcctccccttaagagtcatgctcaagagagacactctggcaactttcctggcagagattcacttccctttgatttccaggggcattcggggcctccttttgcaaatgtagaggagcattctttcagctatggagctagagacggaccgcatggtgactatcgaggaggggagggacctggacatgatttcagggggggagatttttcgtcttctgatttccagagcagagattcatcacagttggacttcaggggtagggacatacattctggggattttcgggatagagaaggaccacctatggactataggggtggagatggtacttctatggattatagaggtagggaggcacctcatatgaactacagagacagggatgctcacgctgttgacttcagaggtagggatgctcctccatctgacttcaggggccggggcacttatgatttagattttagaggccgggatggatcccatgcagattttaggggaagggatttatcagatttggattttagggccagagaacagtcccgttctgattttaggaatagagatgtatctgatttggactttagagacaaagacggaacacaagtagactttagaggccgaggttcaggtactactgatctagactttagggacagggatacgccacattcagatttcagaggtagacaccgatctaggactgatcaggattttaggggcagagagatgggatcttgtatggaatttaaagatagggagatgccccctgtggatccaaatattttggattacattcagccctctacacaagatagagaacattctggtatgaatgtgaacaggagagaagaatccacacatgaccatacgatagaaaggcctgcttttggcattcagaagggagaatttgagcattcagaaacaagagaaggagaaacacaaggtgtagcctttgaacatgagtctccagcagactttcagaacagccaaagtccagttcaagaccaagataagtcacagctttctggacgtgaagagcagagttcagatgctggtctgtttaaagaagaaggcggtctggactttcttgggcggcaagacaccgattacagaagcatggagtaccgtgatgtggatcataggctgccaggaagccagatgtttggctatggccagagcaagtcttttccagagggcaaaactgcccgagatgcccaacgggaccttcaggatcaagattataggaccggcccaagtgaggagaaacccagcaggcttattcgattaagtggggtacctgaagatgccacaaaagaagagattcttaatgcttttcggactcctgatggcatgcctgtaaagaacttgcagttgaaggagtataacacaggttacgactatggctatgtctgcgtggagttttcactcttggaagatgccatcggatgcatggaggccaaccagggaactctaatgatccaggacaaagaagttaccctggagtatgtatcaagcctggatttttggtactgcaaacgatgtaaggcaaacattggtgggcaccgatcttcctgttcattctgcaagaacccaagagaagtgacagaggccaagcaagaattaataacctaccctcagcctcagaaaacatccataccagcaccattggaaaaacagcccaaccagcccctaagaccagctgataaggaacctgaacccaggaagagggaagaaggccaagagtcacgcttaggacatcaaaagagagaagcagaaaggtatctgcctccttctcgaagggaagggccaactttccgaagagaccgagagagggagtcatggtctggagagacacgccaggatggagagagcaaaactatcatgctaaagcgtatctatcgttccacaccacctgaggtgatagtggaagtgctggagccctatgtccgccttactactgccaacgtccgtatcatcaagaacagaacaggccctatggggcatacctatggctttattgacctcgactcccatgcggaagctcttcgtgtggtgaagatcttacagaaccttgatccgccatttagcattgatgggaagatggtagctgtaaacctggccactggaaaacgaaggagtgtctggaccacccaacctgcttgctgtctagaaatgattctggggaccattctgaccacatgcattactatcagggtaaaaaatatttccgagataggaggggaggtggcagaaattcagactggtcttcagatacaaatcgacaaggacaacagtcatcatctgactgctacatatatgattctgctactggctactattatgaccccttggcaggaacttattatgaccccaatacccagcaagaagtctatgtgccccaggatcctggattacctgaggaagaagagatcaaggaaaaaaaacccaccagtcaaggaaagtcaagtagcaagaaggaaatgtctaaaagagatggcaaggagaaaaaagacagaggagtgacgaggtttcaggaaaatgccagtgaagggaaggcccctgcagaagacgtctttaagaagcccctgcctcctactgtgaagaaggaagagagtccccctccacctaaagtggtaaacccactgatcggcctcttgggtgaatatggaggagacagtgactatgaggaggaagaagaggaggaacagacccctcccccacagccccgcacagcacagccccagaagcgagaggagcaaaccaagaaggagaatgaagaagacaaactcactgactggaataaactggcttgtctgctttgcagaaggcagtttcccaataaagaagttctgatcaaacaccagcagctgtcagacctgcacaagcaaaacctggaaatccaccggaagataaaacagtctgagcaggagctagcctatctggaaaggagagaacgagagggaaagtttaaaggaagaggaaatgatcgcagggaaaagctccagtcttttgactctccagaaaggaaacggattaagtactccagggaaactgacagtgatcgtaaacttgttgataaagaagatatcgacactagcagcaaaggaggctgtgtccaacaggctactggctggaggaaagggacaggcctgggatatggccatcctggattggcttcatcagaggaggctgaaggccggatgaggggccccagtgttggagcctcaggaagaaccagcaaaagacagtccaacgagacttatcgagatgctgttcgaagagtcatgtttgctcgatataaagaactcgattaagaaaggagacaagttccatgggatacaacctccctcttgttttgtttgtctctccttttcttttgttactgttcttgctgctagaacttttttaaataaactttttttcaatgtga

SEQ ID NO: 10580 - DNA, 3906 bp, Homo sapiens
agtaagagtctgcgggaccggcagctgtacttcatctcccagcgggccgagcgctgaaggcagcggcgcggcgcctttgtggtagcagtggccccgcgcggaggaagttccggtgtccgcggcgctgggtcggtggcggaggctgaggagaaggaggagcgggccgtggaggcttcgccgcctaggtactgctataaccagaatttggtagaaaaaggatttacttgttggggccctcttgataaaaagagatgtggggggattctcgacctgctaacagaactggaccttttcgtgggagccaagaagaaaggtttgctcccgggtggaacagggattatcctcctcctccccttaagagtcatgctcaagagagacactctggcaactttcctggcagagattcacttccctttgatttccaggggcattcggggcctccttttgcaaatgtagaggagcattctttcagctatggagctagagacggaccgcatggtgactatcgaggaggggagggacctggacatgatttcagggggggagatttttcgtcttctgatttccagagcagagattcatcacagttggacttcaggggtagggacatacattctggggattttcgggatagagaaggaccacctatggactataggggtggagatggtacttctatggattatagaggtagggaggcacctcatatgaactacagagacagggatgctcacgctgttgacttcagaggtagggatgctcctccatctgacttcaggggccggggcacttatgatttagattttagaggccgggatggatcccatgcagattttaggggaagggatttatcagatttggattttagggccagagaacagtcccgttctgattttaggaatagagatgtatctgatttggactttagagacaaagacggaacacaagtagactttagaggccgaggttcaggtactactgatctagactttagggacagggatacgccacattcagatttcagaggtagacaccgatctaggactgatcaggattttaggggcagagagatgggatcttgtatggaatttaaagatagggagatgccccctgtggatccaaatattttggattacattcagccctctacacaagatagagaacattctggtatgaatgtgaacaggagagaagaatccacacatgaccatacgatagaaaggcctgcttttggcattcagaagggagaatttgagcattcagaaacaagagaaggagaaacacaaggtgtagcctttgaacatgagtctccagcagactttcagaacagccaaagtccagttcaagaccaagataagtcacagctttctggacgtgaagagcagagttcagatgctggtctgtttaaagaagaaggcggtctggactttcttgggcggcaagacaccgattacagaagcatggagtaccgtgatgtggatcataggctgccaggaagccagatgtttggctatggccagagcaagtcttttccagagggcaaaactgcccgagatgcccaacgggaccttcaggatcaagattataggaccggcccaagtgaggagaaacccagcaggcttattcgattaagtggggtacctgaagatgccacaaaagaagagattcttaatgcttttcggactcctgatggcatgcctgtaaagaacttgcagttgaaggagtataacacaggttacgactatggctatgtctgcgtggagttttcactcttggaagatgccatcggatgcatggaggccaaccagagaggtaaagcattatttgacagatgtatggattcaagcaagaaactgaggtccaattgcaaagaaatggcttgtataactcagagccctgtctgaggaaacacagaggaccctagagggcggagaatgaacacagcgcaggggctagttccagagtcgcattctcgggaactctaatgatccaggacaaagaagttaccctggagtatgtatcaagcctggatttttggtactgcaaacgatgtaaggcaaacattggtgggcaccgatcttcctgttcattctgcaagaacccaagagaagtgacagaggccaagcaagaattaataacctaccctcagcctcagaaaacatccataccagcaccattggaaaaacagcccaaccagcccctaagaccagctgataaggaacctgaacccaggaagagggaagaaggccaagagtcacgcttaggacatcaaaagagagaagcagaaaggtatctgcctccttctcgaagggaagggccaactttccgaagagaccgagagagggagtcatggtctggagagacacgccaggatggagagagcaaaactatcatgctaaagcgtatctatcgttccacaccacctgaggtgatagtggaagtgctggagccctatgtccgccttactactgccaacgtccgtatcatcaagaacagaacaggccctatggggcatacctatggctttattgacctcgactcccatgcggaagctcttcgtgtggtgaagatcttacagaaccttgatccgccatttagcattgatgggaagatggtagctgtaaacctggccactggaaaacgaagaaatgattctggggaccattctgaccacatgcattactatcagggtaaaaaatatttccgagataggaggggaggtggcagaaattcagactggtcttcagatacaaatcgacaaggacaacagtcatcatctgactgctacatatatgattctgctactggctactattatgaccccttggcaggaacttattatgaccccaatacccagcaagaagtctatgtgccccaggatcctggattacctgaggaagaagagatcaaggaaaaaaaacccaccagtcaaggaaagtcaagtagcaagaaggaaatgtctaaaagagatggcaaggagaaaaaagacagaggagtgacgaggtttcaggaaaatgccagtgaagggaaggcccctgcagaagacgtctttaagaagcccctgcctcctactgtgaagaaggaagagagtccccctccacctaaagtggtaaacccactgatcggcctcttgggtgaatatggaggagacagtgactatgaggaggaagaagaggaggaacagacccctcccccacagccccgcacagcacagccccagaagcgagaggagcaaaccaagaaggagaatgaagaagacaaactcactgactggaataaactggcttgtctgctttgcagaaggcagtttcccaataaagaagttctgatcaaacaccagcagctgtcagacctgcacaagcaaaacctggaaatccaccggaagataaaacagtctgagcaggagctagcctatctggaaaggagagaacgagagggaaagtttaaaggaagaggaaatgatcgcagggaaaagctccagtcttttgactctccagaaaggaaacggattaagtactccagggaaactgacagtgatcgtaaacttgttgataaagaagatatcgacactagcagcaaaggaggctgtgtccaacaggctactggctggaggaaagggacaggcctgggatatggccatcctggattggcttcatcagaggaggctgaaggccggatgaggggccccagtgttggagcctcaggaagaaccagcaaaagacagtccaacgagacttatcgagatgctgttcgaagagtcatgtttgctcgatataaagaactcgattaagaaaggagacaagttccatgggatacaacctccctcttgttttgtttgtctctccttttcttttgttactgttcttgctgctagaacttttttaaataaactttttttcaatgtga

SEQ ID NO: 10581 - DNA, 4137 bp, Homo sapiens
agtaagagtctgcgggaccggcagctgtacttcatctcccagcgggccgagcgctgaaggcagcggcgcggcgcctttgtggtagcagtggccccgcgcggaggaagttccggtgtccgcggcgctgggtcggtggcggaggctgaggagaaggaggagcgggccgtggaggcttcgccgcctaggtactgctataaccagaatttggtagaaaaaggatttacttgttggggccctcttgataaaaagagatgtggggggattctcgacctgctaacagaactggaccttttcgtgggagccaagaagaaaggtttgctcccgggtggaacagggattatcctcctcctccccttaagagtcatgctcaagagagacactctggcaactttcctggcagagattcacttccctttgatttccaggggcattcggggcctccttttgcaaatgtagaggagcattctttcagctatggagctagagacggaccgcatggtgactatcgaggaggggagggacctggacatgatttcagggggggagatttttcgtcttctgatttccagagcagagattcatcacagttggacttcaggggtagggacatacattctggggattttcgggatagagaaggaccacctatggactataggggtggagatggtacttctatggattatagaggtagggaggcacctcatatgaactacagagacagggatgctcacgctgttgacttcagaggtagggatgctcctccatctgacttcaggggccggggcacttatgatttagattttagaggccgggatggatcccatgcagattttaggggaagggatttatcagatttggattttagggccagagaacagtcccgttctgattttaggaatagagatgtatctgatttggactttagagacaaagacggaacacaagtagactttagaggccgaggttcaggtactactgatctagactttagggacagggatacgccacattcagatttcagaggtagacaccgatctaggactgatcaggattttaggggcagagagatgggatcttgtatggaatttaaagatagggagatgccccctgtggatccaaatattttggattacattcagccctctacacaagatagagaacattctggtatgaatgtgaacaggagagaagaatccacacatgaccatacgatagaaaggcctgcttttggcattcagaagggagaatttgagcattcagaaacaagagaaggagaaacacaaggtgtagcctttgaacatgagtctccagcagactttcagaacagccaaagtccagttcaagaccaagataagtcacagctttctggacgtgaagagcagagttcagatgctggtctgtttaaagaagaaggcggtctggactttcttgggcggcaagacaccgattacagaagcatggagtaccgtgatgtggatcataggctgccaggaagccagatgtttggctatggccagagcaagtcttttccagagggcaaaactgcccgagatgcccaacgggaccttcaggatcaagattataggaccggcccaagtgaggagaaacccagcaggcttattcgattaagtggggtacctgaagatgccacaaaagaagagattcttaatgcttttcggactcctgatggcatgcctgtaaagaacttgcagttgaaggagtataacacaggttacgactatggctatgtctgcgtggagttttcactcttggaagatgccatcggatgcatggaggccaaccagggaactctaatgatccaggacaaagaagttaccctggagtatgtatcaagcctggatttttggtactgcaaacgatgtaaggcaaacattggtgggcaccgatcttcctgttcattctgcaagaacccaagagaagtgacagaggccaagcaagaattaataacctaccctcagcctcagaaaacatccataccagcaccattggaaaaacagcccaaccagcccctaagaccagctgataaggaacctgaacccaggaagagggaagaaggccaagagtcacgcttaggacatcaaaagagagaagcagaaaggtatctgcctccttctcgaagggaagggccaactttccgaagagaccgagagagggagtcatggtctggagagacacgccaggatggagagagcaaaagtaagtagtttgtcagggcacataccagactgtgatcatcacaatggagcatagatggccaatgttatgtccgggagctatctgctttccagtaccctgagagatctgtgcatgacctgatgacagaggccattgctgtctgtggaccttcctgtactgcttaaaggaatctatgcccttcaaatagtaaattgctatatgaatgcagtaaggcatgattttagatttctaagtattggtgaagaaaagtatgcagtatttatttgtttagcatttttttacagaaccagccttgctagtagcatctatagtaaaaaatgacagtcagattcttgggacttcaaaaatttatctttctctcccttgtgttgcccttctcccatttatggttgattcagctatcatgctaaagcgtatctatcgttccacaccacctgaggtgatagtggaagtgctggagccctatgtccgccttactactgccaacgtccgtatcatcaagaacagaacaggccctatggggcatacctatggctttattgacctcgactcccatgcggaagctcttcgtgtggtgaagatcttacagaaccttgatccgccatttagcattgatgggaagatggtagctgtaaacctggccactggaaaacgaagaaatgattctggggaccattctgaccacatgcattactatcagggtaaaaaatatttccgagataggaggggaggtggcagaaattcagactggtcttcagatacaaatcgacaaggacaacagtcatcatctgactgctacatatatgattctgctactggctactattatgaccccttggcaggaacttattatgaccccaatacccagcaagaagtctatgtgccccaggatcctggattacctgaggaagaagagatcaaggaaaaaaaacccaccagtcaaggaaagtcaagtagcaagaaggaaatgtctaaaagagatggcaaggagaaaaaagacagaggagtgacgaggtttcaggaaaatgccagtgaagggaaggcccctgcagaagacgtctttaagaagcccctgcctcctactgtgaagaaggaagagagtccccctccacctaaagtggtaaacccactgatcggcctcttgggtgaatatggaggagacagtgactatgaggaggaagaagaggaggaacagacccctcccccacagccccgcacagcacagccccagaagcgagaggagcaaaccaagaaggagaatgaagaagacaaactcactgactggaataaactggcttgtctgctttgcagaaggcagtttcccaataaagaagttctgatcaaacaccagcagctgtcagacctgcacaagcaaaacctggaaatccaccggaagataaaacagtctgagcaggagctagcctatctggaaaggagagaacgagagggaaagtttaaaggaagaggaaatgatcgcagggaaaagctccagtcttttgactctccagaaaggaaacggattaagtactccagggaaactgacagtgatcgtaaacttgttgataaagaagatatcgacactagcagcaaaggaggctgtgtccaacaggctactggctggaggaaagggacaggcctgggatatggccatcctggattggcttcatcagaggaggctgaaggccggatgaggggccccagtgttggagcctcaggaagaaccagcaaaagacagtccaacgagacttatcgagatgctgttcgaagagtcatgtttgctcgatataaagaactcgattaagaaaggagacaagttccatgggatacaacctccctcttgttttgtttgtctctccttttcttttgttactgttcttgctgctagaacttttttaaataaactttttttcaatgtga

SEQ ID NO: 10582 - DNA, 2226 bp, Homo sapiens
agtaagagtctgcgggaccggcagctgtacttcatctcccagcgggccgagcgctgaaggcagcggcgcggcgcctttgtggtagcagtggccccgcgcggaggaagttccggtgtccgcggcgctgggtcggtggcggaggctgaggagaaggaggagcgggccgtggaggcttcgccgcctaggtactgctataaccagaatttggtagaaaaaggatttacttgttggggccctcttgataaaaagagatgtggggggattctcgacctgctaacagaactggaccttttcgggaactctaatgatccaggacaaagaagttaccctggagtatgtatcaagcctggatttttggtactgcaaacgatgtaaggcaaacattggtgggcaccgatcttcctgttcattctgcaagaacccaagagaagtgacagaggccaagcaagaattaataacctaccctcagcctcagaaaacatccataccagcaccattggaaaaacagcccaaccagcccctaagaccagctgataaggaacctgaacccaggaagagggaagaaggccaagagtcacgcttaggacatcaaaagagagaagcagaaaggtatctgcctccttctcgaagggaagggccaactttccgaagagaccgagagagggagtcatggtctggagagacacgccaggatggagagagcaaaactatcatgctaaagcgtatctatcgttccacaccacctgaggtgatagtggaagtgctggagccctatgtccgccttactactgccaacgtccgtatcatcaagaacagaacaggccctatggggcatacctatggctttattgacctcgactcccatgcggaagctcttcgtgtggtgaagatcttacagaaccttgatccgccatttagcattgatgggaagatggtagctgtaaacctggccactggaaaacgaagaaatgattctggggaccattctgaccacatgcattactatcagggtaaaaaatatttccgagataggaggggaggtggcagaaattcagactggtcttcagatacaaatcgacaaggacaacagtcatcatctgactgctacatatatgattctgctactggctactattatgaccccttggcaggaacttattatgaccccaatacccagcaagaagtctatgtgccccaggatcctggattacctgaggaagaagagatcaaggaaaaaaaacccaccagtcaaggaaagtcaagtagcaagaaggaaatgtctaaaagagatggcaaggagaaaaaagacagaggagtgacgaggtttcaggaaaatgccagtgaagggaaggcccctgcagaagacgtctttaagaagcccctgcctcctactgtgaagaaggaagagagtccccctccacctaaagtggtaaacccactgatcggcctcttgggtgaatatggaggagacagtgactatgaggaggaagaagaggaggaacagacccctcccccacagccccgcacagcacagccccagaagcgagaggagcaaaccaagaaggagaatgaagaagacaaactcactgactggaataaactggcttgtctgctttgcagaaggcagtttcccaataaagaagttctgatcaaacaccagcagctgtcagacctgcacaagcaaaacctggaaatccaccggaagataaaacagtctgagcaggagctagcctatctggaaaggagagaacgagagggaaagtttaaaggaagaggaaatgatcgcagggaaaagctccagtcttttgactctccagaaaggaaacggattaagtactccagggaaactgacagtgatcgtaaacttgttgataaagaagatatcgacactagcagcaaaggaggctgtgtccaacaggctactggctggaggaaagggacaggcctgggatatggccatcctggattggcttcatcagaggaggctgaaggccggatgaggggccccagtgttggagcctcaggaagaaccagcaaaagacagtccaacgagacttatcgagatgctgttcgaagagtcatgtttgctcgatataaagaactcgattaagaaaggagacaagttccatgggatacaacctccctcttgttttgtttgtctctccttttcttttgttactgttcttgctgctagaacttttttaaataaactttttttcaatgtga

SEQ ID NO: 10583 - DNA, 2386 bp, Homo sapiens
agtaagagtctgcgggaccggcagctgtacttcatctcccagcgggccgagcgctgaaggcagcggcgcggcgcctttgtggtagcagtggccccgcgcggaggaagttccggtgtccgcggcgctgggtcggtggcggaggctgaggagaaggaggagcgggccgtggaggcttcgccgcctaggtactgctataaccagaatttggtagaaaaaggatttacttgttggggccctcttgataaaaagagatgtggggggattctcgacctgctaacagaactggaccttttcggatcaagattataggaccggcccaagtgaggagaaacccagcaggcttattcgattaagtggggtacctgaagatgccacaaaagaagagattcttaatgcttttcggactcctgatggcatgcctgtaaagaacttgcagttgaaggagtataacacagggaactctaatgatccaggacaaagaagttaccctggagtatgtatcaagcctggatttttggtactgcaaacgatgtaaggcaaacattggtgggcaccgatcttcctgttcattctgcaagaacccaagagaagtgacagaggccaagcaagaattaataacctaccctcagcctcagaaaacatccataccagcaccattggaaaaacagcccaaccagcccctaagaccagctgataaggaacctgaacccaggaagagggaagaaggccaagagtcacgcttaggacatcaaaagagagaagcagaaaggtatctgcctccttctcgaagggaagggccaactttccgaagagaccgagagagggagtcatggtctggagagacacgccaggatggagagagcaaaactatcatgctaaagcgtatctatcgttccacaccacctgaggtgatagtggaagtgctggagccctatgtccgccttactactgccaacgtccgtatcatcaagaacagaacaggccctatggggcatacctatggctttattgacctcgactcccatgcggaagctcttcgtgtggtgaagatcttacagaaccttgatccgccatttagcattgatgggaagatggtagctgtaaacctggccactggaaaacgaagaaatgattctggggaccattctgaccacatgcattactatcagggtaaaaaatatttccgagataggaggggaggtggcagaaattcagactggtcttcagatacaaatcgacaaggacaacagtcatcatctgactgctacatatatgattctgctactggctactattatgaccccttggcaggaacttattatgaccccaatacccagcaagaagtctatgtgccccaggatcctggattacctgaggaagaagagatcaaggaaaaaaaacccaccagtcaaggaaagtcaagtagcaagaaggaaatgtctaaaagagatggcaaggagaaaaaagacagaggagtgacgaggtttcaggaaaatgccagtgaagggaaggcccctgcagaagacgtctttaagaagcccctgcctcctactgtgaagaaggaagagagtccccctccacctaaagtggtaaacccactgatcggcctcttgggtgaatatggaggagacagtgactatgaggaggaagaagaggaggaacagacccctcccccacagccccgcacagcacagccccagaagcgagaggagcaaaccaagaaggagaatgaagaagacaaactcactgactggaataaactggcttgtctgctttgcagaaggcagtttcccaataaagaagttctgatcaaacaccagcagctgtcagacctgcacaagcaaaacctggaaatccaccggaagataaaacagtctgagcaggagctagcctatctggaaaggagagaacgagagggaaagtttaaaggaagaggaaatgatcgcagggaaaagctccagtcttttgactctccagaaaggaaacggattaagtactccagggaaactgacagtgatcgtaaacttgttgataaagaagatatcgacactagcagcaaaggaggctgtgtccaacaggctactggctggaggaaagggacaggcctgggatatggccatcctggattggcttcatcagaggaggctgaaggccggatgaggggccccagtgttggagcctcaggaagaaccagcaaaagacagtccaacgagacttatcgagatgctgttcgaagagtcatgtttgctcgatataaagaactcgattaagaaaggagacaagttccatgggatacaacctccctcttgttttgtttgtctctccttttcttttgttactgttcttgctgctagaacttttttaaataaactttttttcaatgtga

SEQ ID NO: 10584 - DNA, 1782 bp, Homo sapiens
gcaacacgggaaaagctatgaccgggaggcgcgatccgcccgggagaccagctgataaggaacctgaacccaggaagagggaagaaggccaagagtcacgcttaggacatcaaaagagagaagcagaaaggtatctgcctccttctcgaagggaagggccaactttccgaagagaccgagagagggagtcatggtctggagagacacgccaggatggagagagcaaaactatcatgctaaagcgtatctatcgttccacaccacctgaggtgatagtggaagtgctggagccctatgtccgccttactactgccaacgtccgtatcatcaagaacagaacaggccctatggggcatacctatggctttattgacctcgactcccatgcggaagctcttcgtgtggtgaagatcttacagaaccttgatccgccatttagcattgatgggaagatggtagctgtaaacctggccactggaaaacgaaggagtgtctggaccacccaacctgcttgctgtctagaaatgattctggggaccattctgaccacatgcattactatcagggtaaaaaatatttccgagataggaggggaggtggcagaaattcagactggtcttcagatacaaatcgacaaggacaacagtcatcatctgactgctacatatatgattctgctactggctactattatgaccccttggcaggaacttattatgaccccaatacccagcaagaagtctatgtgccccaggatcctggattacctgaggaagaagagatcaaggaaaaaaaacccaccagtcaaggaaagtcaagtagcaagaaggaaatgtctaaaagagatggcaaggagaaaaaagacagaggagtgacgaggtttcaggaaaatgccagtgaagggaaggcccctgcagaagacgtctttaagaagcccctgcctcctactgtgaagaaggaagagagtccccctccacctaaagtggtaaacccactgatcggcctcttgggtgaatatggaggagacagtgactatgaggaggaagaagaggaggaacagacccctcccccacagccccgcacagcacagccccagaagcgagaggagcaaaccaagaaggagaatgaagaagacaaactcactgactggaataaactggcttgtctgctttgcagaaggcagtttcccaataaagaagttctgatcaaacaccagcagctgtcagacctgcacaagcaaaacctggaaatccaccggaagataaaacagtctgagcaggagctagcctatctggaaaggagagaacgagagggaaagtttaaaggaagaggaaatgatcgcagggaaaagctccagtcttttgactctccagaaaggaaacggattaagtactccagggaaactgacagtgatcgtaaacttgttgataaagaagatatcgacactagcagcaaaggaggctgtgtccaacaggctactggctggaggaaagggacaggcctgggatatggccatcctggattggcttcatcagaggaggctgaaggccggatgaggggccccagtgttggagcctcaggaagaaccagcaaaagacagtccaacgagacttatcgagatgctgttcgaagagtcatgtttgctcgatataaagaactcgattaagaaaggagacaagttccatgggatacaacctccctcttgttttgtttgtctctccttttcttttgttactgttcttgctgctagaacttttttaaataaactttttttcaatgtga

SEQ ID NO: 10585 - DNA, 1241 bp, Homo sapiens
tatctagagatcccctgctgctccctcttcactgggggaagctggtgcggctacggcttgtggcctccaacaaggagttgtcggggacgcggggagtctcatagagtaggacgttgagtgtctcctcatagattcgggcctctgggaaactgaaacattctgtagacttacttgtttccaactgtatcgcagcaagaagtctatgtgccccaggatcctggattacctgaggaagaagagatcaaggaaaaaaaacccaccagtcaaggaaagtcaagtagcaagaaggaaatgtctaaaagagatggcaaggagaaaaaagacagaggagtgacgaggtttcaggaaaatgccagtgaagggaaggcccctgcagaagacgtctttaagaagcccctgcctcctactgtgaagaaggaagagagtccccctccacctaaagtggtaaacccactgatcggcctcttgggtgaatatggaggagacagtgactatgaggaggaagaagaggaggaacagacccctcccccacagccccgcacagcacagccccagaagcgagaggagcaaaccaagaaggagaatgaagaagacaaactcactgactggaataaactggcttgtctgctttgcagaaggcagtttcccaataaagaagttctgatcaaacaccagcagctgtcagacctgcacaagcaaaacctggaaatccaccggaagataaaacagtctgagcaggagctagcctatctggaaaggagagaacgagagggaaagtttaaaggaagaggaaatgatcgcagggaaaagctccagtcttttgactctccagaaaggaaacggattaagtactccagggaaactgacagtgatcgtaaacttgttgataaagaagatatcgacactagcagcaaaggaggctgtgtccaacaggctactggctggaggaaagggacaggcctgggatatggccatcctggattggcttcatcagaggaggctgaaggccggatgaggggccccagtgttggagcctcaggaagaaccagcaaaagacagtccaacgagacttatcgagatgctgttcgaagagtcatgtttgctcgatataaagaactcgattaagaaaggagacaagttccatgggatacaacctccctcttgttttgtttgtctctccttttcttttgttactgttcttgctgctagaacttttttaaataaactttttttcaatgtga

SEQ ID NO: 10586 - DNA, 3676 bp, Homo sapiens
agtaagagtctgcgggaccggcagctgtacttcatctcccagcgggccgagcgctgaaggcagcggcgcggcgcctttgtggtagcagtggccccgcgcggaggaagttccggtgtccgcggcgctgggtcggtggcggaggctgaggagaaggaggagcgggccgtggaggcttcgccgcctaggtactgctataaccagaatttggtagaaaaaggatttacttgttggggccctcttgataaaaagagatgtggggggattctcgacctgctaacagaactggaccttttcgtgggagccaagaagaaaggtttgctcccgggtggaacagggattatcctcctcctccccttaagagtcatgctcaagagagacactctggcaactttcctggcagagattcacttccctttgatttccaggggcattcggggcctccttttgcaaatgtagaggagcattctttcagctatggagctagagacggaccgcatggtgactatcgaggaggggagggacctggacatgatttcagggggggagatttttcgtcttctgatttccagagcagagattcatcacagttggacttcaggggtagggacatacattctggggattttcgggatagagaaggaccacctatggactataggggtggagatggtacttctatggattatagaggtagggaggcacctcatatgaactacagagacagggatgctcacgctgttgacttcagaggtagggatgctcctccatctgacttcaggggccggggcacttatgatttagattttagaggccgggatggatcccatgcagattttaggggaagggatttatcagatttggattttagggccagagaacagtcccgttctgattttaggaatagagatgtatctgatttggactttagagacaaagacggaacacaagtagactttagaggccgaggttcaggtactactgatctagactttagggacagggatacgccacattcagatttcagaggtagacaccgatctaggactgatcaggattttaggggcagagagatgggatcttgtatggaatttaaagatagggagatgccccctgtggatccaaatattttggattacattcagccctctacacaagatagagaacattctggtatgaatgtgaacaggagagaagaatccacacatgaccatacgatagaaaggcctgcttttggcattcagaagggagaatttgagcattcagaaacaagagaaggagaaacacaaggtgtagcctttgaacatgagtctccagcagactttcagaacagccaaagtccagttcaagaccaagataagtcacagctttctggacgtgaagagcagagttcagatgctggtctgtttaaagaagaaggcggtctggactttcttgggcggcaagacaccgattacagaagcatggagtaccgtgatgtggatcataggctgccaggaagccagatgtttggctatggccagagcaagtcttttccagagggcaaaactgcccgagatgcccaacgggaccttcaggatcaagattataggaccggcccaagtgaggagaaacccagcaggcttattcgattaagtggggtacctgaagatgccacaaaagaagagattcttaatgcttttcggactcctgatggcatgcctgtaaagaacttgcagttgaaggagtataacacaggttacgactatggctatgtctgcgtggagttttcactcttggaagatgccatcggatgcatggaggccaaccagggaactctaatgatccaggacaaagaagttaccctggagtatgtatcaagcctggatttttggtactgcaaacgatgtaaggcaaacattggtgggcaccgatcttcctgttcattctgcaagaacccaagagaagtgacagaggccaagcaagaattaataacctaccctcagcctcagaaaacatccataccagcaccattggaaaaacagcccaaccagcccctaagaccagctgataaggaacctgaacccaggaagagggaagaaggccaagagtcacgcttaggacatcaaaagagagaagcagaaaggtatctgcctccttctcgaagggaagggccaactttccgaagagaccgagagagggagtcatggtctggagagacacgccaggatggagagagcaaaactatcatgctaaagcgtatctatcgttccacaccacctgaggtgatagtggaagtgctggagccctatgtccgccttactactgccaacgtccgtatcatcaagaacagaacaggccctatggggcatacctatggctttattgacctcgactcccatgcggaagctcttcgtgtggtgaagatcttacagaaccttgatccgccatttagcattgatgggaagatggtagctgtaaacctggccactggaaaacgaagaaatgattctggggaccattctgaccacatgcattactatcagggtaaaaaatatttccgagataggaggggaggtggcagaaattcagactggtcttcagatacaaatcgacaaggacaacagtcatcatctgactgctacatatatgattctgctactggctactattatgaccccttggcaggaacttattatgaccccaatacccagcaagaagtctatgtgccccaggatcctggattacctgaggaagaagagatcaaggaaaaaaaacccaccagtcaaggaaagtcaagtagcaagaaggaaatgtctaaaagagatggcaaggagaaaaaagacagaggagtgacgaggtttcaggaaaatgccagtgaagggaaggcccctgcagaagacgtctttaagaagcccctgcctcctactgtgaagaaggaagagagtccccctccacctaaagtggtaaacccactgatcggcctcttgggtgaatatggaggagacagtgactatgaggaggaagaagaggaggaacagacccctcccccacagccccgcacagcacagccccagaagcgagaggagcaaaccaagaaggagaatgaagaagacaaactcactgactggaataaactggcttgtctgctttgcagaaggcagtttcccaataaagaagttctgatcaaacaccagcagctgtcagacctgcacaagcaaaacctggaaatccaccggaagataaaacagtctgagcaggagctagcctatctggaaaggagagaacgagagggaaagtttaaaggaagaggaaatgatcgcagggatgatcgtaaacttgttgataaagaagatatcgacactagcagcaaaggaggctgtgtccaacaggctactggctggaggaaagggacaggcctgggatatggccatcctggattggcttcatcagaggaggctgaaggccggatgaggggccccagtgttggagcctcaggaagaaccagcaaaagacagtccaacgagacttatcgagatgctgttcgaagagtcatgtttgctcgatataaagaactcgattaagaaaggagacaagttccatgggatacaacctccctcttgttttgtttgtctctccttttcttttgttactgttcttgctgctagaacttttttaaataaactttttttcaatgtga

SEQ ID NO: 10587 - DNA, 3566 bp, Homo sapiens
agtaagagtctgcgggaccggcagctgtacttcatctcccagcgggccgagcgctgaaggcagcggcgcggcgcctttgtggtagcagtggccccgcgcggaggaagttccggtgtccgcggcgctgggtcggtggcggaggctgaggagaaggaggagcgggccgtggaggcttcgccgcctaggtactgctataaccagaatttggtagaaaaaggatttacttgttggggccctcttgataaaaagagatgtggggggattctcgacctgctaacagaactggaccttttcgtgggagccaagaagaaaggtttgctcccgggtggaacagggattatcctcctcctccccttaagagtcatgctcaagagagacactctggcaactttcctggcagagattcacttccctttgatttccaggggcattcggggcctccttttgcaaatgtagaggagcattctttcagctatggagctagagacggaccgcatggtgactatcgaggaggggagggacctggacatgatttcagggggggagatttttcgtcttctgatttccagagcagagattcatcacagttggacttcaggggtagggacatacattctggggattttcgggatagagaaggaccacctatggactataggggtggagatggtacttctatggattatagaggtagggaggcacctcatatgaactacagagacagggatgctcacgctgttgacttcagaggtagggatgctcctccatctgacttcaggggccggggcacttatgatttagattttagaggccgggatggatcccatgcagattttaggggaagggatttatcagatttggattttagggccagagaacagtcccgttctgattttaggaatagagatgtatctgatttggactttagagacaaagacggaacacaagtagactttagaggccgaggttcaggtactactgatctagactttagggacagggatacgccacattcagatttcagaggtagacaccgatctaggactgatcaggattttaggggcagagagatgggatcttgtatggaatttaaagatagggagatgccccctgtggatccaaatattttggattacattcagccctctacacaagatagagaacattctggtatgaatgtgaacaggagagaagaatccacacatgaccatacgatagaaaggcctgcttttggcattcagaagggagaatttgagcattcagaaacaagagaaggagaaacacaaggtgtagcctttgaacatgagtctccagcagactttcagaacagccaaagtccagttcaagaccaagataagtcacagctttctggacgtgaagagcagagttcagatgctggtctgtttaaagaagaaggcggtctggactttcttgggcggcaagacaccgattacagaagcatggagtaccgtgatgtggatcataggctgccaggaagccagatgtttggctatggccagagcaagtcttttccagagggcaaaactgcccgagatgcccaacgggaccttcaggatcaagattataggaccggcccaagtgaggagaaacccagcaggcttattcgattaagtggggtacctgaagatgccacaaaagaagagattcttaatgcttttcggactcctgatggcatgcctgtaaagaacttgcagttgaaggagtataacacaggttacgactatggctatgtctgcgtggagttttcactcttggaagatgccatcggatgcatggaggccaaccagggaactctaatgatccaggacaaagaagttaccctggagtatgtatcaagcctggatttttggtactgcaaacgatgtaaggcaaacattggtgggcaccgatcttcctgttcattctgcaagaacccaagagaagtgacagaggccaagcaagaattaataacctaccctcagcctcagaaaacatccataccagcaccattggaaaaacagcccaaccagcccctaagaccagctgataaggaacctgaacccaggaagagggaagaaggccaagagtcacgcttaggacatcaaaagagagaagcagaaaggtatctgcctccttctcgaagggaagggccaactttccgaagagaccgagagagggagtcatggtctggagagacacgccaggatggagagagcaaaactatcatgctaaagcgtatctatcgttccacaccacctgaggtgatagtggaagtgctggagccctatgtccgccttactactgccaacgtccgtatcatcaagaacagaacaggccctatggggcatacctatggctttattgacctcgactcccatgcggaagctcttcgtgtggtgaagatcttacagaaccttgatccgccatttagcattgatgggaagatggtagctgtaaacctggccactggaaaacgaagaaatgattctggggaccattctgaccacatgcattactatcagggtaaaaaatatttccgagataggaggggaggtggcagaaattcagactggtcttcagatacaaatcgacaaggacaacagtcatcatctgactgctacatatatgattctgctactggctactattatgaccccttggcaggaacttattatgaccccaatacccagcaagaagtctatgtgccccaggatcctggattacctgaggaagaagagatcaaggaaaaaaaacccaccagtcaaggaaagtcaagtagcaagaaggaaatgtctaaaagagatggcaaggagaaaaaagacagaggagtgacgaggtttcaggaaaatgccagtgaagggaaggcccctgcagaagacgtctttaagaagcccctgcctcctactgtgaagaaggaagagagtccccctccacctaaagtggtaaacccactgatcggcctcttgggtgaatatggaggagacagtgactatgaggaggaagaagaggaggaacagacccctcccccacagccccgcacagcacagccccagaagcgagaggagcaaaccaagaaggagaatgaagaagacaaactcactgactggaataaactggcttgtctgctttgcagaaggcagtttcccaataaagaagttctgatcaaacaccagcagctgtcagacctgcacaagtgatcgtaaacttgttgataaagaagatatcgacactagcagcaaaggaggctgtgtccaacaggctactggctggaggaaagggacaggcctgggatatggccatcctggattggcttcatcagaggaggctgaaggccggatgaggggccccagtgttggagcctcaggaagaaccagcaaaagacagtccaacgagacttatcgagatgctgttcgaagagtcatgtttgctcgatataaagaactcgattaagaaaggagacaagttccatgggatacaacctccctcttgttttgtttgtctctccttttcttttgttactgttcttgctgctagaacttttttaaataaactttttttcaatgtga

SEQ ID NO: 10588 - DNA, 3477 bp, Homo sapiens
agtaagagtctgcgggaccggcagctgtacttcatctcccagcgggccgagcgctgaaggcagcggcgcggcgcctttgtggtagcagtggccccgcgcggaggaagttccggtgtccgcggcgctgggtcggtggcggaggctgaggagaaggaggagcgggccgtggaggcttcgccgcctaggtactgctataaccagaatttggtagaaaaaggatttacttgttggggccctcttgataaaaagagatgtggggggattctcgacctgctaacagaactggaccttttcgtgggagccaagaagaaaggtttgctcccgggtggaacagggattatcctcctcctccccttaagagtcatgctcaagagagacactctggcaactttcctggcagagattcacttccctttgatttccaggggcattcggggcctccttttgcaaatgtagaggagcattctttcagctatggagctagagacggaccgcatggtgactatcgaggaggggagggacctggacatgatttcagggggggagatttttcgtcttctgatttccagagcagagattcatcacagttggacttcaggggtagggacatacattctggggattttcgggatagagaaggaccacctatggactataggggtggagatggtacttctatggattatagaggtagggaggcacctcatatgaactacagagacagggatgctcacgctgttgacttcagaggtagggatgctcctccatctgacttcaggggccggggcacttatgatttagattttagaggccgggatggatcccatgcagattttaggggaagggatttatcagatttggattttagggccagagaacagtcccgttctgattttaggaatagagatgtatctgatttggactttagagacaaagacggaacacaagtagactttagaggccgaggttcaggtactactgatctagactttagggacagggatacgccacattcagatttcagaggtagacaccgatctaggactgatcaggattttaggggcagagagatgggatcttgtatggaatttaaagatagggagatgccccctgtggatccaaatattttggattacattcagccctctacacaagatagagaacattctggtatgaatgtgaacaggagagaagaatccacacatgaccatacgatagaaaggcctgcttttggcattcagaagggagaatttgagcattcagaaacaagagaaggagaaacacaaggtgtagcctttgaacatgagtctccagcagactttcagaacagccaaagtccagttcaagaccaagataagtcacagctttctggacgtgaagagcagagttcagatgctggtctgtttaaagaagaaggcggtctggactttcttgggcggcaagacaccgattacagaagcatggagtaccgtgatgtggatcataggctgccaggaagccagatgtttggctatggccagagcaagtcttttccagagggcaaaactgcccgagatgcccaacgggaccttcaggatcaagattataggaccggcccaagtgaggagaaacccagcaggcttattcgattaagtggggtacctgaagatgccacaaaagaagagattcttaatgcttttcggactcctgatggcatgcctgtaaagaacttgcagttgaaggagtataacacaggttacgactatggctatgtctgcgtggagttttcactcttggaagatgccatcggatgcatggaggccaaccagggaactctaatgatccaggacaaagaagttaccctggagtatgtatcaagcctggatttttggtactgcaaacgatgtaaggcaaacattggtgggcaccgatcttcctgttcattctgcaagaacccaagagaagtgacagaggccaagcaagaattaataacctaccctcagcctcagaaaacatccataccagcaccattggaaaaacagcccaaccagcccctaagaccagctgataaggaacctgaacccaggaagagggaagaaggccaagagtcacgcttaggacatcaaaagagagaagcagaaaggtatctgcctccttctcgaagggaagggccaactttccgaagagaccgagagagggagtcatggtctggagagacacgccaggatggagagagcaaaactatcatgctaaagcgtatctatcgttccacaccacctgaggtgatagtggaagtgctggagccctatgtccgccttactactgccaacgtccgtatcatcaagaacagaacaggccctatggggcatacctatggctttattgacctcgactcccatgcggaagctcttcgtgtggtgaagatcttacagaaccttgatccgccatttagcattgatgggaagatggtagctgtaaacctggccactggaaaacgaagaaatgattctggggaccattctgaccacatgcattactatcagggtaaaaaatatttccgagataggaggggaggtggcagaaattcagactggtcttcagatacaaatcgacaaggacaacagtcatcatctgactgctacatatatgattctgctactggctactattatgaccccttggcaggaacttattatgaccccaatacccagcaagaagtctatgtgccccaggatcctggattacctgaggaagaagagatcaaggaaaaaaaacccaccagtcaaggaaagtcaagtagcaagaaggaaatgtctaaaagagatggcaaggagaaaaaagacagaggagtgacgaggtttcaggaaaatgccagtgaagggaaggcccctgcagaagacgtctttaagaagcccctgcctcctactgtgaagaaggaagagagtccccctccacctaaagtggtaaacccactgatcggcctcttgggtgaatatggaggagacagtgactatgaggaggaagaagaggaggaacagacccctcccccacagccccgcacagcacagccccagaagcgagaggagcaaaccaagaaggagaatgaagaagacaaactcactgactggaataaactggcttgtctgctttgcagaaggcagtttcccaataaagaagttctgatcaaacaccagcagctgtcagacctgcacaagcaaaacctggaaatccaccggaagataaaacagtctgagcaggagctagcctatctggaaaggagagaacgagagcctcaggaagaaccagcaaaagacagtccaacgagacttatcgagatgctgttcgaagagtcatgtttgctcgatataaagaactcgattaagaaaggagacaagttccatgggatacaacctccctcttgttttgtttgtctctccttttcttttgttactgttcttgctgctagaacttttttaaataaactttttttcaatgtga

SEQ ID NO: 10589 - DNA, 715 bp, Homo sapiens
gcatgacaagaccagttagggattgttggttgcaggatacagtgatcatttagtagatctgatcaatcaaaagagctacaatccaaaagcaactattgggaaaggcctagaagcatctctaggaccattgtttcttagacctatactcatagaattgcctctcttctcagcaaaacctggaaatccaccggaagataaaacagtctgagcaggagctagcctatctggaaaggagagaacgagagggaaagtttaaaggaagaggaaatgatcgcagggaaaagctccagtcttttgactctccagaaaggaaacggattaagtactccagggaaactgacagtgatcgtaaacttgttgataaagaagatatcgacactagcagcaaaggaggctgtgtccaacaggctactggctggaggaaagggacaggcctgggatatggccatcctggattggcttcatcagaggaggctgaaggccggatgaggggccccagtgttggagcctcaggaagaaccagcaaaagacagtccaacgagacttatcgagatgctgttcgaagagtcatgtttgctcgatataaagaactcgattaagaaaggagacaagttccatgggatacaacctccctcttgttttgtttgtctctccttttcttttgttactgttcttgctgctagaacttttttaaataaactttttttcaatgtga

SEQ ID NO: 10590 - DNA, 2592 bp, Homo sapiens
  misc_feature (2576)..(2576): n is a, c, g, or t
agtaagagtctgcgggaccggcagctgtacttcatctcccagcgggccgagcgctgaaggcagcggcgcggcgcctttgtggtagcagtggccccgcgcggaggaagttccggtgtccgcggcgctgggtcggtggcggaggctgaggagaaggaggagcgggccgtggaggcttcgccgcctaggtactgctataaccagaatttggtagaaaaaggatttacttgttggggccctcttgataaaaagagatgtggggggattctcgacctgctaacagaactggaccttttcgtgggagccaagaagaaaggtttgctcccgggtggaacagggattatcctcctcctccccttaagagtcatgctcaagagagacactctggcaactttcctggcagagattcacttccctttgatttccaggggcattcggggcctccttttgcaaatgtagaggagcattctttcagctatggagctagagacggaccgcatggtgactatcgaggaggggagggacctggacatgatttcagggggggagatttttcgtcttctgatttccagagcagagattcatcacagttggacttcaggggtagggacatacattctggggattttcgggatagagaaggaccacctatggactataggggtggagatggtacttctatggattatagaggtagggaggcacctcatatgaactacagagacagggatgctcacgctgttgacttcagaggtagggatgctcctccatctgacttcaggggccggggcacttatgatttagattttagaggccgggatggatcccatgcagattttaggggaagggatttatcagatttggattttagggccagagaacagtcccgttctgattttaggaatagagatgtatctgatttggactttagagacaaagacggaacacaagtagactttagaggccgaggttcaggtactactgatctagactttagggacagggatacgccacattcagatttcagaggtagacaccgatctaggactgatcaggattttaggggcagagagatgggatcttgtatggaatttaaagatagggagatgccccctgtggatccaaatattttggattacattcagccctctacacaagatagagaacattctggtatgaatgtgaacaggagagaagaatccacacatgaccatacgatagaaaggcctgcttttggcattcagaagggagaatttgagcattcagaaacaagagaaggagaaacacaaggtgtagcctttgaacatgagtctccagcagactttcagaacagccaaagtccagttcaagaccaagataagtcacagctttctggacgtgaagagcagagttcagatgctggtctgtttaaagaagaaggcggtctggactttcttgggcggcaagacaccgattacagaagcatggagtaccgtgatgtggatcataggctgccaggaagccagatgtttggctatggccagagcaagtcttttccagagggcaaaactgcccgagatgcccaacgggaccttcaggatcaagattataggaccggcccaagtgaggagaaacccagcaggcttattcgattaagtggggtacctgaagatgccacaaaagaagagattcttaatgcttttcggactcctgatggcatgcctgtaaagaacttgcagttgaaggagtataacacaggttacgactatggctatgtctgcgtggagttttcactcttggaagatgccatcggatgcatggaggccaaccagggaactctaatgatccaggacaaagaagttaccctggagtatgtatcaagcctggatttttggtactgcaaacgatgtaaggcaaacattggtgggcaccgatcttcctgttcattctgcaagaacccaagagaagtgacagaggccaagcaagaattaataacctaccctcagcctcagaaaacatccataccagcaccattggaaaaacagcccaaccagcccctaagaccagctgataaggaacctgaacccaggaagagggaagaaggccaagagtcacgcttaggacatcaaaagagagaagcagaaaggtatctgcctccttctcgaagggaagggccaactttccgaagagaccgagagagggagtcatggtctggagagacacgccaggatggagagagcaaaactatcatgctaaagcgtatctatcgttccacaccacctgaggtgatagtggaagtgctggagccctatgtccgccttactactgccaacgtccgtatcatcaagaacagaacaggccctatggggcatacctatggctttattgacctcgactcccatgcggtgagtttcctccaccttggattggcctagagacagatggctaaagaaccttcaagaaggtttgactgggggccgggcctggtggcttacgcctgtaatcccagcactttgggaggccgaggtgggtggatcacgaggtcaggaaatcaagaccatcctggctaacacggtgaaaccctgtctctactaataccngttgcttggccgtgtg

SEQ ID NO: 10591 - DNA, 2990 bp, Homo sapiens
  misc_feature (2974)..(2974): n is a, c, g, or t
agtaagagtctgcgggaccggcagctgtacttcatctcccagcgggccgagcgctgaaggcagcggcgcggcgcctttgtggtagcagtggccccgcgcggaggaagttccggtgtccgcggcgctgggtcggtggcggaggctgaggagaaggaggagcgggccgtggaggcttcgccgcctaggtactgctataaccagaatttggtagaaaaaggatttacttgttggggccctcttgataaaaagagatgtggggggattctcgacctgctaacagaactggaccttttcgtgggagccaagaagaaaggtttgctcccgggtggaacagggattatcctcctcctccccttaagagtcatgctcaagagagacactctggcaactttcctggcagagattcacttccctttgatttccaggggcattcggggcctccttttgcaaatgtagaggagcattctttcagctatggagctagagacggaccgcatggtgactatcgaggaggggagggacctggacatgatttcagggggggagatttttcgtcttctgatttccagagcagagattcatcacagttggacttcaggggtagggacatacattctggggattttcgggatagagaaggaccacctatggactataggggtggagatggtacttctatggattatagaggtagggaggcacctcatatgaactacagagacagggatgctcacgctgttgacttcagaggtagggatgctcctccatctgacttcaggggccggggcacttatgatttagattttagaggccgggatggatcccatgcagattttaggggaagggatttatcagatttggattttagggccagagaacagtcccgttctgattttaggaatagagatgtatctgatttggactttagagacaaagacggaacacaagtagactttagaggccgaggttcaggtactactgatctagactttagggacagggatacgccacattcagatttcagaggtagacaccgatctaggactgatcaggattttaggggcagagagatgggatcttgtatggaatttaaagatagggagatgccccctgtggatccaaatattttggattacattcagccctctacacaagatagagaacattctggtatgaatgtgaacaggagagaagaatccacacatgaccatacgatagaaaggcctgcttttggcattcagaagggagaatttgagcattcagaaacaagagaaggagaaacacaaggtgtagcctttgaacatgagtctccagcagactttcagaacagccaaagtccagttcaagaccaagataagtcacagctttctggacgtgaagagcagagttcagatgctggtctgtttaaagaagaaggcggtctggactttcttgggcggcaagacaccgattacagaagcatggagtaccgtgatgtggatcataggctgccaggaagccagatgtttggctatggccagagcaagtcttttccagagggcaaaactgcccgagatgcccaacgggaccttcaggatcaagattataggaccggcccaagtgaggagaaacccagcaggcttattcgattaagtggggtacctgaagatgccacaaaagaagagattcttaatgcttttcggactcctgatggcatgcctgtaaagaacttgcagttgaaggagtataacacaggttacgactatggctatgtctgcgtggagttttcactcttggaagatgccatcggatgcatggaggccaaccagggaactctaatgatccaggacaaagaagttaccctggagtatgtatcaagcctggatttttggtactgcaaacgatgtaaggcaaacattggtgggcaccgatcttcctgttcattctgcaagaacccaagagaagtgacagaggccaagcaagaattaataacctaccctcagcctcagaaaacatccataccagcaccattggaaaaacagcccaaccagcccctaagaccagctgataaggaacctgaacccaggaagagggaagaaggccaagagtcacgcttaggacatcaaaagagagaagcagaaaggtatctgcctccttctcgaagggaagggccaactttccgaagagaccgagagagggagtcatggtctggagagacacgccaggatggagagagcaaaagtaagtagtttgtcagggcacataccagactgtgatcatcacaatggagcatagatggccaatgttatgtccgggagctatctgctttccagtaccctgagagatctgtgcatgacctgatgacagaggccattgctgtctgtggaccttcctgtactgcttaaaggaatctatgcccttcaaatagtaaattgctatatgaatgcagtaaggcatgattttagatttctaagtattggtgaagaaaagtatgcagtatttatttgtttagcatttttttacagaaccagccttgctagtagcatctatagtaaaaaatgacagtcagattcttgggacttcaaaaatttatctttctctcccttgtgttgcccttctcccatttatggttgattcagctatcatgctaaagcgtatctatcgttccacaccacctgaggtgatagtggaagtgctggagccctatgtccgccttactactgccaacgtccgtatcatcaagaacagaacaggccctatggggcatacctatggctttattgacctcgactcccatgcggtgagtttcctccaccttggattggcctagagacagatggctaaagaaccttcaagaaggtttgactgggggccgggcctggtggcttacgcctgtaatcccagcactttgggaggccgaggtgggtggatcacgaggtcaggaaatcaagaccatcctggctaacacggtgaaaccctgtctctactaataccngttgcttggccgtgtg

SEQ ID NO: 10592 - DNA, 1473 bp, Homo sapiens
cattgagcccctggatgctgttgcgtggcttagatgacttatacatgctttgtggcatgattcatactaccttctaccttctatgatacccttgggtagttataataggacccaggttagagtgcttcttggtggagccactgtagaactgggatttagatgcagccagggctgatgctcagctggtgaacactggtgtgcttgttcctactggtgatttacaaccagtgtttcttctttttgggcctgcatccattttgattgggtggtgtccatgctgtatctgtaataaaatatttttgaatgttaccgctggatgcagcgtgagaaagatacctcctgaaacttactgtaagaaatttacagtgcattgatttttctgatatataggaatcgtcatgttgaccttggaattcttaagttccctggctgtaggaaatggaaatttttgtagtatgtcaccattgttagcttatttggtattgcggattttccctgttgcaggactgggtgaaagctttttctgcagcagtcatgttgaaaaccttgtgttgactttcctcgtgttctgaaatgggagcataaaagtttactccgccacttcgtcttaaaatagcaaaactttgctgttttctgcagatctaggaccttgttacagaactctgccaaaaaaaaatgtttacagaagaatgtgctgtgattagagaagaatatgctggtgtgtagatttcaaactctctggacaatatgaataacactgtctttgtttctacagtgggagccaagaagaaaggtttgctcccgggtggaacagggattatcctcctcctccccttaagagtcatgctcaagagagacactctggcaactttcctggcagagattcacttccctttgatttccaggggcattcggggcctccttttgcaaatgtagaggacaaaccaagaaggagaatgaagaagacaaactcactgactggaataaactggcttgtctgctttgcagaaggcagtttcccaataaagaagttctgatcaaacaccagcagctgtcagacctgcacaagcaaaacctggaaatccaccggaagataaaacagtctgagcaggagctagcctatctggaaaggagagaacgagagggaaagtttaaaggaagaggaaatgatcgcagggagaaagggacaggcctgggatatggccatcctggattggcttcatcagaggaggctgaaggccggatgaggggccccagtgttggagcctcaggaagaaccagcaaaagacagtccaacgagacttatcgagatgctgttcgaagagtcatgtttgctcgatataaagaactcgattaagaaaggagacaagttccatgggatacaacctccctcttgttttgtttgtctctccttttcttttgttactgttcttgctgctagaacttttttaaataaactttttttcaatgtga

SEQ ID NO: 10593 - DNA, 116 bp, Homo sapiens
gaggggaggtggcagaaattcagactggtcttcagatacaaatcgacaaggacaacagtgtaagtaacctttgttttatttctgttgctcttttttgcttgacttgctactcatta

SEQ ID NO: 10594 - DNA, 466 bp, Homo sapiens
ctgacatctattctgattcctgttccaatcagtccttcattaaaagttgcctgtttctgccagtatgctcttactgttaaaattttgacagaatataatgtagtaaatttatcctctgagaaggaaaatccacgttcacttctctttcaaaggagaatttttctgtctttgggttctggcattttctgtctctgggttcaagtgtgtctggttctataggaagctcttcgtgtggtgaagatcttacagaaccttgatccgccatttagcattgatgggaagatggtagctgtaaacctggccactggaaaacgaaggtaaggcagaagggtgaggatctcttgtgctgcccccacttgtgtttttgagaggaaactccttttcctggctggaaaaacagtaaagcatgatgttttcctaacatggactgcttcagataggtgtttattacagtttatttctgaag

SEQ ID NO: 10595 - DNA, 349 bp, Homo sapiens
attataggcgtgagccaccgcacccagcccagcctttatcagttattatgagtgaatatcatgtgagagttacctctggtttgatcagtttcaggaaaatgccagtgaagggaaggcccctgcagaagacgtctttaagaagcccctgcctcctactgtgaagaaggaagagagtccccctccagtaagaccaacattgatcccctggacctagggctggggctggggatggttccgagtagaagaggaagcgcaaaggctgatgccttcctctggtgttggtcttttacctcactatgtctcccgaataaggattcccatttcttttgagtacaagcatgagataaag

SEQ ID NO: 10596 - DNA, 3739 bp, Homo sapiens
agtaagagtctgcgggaccggcagctgtacttcatctcccagcgggccgagcgctgaaggcagcggcgcggcgcctttgtggtagcagtggccccgcgcggaggaagttccggtgtccgcggcgctgggtcggtggcggaggctgaggagaaggaggagcgggccgtggaggcttcgccgcctaggtactgctataaccagaatttggtagaaaaaggatttacttgttggggccctcttgataaaaagagatgtggggggattctcgacctgctaacagaactggaccttttcgtgggagccaagaagaaaggtttgctcccgggtggaacagggattatcctcctcctccccttaagagtcatgctcaagagagacactctggcaactttcctggcagagattcacttccctttgatttccaggggcattcggggcctccttttgcaaatgtagaggagcattctttcagctatggagctagagacggaccgcatggtgactatcgaggaggggagggacctggacatgatttcagggggggagatttttcgtcttctgatttccagagcagagattcatcacagttggacttcaggggtagggacatacattctggggattttcgggatagagaaggaccacctatggactataggggtggagatggtacttctatggattatagaggtagggaggcacctcatatgaactacagagacagggatgctcacgctgttgacttcagaggtagggatgctcctccatctgacttcaggggccggggcacttatgatttagattttagaggccgggatggatcccatgcagattttaggggaagggatttatcagatttggattttagggccagagaacagtcccgttctgattttaggaatagagatgtatctgatttggactttagagacaaagacggaacacaagtagactttagaggccgaggttcaggtactactgatctagactttagggacagggatacgccacattcagatttcagaggtagacaccgatctaggactgatcaggattttaggggcagagagatgggatcttgtatggaatttaaagatagggagatgccccctgtggatccaaatattttggattacattcagccctctacacaagatagagaacattctggtatgaatgtgaacaggagagaagaatccacacatgaccatacgatagaaaggcctgcttttggcattcagaagggagaatttgagcattcagaaacaagagaaggagaaacacaaggtgtagcctttgaacatgagtctccagcagactttcagaacagccaaagtccagttcaagaccaagataagtcacagctttctggacgtgaagagcagagttcagatgctggtctgtttaaagaagaaggcggtctggactttcttgggcggcaagacaccgattacagaagcatggagtaccgtgatgtggatcataggctgccaggaagccagatgtttggctatggccagagcaagtcttttccagagggcaaaactgcccgagatgcccaacgggaccttcaggatcaagattataggaccggcccaagtgaggagaaacccagcaggcttattcgattaagtggggtacctgaagatgccacaaaagaagagattcttaatgcttttcggactcctgatggcatgcctgtaaagaacttgcagttgaaggagtataacacaggttacgactatggctatgtctgcgtggagttttcactcttggaagatgccatcggatgcatggaggccaaccagggaactctaatgatccaggacaaagaagttaccctggagtatgtatcaagcctggatttttggtactgcaaacgatgtaaggcaaacattggtgggcaccgatcttcctgttcattctgcaagaacccaagagaagtgacagaggccaagcaagaattaataacctaccctcagcctcagaaaacatccataccagcaccattggaaaaacagcccaaccagcccctaagaccagctgataaggaacctgaacccaggaagagggaagaaggccaagagtcacgcttaggacatcaaaagagagaagcagaaaggtatctgcctccttctcgaagggaagggccaactttccgaagagaccgagagagggagtcatggtctggagagacacgccaggatggagagagcaaaactatcatgctaaagcgtatctatcgttccacaccacctgaggtgatagtggaagtgctggagccctatgtccgccttactactgccaacgtccgtatcatcaagaacagaacaggccctatggggcatacctatggctttattgacctcgactcccatgcggaagctcttcgtgtggtgaagatcttacagaaccttgatccgccatttagcattgatgggaagatggtagctgtaaacctggccactggaaaacgaagaaatgattctggggaccattctgaccacatgcattactatcagggtaaaaaatatttccgagataggaggggaggtggcagaaattcagactggtcttcagatacaaatcgacaaggacaacagtcatcatctgactgctacatatatgattctgctactggctactattatgaccccttggcaggaacttattatgaccccaatacccagcaagaagtctatgtgccccaggatcctggattacctgaggaagaagagatcaaggaaaaaaaacccaccagtcaaggaaagtcaagtagcaagaaggaaatgtctaaaagagatggcaaggagaaaaaagacagaggagtgacgaggtttcaggaaaatgccagtgaagggaaggcccctgcagaagacgtctttaagaagcccctgcctcctactgtgaagaaggaagagagtccccctccacctaaagtggtaaacccactgatcggcctcttgggtgaatatggaggagacagtgactatgaggaggaagaagaggaggaacagacccctcccccacagccccgcacagcacagccccagaagcgagaggagcaaaccaagaaggagaatgaagaagacaaactcactgactggaataaactggcttgtctgctttgcagaaggcagtttcccaataaagaagttctgatcaaacaccagcagctgtcagacctgcacaagcaaaacctggaaatccaccggaagataaaacagtctgagcaggagctagcctatctggaaaggagagaacgagagggaaagtttaaaggaagaggaaatgatcgcagggaaaagctccagtcttttgactctccagaaaggaaacggattaagtactccagggaaactgacagtgatcgtaaacttgttgataaagaagatatcgacactagcagcaaaggaggctgtgtccaacaggctactggctggaggaaagggacaggcctgggatatggccatcctggattggcttcatcagaggaggctgaaggccggatgaggggccccagtgttggagcctcaggaagaaccagcaaaagacagtccaacgagacttatcgagatgctgttcgaagagtcatgtttgctcgatataaagaactcgattaagaaaggagacaagttccatgggatacaacctccctcttgttttgtttgtctctccttttcttttgttactgttcttgctgctagaacttttttaaataaactttttttcaatgtga

SEQ ID NO: 10597 - DNA, 4219 bp, Homo sapiens
cattgagcccctggatgctgttgcgtggcttagatgacttatacatgctttgtggcatgattcatactaccttctaccttctatgatacccttgggtagttataataggacccaggttagagtgcttcttggtggagccactgtagaactgggatttagatgcagccagggctgatgctcagctggtgaacactggtgtgcttgttcctactggtgatttacaaccagtgtttcttctttttgggcctgcatccattttgattgggtggtgtccatgctgtatctgtaataaaatatttttgaatgttaccgctggatgcagcgtgagaaagatacctcctgaaacttactgtaagaaatttacagtgcattgatttttctgatatataggaatcgtcatgttgaccttggaattcttaagttccctggctgtaggaaatggaaatttttgtagtatgtcaccattgttagcttatttggtattgcggattttccctgttgcaggactgggtgaaagctttttctgcagcagtcatgttgaaaaccttgtgttgactttcctcgtgttctgaaatgggagcataaaagtttactccgccacttcgtcttaaaatagcaaaactttgctgttttctgcagatctaggaccttgttacagaactctgccaaaaaaaaatgtttacagaagaatgtgctgtgattagagaagaatatgctggtgtgtagatttcaaactctctggacaatatgaataacactgtctttgtttctacagtgggagccaagaagaaaggtttgctcccgggtggaacagggattatcctcctcctccccttaagagtcatgctcaagagagacactctggcaactttcctggcagagattcacttccctttgatttccaggggcattcggggcctccttttgcaaatgtagaggagcattctttcagctatggagctagagacggaccgcatggtgactatcgaggaggggagggacctggacatgatttcagggggggagatttttcgtcttctgatttccagagcagagattcatcacagttggacttcaggggtagggacatacattctggggattttcgggatagagaaggaccacctatggactataggggtggagatggtacttctatggattatagaggtagggaggcacctcatatgaactacagagacagggatgctcacgctgttgacttcagaggtagggatgctcctccatctgacttcaggggccggggcacttatgatttagattttagaggccgggatggatcccatgcagattttaggggaagggatttatcagatttggattttagggccagagaacagtcccgttctgattttaggaatagagatgtatctgatttggactttagagacaaagacggaacacaagtagactttagaggccgaggttcaggtactactgatctagactttagggacagggatacgccacattcagatttcagaggtagacaccgatctaggactgatcaggattttaggggcagagagatgggatcttgtatggaatttaaagatagggagatgccccctgtggatccaaatattttggattacattcagccctctacacaagatagagaacattctggtatgaatgtgaacaggagagaagaatccacacatgaccatacgatagaaaggcctgcttttggcattcagaagggagaatttgagcattcagaaacaagagaaggagaaacacaaggtgtagcctttgaacatgagtctccagcagactttcagaacagccaaagtccagttcaagaccaagataagtcacagctttctggacgtgaagagcagagttcagatgctggtctgtttaaagaagaaggcggtctggactttcttgggcggcaagacaccgattacagaagcatggagtaccgtgatgtggatcataggctgccaggaagccagatgtttggctatggccagagcaagtcttttccagagggcaaaactgcccgagatgcccaacgggaccttcaggatcaagattataggaccggcccaagtgaggagaaacccagcaggcttattcgattaagtggggtacctgaagatgccacaaaagaagagattcttaatgcttttcggactcctgatggcatgcctgtaaagaacttgcagttgaaggagtataacacaggttacgactatggctatgtctgcgtggagttttcactcttggaagatgccatcggatgcatggaggccaaccagggaactctaatgatccaggacaaagaagttaccctggagtatgtatcaagcctggatttttggtactgcaaacgatgtaaggcaaacattggtgggcaccgatcttcctgttcattctgcaagaacccaagagaagtgacagaggccaagcaagaattaataacctaccctcagcctcagaaaacatccataccagcaccattggaaaaacagcccaaccagcccctaagaccagctgataaggaacctgaacccaggaagagggaagaaggccaagagtcacgcttaggacatcaaaagagagaagcagaaaggtatctgcctccttctcgaagggaagggccaactttccgaagagaccgagagagggagtcatggtctggagagacacgccaggatggagagagcaaaactatcatgctaaagcgtatctatcgttccacaccacctgaggtgatagtggaagtgctggagccctatgtccgccttactactgccaacgtccgtatcatcaagaacagaacaggccctatggggcatacctatggctttattgacctcgactcccatgcggaagctcttcgtgtggtgaagatcttacagaaccttgatccgccatttagcattgatgggaagatggtagctgtaaacctggccactggaaaacgaagaaatgattctggggaccattctgaccacatgcattactatcagggtaaaaaatatttccgagataggaggggaggtggcagaaattcagactggtcttcagatacaaatcgacaaggacaacagtcatcatctgactgctacatatatgattctgctactggctactattatgaccccttggcaggaacttattatgaccccaatacccagcaagaagtctatgtgccccaggatcctggattacctgaggaagaagagatcaaggaaaaaaaacccaccagtcaaggaaagtcaagtagcaagaaggaaatgtctaaaagagatggcaaggagaaaaaagacagaggagtgacgaggtttcaggaaaatgccagtgaagggaaggcccctgcagaagacgtctttaagaagcccctgcctcctactgtgaagaaggaagagagtccccctccacctaaagtggtaaacccactgatcggcctcttgggtgaatatggaggagacagtgactatgaggaggaagaagaggaggaacagacccctcccccacagccccgcacagcacagccccagaagcgagaggagcaaaccaagaaggagaatgaagaagacaaactcactgactggaataaactggcttgtctgctttgcagaaggcagtttcccaataaagaagttctgatcaaacaccagcagctgtcagacctgcacaagcaaaacctggaaatccaccggaagataaaacagtctgagcaggagctagcctatctggaaaggagagaacgagagggaaagtttaaaggaagaggaaatgatcgcagggaaaagctccagtcttttgactctccagaaaggaaacggattaagtactccagggaaactgacagtgatcgtaaacttgttgataaagaagatatcgacactagcagcaaaggaggctgtgtccaacaggctactggctggaggaaagggacaggcctgggatatggccatcctggattggcttcatcagaggaggctgaaggccggatgaggggccccagtgttggagcctcaggaagaaccagcaaaagacagtccaacgagacttatcgagatgctgttcgaagagtcatgtttgctcgatataaagaactcgattaagaaaggagacaagttccatgggatacaacctccctcttgttttgtttgtctctccttttcttttgttactgttcttgctgctagaacttttttaaataaactttttttcaatgtga

SEQ ID NO: 10598 - DNA, 3069 bp, Homo sapiens
ttacatagaggatcccggcttcgtgtagggtactcatatgaactacagagacagggatgctcacgctgttgacttcagaggtagggatgctcctccatctgacttcaggggccggggcacttatgatttagattttagaggccgggatggatcccatgcagattttaggggaagggatttatcagatttggattttagggccagagaacagtcccgttctgattttaggaatagagatgtatctgatttggactttagagacaaagacggaacacaagtagactttagaggccgaggttcaggtactactgatctagactttagggacagggatacgccacattcagatttcagaggtagacaccgatctaggactgatcaggattttaggggcagagagatgggatcttgtatggaatttaaagatagggagatgccccctgtggatccaaatattttggattacattcagccctctacacaagatagagaacattctggtatgaatgtgaacaggagagaagaatccacacatgaccatacgatagaaaggcctgcttttggcattcagaagggagaatttgagcattcagaaacaagagaaggagaaacacaaggtgtagcctttgaacatgagtctccagcagactttcagaacagccaaagtccagttcaagaccaagataagtcacagctttctggacgtgaagagcagagttcagatgctggtctgtttaaagaagaaggcggtctggactttcttgggcggcaagacaccgattacagaagcatggagtaccgtgatgtggatcataggctgccaggaagccagatgtttggctatggccagagcaagtcttttccagagggcaaaactgcccgagatgcccaacgggaccttcaggatcaagattataggaccggcccaagtgaggagaaacccagcaggcttattcgattaagtggggtacctgaagatgccacaaaagaagagattcttaatgcttttcggactcctgatggcatgcctgtaaagaacttgcagttgaaggagtataacacaggttacgactatggctatgtctgcgtggagttttcactcttggaagatgccatcggatgcatggaggccaaccagggaactctaatgatccaggacaaagaagttaccctggagtatgtatcaagcctggatttttggtactgcaaacgatgtaaggcaaacattggtgggcaccgatcttcctgttcattctgcaagaacccaagagaagtgacagaggccaagcaagaattaataacctaccctcagcctcagaaaacatccataccagcaccattggaaaaacagcccaaccagcccctaagaccagctgataaggaacctgaacccaggaagagggaagaaggccaagagtcacgcttaggacatcaaaagagagaagcagaaaggtatctgcctccttctcgaagggaagggccaactttccgaagagaccgagagagggagtcatggtctggagagacacgccaggatggagagagcaaaactatcatgctaaagcgtatctatcgttccacaccacctgaggtgatagtggaagtgctggagccctatgtccgccttactactgccaacgtccgtatcatcaagaacagaacaggccctatggggcatacctatggctttattgacctcgactcccatgcggaagctcttcgtgtggtgaagatcttacagaaccttgatccgccatttagcattgatgggaagatggtagctgtaaacctggccactggaaaacgaagaaatgattctggggaccattctgaccacatgcattactatcagggtaaaaaatatttccgagataggaggggaggtggcagaaattcagactggtcttcagatacaaatcgacaaggacaacagtcatcatctgactgctacatatatgattctgctactggctactattatgaccccttggcaggaacttattatgaccccaatacccagcaagaagtctatgtgccccaggatcctggattacctgaggaagaagagatcaaggaaaaaaaacccaccagtcaaggaaagtcaagtagcaagaaggaaatgtctaaaagagatggcaaggagaaaaaagacagaggagtgacgaggtttcaggaaaatgccagtgaagggaaggcccctgcagaagacgtctttaagaagcccctgcctcctactgtgaagaaggaagagagtccccctccacctaaagtggtaaacccactgatcggcctcttgggtgaatatggaggagacagtgactatgaggaggaagaagaggaggaacagacccctcccccacagccccgcacagcacagccccagaagcgagaggagcaaaccaagaaggagaatgaagaagacaaactcactgactggaataaactggcttgtctgctttgcagaaggcagtttcccaataaagaagttctgatcaaacaccagcagctgtcagacctgcacaagcaaaacctggaaatccaccggaagataaaacagtctgagcaggagctagcctatctggaaaggagagaacgagagggaaagtttaaaggaagaggaaatgatcgcagggaaaagctccagtcttttgactctccagaaaggaaacggattaagtactccagggaaactgacagtgatcgtaaacttgttgataaagaagatatcgacactagcagcaaaggaggctgtgtccaacaggctactggctggaggaaagggacaggcctgggatatggccatcctggattggcttcatcagaggaggctgaaggccggatgaggggccccagtgttggagcctcaggaagaaccagcaaaagacagtccaacgagacttatcgagatgctgttcgaagagtcatgtttgctcgatataaagaactcgattaagaaaggagacaagttccatgggatacaacctccctcttgttttgtttgtctctccttttcttttgttactgttcttgctgctagaacttttttaaataaactttttttcaatgtga

SEQ ID NO: 10599 - DNA, 3665 bp, Homo sapiens
agtaagagtctgcgggaccggcagctgtacttcatctcccagcgggccgagcgctgaaggcagcggcgcggcgcctttgtggtagcagtggccccgcgcggaggaagttccggtgtccgcggcgctgggtcggtggcggaggctgaggagaaggaggagcgggccgtggaggcttcgccgcctaggtactgctataaccagaatttggtagaaaaaggatttacttgttggggccctcttgataaaaagagatgtggggggattctcgacctgctaacagaactggaccttttcgtgggagccaagaagaaaggtttgctcccgggtggaacagggattatcctcctcctccccttaagagtcatgctcaagagagacactctggcaactttcctggcagagattcacttccctttgatttccaggggcattcggggcctccttttgcaaatgtagaggagcattctttcagctatggagctagagacggaccgcatggtgactatcgaggaggggagggacctggacatgatttcagggggggagatttttcgtcttctgatttccagagcagagattcatcacagttggacttcaggggtagggacatacattctggggattttcgggatagagaaggaccacctatggactataggggtggagatggtacttctatggattatagaggtagggaggcacctcatatgaactacagagacagggatgctcacgctgttgacttcagaggtagggatgctcctccatctgacttcaggggccggggcacttatgatttagattttagaggccgggatggatcccatgcagattttaggggaagggatttatcagatttggattttagggccagagaacagtcccgttctgattttaggaatagagatgtatctgatttggactttagagacaaagacggaacacaagtagactttagaggccgaggttcaggtactactgatctagactttagggacagggatacgccacattcagatttcagaggtagacaccgatctaggactgatcaggattttaggggcagagagatgggatcttgtatggaatttaaagatagggagatgccccctgtggatccaaatattttggattacattcagccctctacacaagatagagaacattctggtatgaatgtgaacaggagagaagaatccacacatgaccatacgatagaaaggcctgcttttggcattcagaagggagaatttgagcattcagaaacaagagaaggagaaacacaaggtgtagcctttgaacatgagtctccagcagactttcagaacagccaaagtccagttcaagaccaagataagtcacagctttctggacgtgaagagcagagttcagatgctggtctgtttaaagaagaaggcggtctggactttcttgggcggcaagacaccgattacagaagcatggagtaccgtgatgtggatcataggctgccaggaagccagatgtttggctatggccagagcaagtcttttccagagggcaaaactgcccgagatgcccaacgggaccttcaggatcaagattataggaccggcccaagtgaggagaaacccagcaggcttattcgattaagtggggtacctgaagatgccacaaaagaagagattcttaatgcttttcggactcctgatggcatgcctgtaaagaacttgcagttgaaggagtataacacagggaactctaatgatccaggacaaagaagttaccctggagtatgtatcaagcctggatttttggtactgcaaacgatgtaaggcaaacattggtgggcaccgatcttcctgttcattctgcaagaacccaagagaagtgacagaggccaagcaagaattaataacctaccctcagcctcagaaaacatccataccagcaccattggaaaaacagcccaaccagcccctaagaccagctgataaggaacctgaacccaggaagagggaagaaggccaagagtcacgcttaggacatcaaaagagagaagcagaaaggtatctgcctccttctcgaagggaagggccaactttccgaagagaccgagagagggagtcatggtctggagagacacgccaggatggagagagcaaaactatcatgctaaagcgtatctatcgttccacaccacctgaggtgatagtggaagtgctggagccctatgtccgccttactactgccaacgtccgtatcatcaagaacagaacaggccctatggggcatacctatggctttattgacctcgactcccatgcggaagctcttcgtgtggtgaagatcttacagaaccttgatccgccatttagcattgatgggaagatggtagctgtaaacctggccactggaaaacgaagaaatgattctggggaccattctgaccacatgcattactatcagggtaaaaaatatttccgagataggaggggaggtggcagaaattcagactggtcttcagatacaaatcgacaaggacaacagtcatcatctgactgctacatatatgattctgctactggctactattatgaccccttggcaggaacttattatgaccccaatacccagcaagaagtctatgtgccccaggatcctggattacctgaggaagaagagatcaaggaaaaaaaacccaccagtcaaggaaagtcaagtagcaagaaggaaatgtctaaaagagatggcaaggagaaaaaagacagaggagtgacgaggtttcaggaaaatgccagtgaagggaaggcccctgcagaagacgtctttaagaagcccctgcctcctactgtgaagaaggaagagagtccccctccacctaaagtggtaaacccactgatcggcctcttgggtgaatatggaggagacagtgactatgaggaggaagaagaggaggaacagacccctcccccacagccccgcacagcacagccccagaagcgagaggagcaaaccaagaaggagaatgaagaagacaaactcactgactggaataaactggcttgtctgctttgcagaaggcagtttcccaataaagaagttctgatcaaacaccagcagctgtcagacctgcacaagcaaaacctggaaatccaccggaagataaaacagtctgagcaggagctagcctatctggaaaggagagaacgagagggaaagtttaaaggaagaggaaatgatcgcagggaaaagctccagtcttttgactctccagaaaggaaacggattaagtactccagggaaactgacagtgatcgtaaacttgttgataaagaagatatcgacactagcagcaaaggaggctgtgtccaacaggctactggctggaggaaagggacaggcctgggatatggccatcctggattggcttcatcagaggaggctgaaggccggatgaggggccccagtgttggagcctcaggaagaaccagcaaaagacagtccaacgagacttatcgagatgctgttcgaagagtcatgtttgctcgatataaagaactcgattaagaaaggagacaagttccatgggatacaacctccctcttgttttgtttgtctctccttttcttttgttactgttcttgctgctagaacttttttaaataaactttttttcaatgtga

SEQ ID NO: 10600 - DNA, 1438 bp, Homo sapiens
ttttttttttttacctctgtcaatgattcttttgagaaaagcacccataatttgctacttgaggattttattccctggattctctggatgctcattgcatgaaaagtggaaaagtttagatctatggaaacagaactgttgcctatatggaaaatcagtgccttgtggcaatacaggtaagaacagtgttgctcttgaaaaagtggacagtgggtggtctgaatgtgtcctggtccctggagtgggtttttagattgatgtggactcttcttagacttgtaagtaaaaaagttgtttcttcccctaaaagggaactgtgcgccttagacctggaattgctgggaaactgaaacattctgtagacttacttgtttccaactgtatcgcagcaagaagtctatgtgccccaggatcctggattacctgaggaagaagagatcaaggaaaaaaaacccaccagtcaaggaaagtcaagtagcaagaaggaaatgtctaaaagagatggcaaggagaaaaaagacagaggagtgacgaggtttcaggaaaatgccagtgaagggaaggcccctgcagaagacgtctttaagaagcccctgcctcctactgtgaagaaggaagagagtccccctccacctaaagtggtaaacccactgatcggcctcttgggtgaatatggaggagacagtgactatgaggaggaagaagaggaggaacagacccctcccccacagccccgcacagcacagccccagaagcgagaggagcaaaccaagaaggagaatgaagaagacaaactcactgactggaataaactggcttgtctgctttgcagaaggcagtttcccaataaagaagttctgatcaaacaccagcagctgtcagacctgcacaagcaaaacctggaaatccaccggaagataaaacagtctgagcaggagctagcctatctggaaaggagagaacgagagggaaagtttaaaggaagaggaaatgatcgcagggaaaagctccagtcttttgactctccagaaaggaaacggattaagtactccagggaaactgacagtgatcgtaaacttgttgataaagaagatatcgacactagcagcaaaggaggctgtgtccaacaggctactggctggaggaaagggacaggcctgggatatggccatcctggattggcttcatcagaggaggctgaaggccggatgaggggccccagtgttggagcctcaggaagaaccagcaaaagacagtccaacgagacttatcgagatgctgttcgaagagtcatgtttgctcgatataaagaactcgattaagaaaggagacaagttccatgggatacaacctccctcttgttttgtttgtctctccttttcttttgttactgttcttgctgctagaacttttttaaataaactttttttcaatgtga

SEQ ID NO: 10601 - DNA, 2239 bp, Homo sapiens
ttttgataaagctttctagagattctctttgtttctgttccactagtgacagaggccaagcaagaattaataacctaccctcagcctcagaaaacatccataccagcaccattggaaaaacagcccaaccagcccctaagaccagctgataaggaacctgaacccaggaagagggaagaaggccaagagtcacgcttaggacatcaaaagagagaagcagaaaggtatctgcctccttctcgaagggaagggccaactttccgaagagaccgagagagggagtcatggtctggagagacacgccaggatggagagagcaaaagtaagtagtttgtcagggcacataccagactgtgatcatcacaatggagcatagatggccaatgttatgtccgggagctatctgctttccagtaccctgagagatctgtgcatgacctgatgacagaggccattgctgtctgtggaccttcctgtactgcttaaaggaatctatgcccttcaaatagtaaattgctatatgaatgcagtaaggcatgattttagatttctaagtattggtgaagaaaagtatgcagtatttatttgtttagcatttttttacagaaccagccttgctagtagcatctatagtaaaaaatgacagtcagattcttgggacttcaaaaatttatctttctctcccttgtgttgcccttctcccatttatggttgattcagctatcatgctaaagcgtatctatcgttccacaccacctgaggtgatagtggaagtgctggagccctatgtccgccttactactgccaacgtccgtatcatcaagaacagaacaggccctatggggcatacctatggctttattgacctcgactcccatgcggaagctcttcgtgtggtgaagatcttacagaaccttgatccgccatttagcattgatgggaagatggtagctgtaaacctggccactggaaaacgaagaaatgattctggggaccattctgaccacatgcattactatcagggtaaaaaatatttccgagataggaggggaggtggcagaaattcagactggtcttcagatacaaatcgacaaggacaacagtcatcatctgactgctacatatatgattctgctactggctactattatgaccccttggcaggaacttattatgaccccaatacccagcaagaagtctatgtgccccaggatcctggattacctgaggaagaagagatcaaggaaaaaaaacccaccagtcaaggaaagtcaagtagcaagaaggaaatgtctaaaagagatggcaaggagaaaaaagacagaggagtgacgaggtttcaggaaaatgccagtgaagggaaggcccctgcagaagacgtctttaagaagcccctgcctcctactgtgaagaaggaagagagtccccctccacctaaagtggtaaacccactgatcggcctcttgggtgaatatggaggagacagtgactatgaggaggaagaagaggaggaacagacccctcccccacagccccgcacagcacagccccagaagcgagaggagcaaaccaagaaggagaatgaagaagacaaactcactgactggaataaactggcttgtctgctttgcagaaggcagtttcccaataaagaagttctgatcaaacaccagcagctgtcagacctgcacaagcaaaacctggaaatccaccggaagataaaacagtctgagcaggagctagcctatctggaaaggagagaacgagagggaaagtttaaaggaagaggaaatgatcgcagggaaaagctccagtcttttgactctccagaaaggaaacggattaagtactccagggaaactgacagtgatcgtaaacttgttgataaagaagatatcgacactagcagcaaaggaggctgtgtccaacaggctactggctggaggaaagggacaggcctgggatatggccatcctggattggcttcatcagaggaggctgaaggccggatgaggggccccagtgttggagcctcaggaagaaccagcaaaagacagtccaacgagacttatcgagatgctgttcgaagagtcatgtttgctcgatataaagaactcgattaagaaaggagacaagttccatgggatacaacctccctcttgttttgtttgtctctccttttcttttgttactgttcttgctgctagaacttttttaaataaactttttttcaatgtga

SEQ ID NO: 10602 - DNA, 1296 bp, Homo sapiens
atctagaggatccctgcactggtagatcgctcgaagaaatgattctggggaccattctgaccacatgcattactatcagggtaaaaaatatttccgagataggaggggaggtggcagaaattcagactggtcttcagatacaaatcgacaaggacaacagtcatcatctgactgctacatatatgattctgctactggctactattatgaccccttggcaggaacttattatgaccccaatacccagcaagaagtctatgtgccccaggatcctggattacctgaggaagaagagatcaaggaaaaaaaacccaccagtcaaggaaagtcaagtagcaagaaggaaatgtctaaaagagatggcaaggagaaaaaagacagaggagtgacgaggtttcaggaaaatgccagtgaagggaaggcccctgcagaagacgtctttaagaagcccctgcctcctactgtgaagaaggaagagagtccccctccacctaaagtggtaaacccactgatcggcctcttgggtgaatatggaggagacagtgactatgaggaggaagaagaggaggaacagacccctcccccacagccccgcacagcacagccccagaagcgagaggagcaaaccaagaaggagaatgaagaagacaaactcactgactggaataaactggcttgtctgctttgcagaaggcagtttcccaataaagaagttctgatcaaacaccagcagctgtcagacctgcacaagcaaaacctggaaatccaccggaagataaaacagtctgagcaggagctagcctatctggaaaggagagaacgagagggaaagtttaaaggaagaggaaatgatcgcagggaaaagctccagtcttttgactctccagaaaggaaacggattaagtactccagggaaactgacagtgatcgtaaacttgttgataaagaagatatcgacactagcagcaaaggaggctgtgtccaacaggctactggctggaggaaagggacaggcctgggatatggccatcctggattggcttcatcagaggaggctgaaggccggatgaggggccccagtgttggagcctcaggaagaaccagcaaaagacagtccaacgagacttatcgagatgctgttcgaagagtcatgtttgctcgatataaagaactcgattaagaaaggagacaagttccatgggatacaacctccctcttgttttgtttgtctctccttttcttttgttactgttcttgctgctagaacttttttaaataaactttttttcaatgtga

SEQ ID NO: 10603 - DNA, 3765 bp, Homo sapiens
agtaagagtctgcgggaccggcagctgtacttcatctcccagcgggccgagcgctgaaggcagcggcgcggcgcctttgtggtagcagtggccccgcgcggaggaagttccggtgtccgcggcgctgggtcggtggcggaggctgaggagaaggaggagcgggccgtggaggcttcgccgcctaggtactgctataaccagaatttggtagaaaaaggatttacttgttggggccctcttgataaaaagagatgtggggggattctcgacctgctaacagaactggaccttttcgtgggagccaagaagaaaggtttgctcccgggtggaacagggattatcctcctcctccccttaagagtcatgctcaagagagacactctggcaactttcctggcagagattcacttccctttgatttccaggggcattcggggcctccttttgcaaatgtagaggagcattctttcagctatggagctagagacggaccgcatggtgactatcgaggaggggagggacctggacatgatttcagggggggagatttttcgtcttctgatttccagagcagagattcatcacagttggacttcaggggtagggacatacattctggggattttcgggatagagaaggaccacctatggactataggggtggagatggtacttctatggattatagaggtagggaggcacctcatatgaactacagagacagggatgctcacgctgttgacttcagaggtagggatgctcctccatctgacttcaggggccggggcacttatgatttagattttagaggccgggatggatcccatgcagattttaggggaagggatttatcagatttggattttagggccagagaacagtcccgttctgattttaggaatagagatgtatctgatttggactttagagacaaagacggaacacaagtagactttagaggccgaggttcaggtactactgatctagactttagggacagggatacgccacattcagatttcagaggtagacaccgatctaggactgatcaggattttaggggcagagagatgggatcttgtatggaatttaaagatagggagatgccccctgtggatccaaatattttggattacattcagccctctacacaagatagagaacattctggtatgaatgtgaacaggagagaagaatccacacatgaccatacgatagaaaggcctgcttttggcattcagaagggagaatttgagcattcagaaacaagagaaggagaaacacaaggtgtagcctttgaacatgagtctccagcagactttcagaacagccaaagtccagttcaagaccaagataagtcacagctttctggacgtgaagagcagagttcagatgctggtctgtttaaagaagaaggcggtctggactttcttgggcggcaagacaccgattacagaagcatggagtaccgtgatgtggatcataggctgccaggaagccagatgtttggctatggccagagcaagtcttttccagagggcaaaactgcccgagatgcccaacgggaccttcaggatcaagattataggaccggcccaagtgaggagaaacccagcaggcttattcgattaagtggggtacctgaagatgccacaaaagaagagattcttaatgcttttcggactcctgatggcatgcctgtaaagaacttgcagttgaaggagtataacacaggttacgactatggctatgtctgcgtggagttttcactcttggaagatgccatcggatgcatggaggccaaccagggaactctaatgatccaggacaaagaagttaccctggagtatgtatcaagcctggatttttggtactgcaaacgatgtaaggcaaacattggtgggcaccgatcttcctgttcattctgcaagaacccaagagaagtgacagaggccaagcaagaattaataacctaccctcagcctcagaaaacatccataccagcaccattggaaaaacagcccaaccagcccctaagaccagctgataaggaacctgaacccaggaagagggaagaaggccaagagtcacgcttaggacatcaaaagagagaagcagaaaggtatctgcctccttctcgaagggaagggccaactttccgaagagaccgagagagggagtcatggtctggagagacacgccaggatggagagagcaaaactatcatgctaaagcgtatctatcgttccacaccacctgaggtgatagtggaagtgctggagccctatgtccgccttactactgccaacgtccgtatcatcaagaacagaacaggccctatggggcatacctatggctttattgacctcgactcccatgcggaagctcttcgtgtggtgaagatcttacagaaccttgatccgccatttagcattgatgggaagatggtagctgtaaacctggccactggaaaacgaagaaatgattctggggaccattctgaccacatgcattactatcagggtaaaaaatatttccgagataggaggggaggtggcagaaattcagactggtcttcagatacaaatcgacaaggacaacagtcatcatctgactgctacatatatgattctgctactggctactattatgaccccttggcaggaacttattatgaccccaatacccagcaagaagtctatgtgccccaggatcctggattacctgaggaagaagagatcaaggaaaaaaaacccaccagtcaaggaaagtcaagtagcaagaaggaaatgtctaaaagagatggcaaggagaaaaaagacagaggagtgacgaggtttcaggaaaatgccagtgaagggaaggcccctgcagaagacgtctttaagaagcccctgcctcctactgtgaagaaggaagagagtccccctccacctaaagtggtaaacccactgatcggcctcttgggtgaatatggaggagacagtgactatgaggaggaagaagaggaggaacagacccctcccccacagccccgcacagcacagccccagaagcgagaggagcaaaccaagaaggagaatgaagaagacaaactcactgactggaataaactggcttgtctgctttgcagaaggcagtttcccaataaagaagttctgatcaaacaccagcagctgtcagacctgcacaagcaaaacctggaaatccaccggaagataaaacagtctgagcaggagctagcctatctggaaaggagagaacgagagggaaagtttaaaggaagaggaaatgatcgcagggaaaagctccagtcttttgactctccagaaaggaaacggattaagtactccagggaaactgacaggaagtgatggtgtctgcttcttttgctgatcgtaaacttgttgataaagaagatatcgacactagcagcaaaggaggctgtgtccaacaggctactggctggaggaaagggacaggcctgggatatggccatcctggattggcttcatcagaggaggctgaaggccggatgaggggccccagtgttggagcctcaggaagaaccagcaaaagacagtccaacgagacttatcgagatgctgttcgaagagtcatgtttgctcgatataaagaactcgattaagaaaggagacaagttccatgggatacaacctccctcttgttttgtttgtctctccttttcttttgttactgttcttgctgctagaacttttttaaataaactttttttcaatgtga

SEQ ID NO: 10604 - DNA, 3301 bp, Homo sapiens
agtaagagtctgcgggaccggcagctgtacttcatctcccagcgggccgagcgctgaaggcagcggcgcggcgcctttgtggtagcagtggccccgcgcggaggaagttccggtgtccgcggcgctgggtcggtggcggaggctgaggagaaggaggagcgggccgtggaggcttcgccgcctaggtactgctataaccagaatttggtagaaaaaggatttacttgttggggccctcttgataaaaagagatgtggggggattctcgacctgctaacagaactggaccttttcgtgggagccaagaagaaaggtttgctcccgggtggaacagggattatcctcctcctccccttaagagtcatgctcaagagagacactctggcaactttcctggcagagattcacttccctttgatttccaggggcattcggggcctccttttgcaaatgtagaggagcattctttcagctatggagctagagacggaccgcatggtgactatcgaggaggggagggacctggacatgatttcagggggggagatttttcgtcttctgatttccagagcagagattcatcacagttggacttcaggggtagggacatacattctggggattttcgggatagagaaggaccacctatggactataggggtggagatggtacttctatggattatagaggtagggaggcacctcatatgaactacagagacagggatgctcacgctgttgacttcagaggtagggatgctcctccatctgacttcaggggccggggcacttatgatttagattttagaggccgggatggatcccatgcagattttaggggaagggatttatcagatttggattttagggccagagaacagtcccgttctgattttaggaatagagatgtatctgatttggactttagagacaaagacggaacacaagtagactttagaggccgaggttcaggtactactgatctagactttagggacagggatacgccacattcagatttcagaggtagacaccgatctaggactgatcaggattttaggggcagagagatgggatcttgtatggaatttaaagatagggagatgccccctgtggatccaaatattttggattacattcagccctctacacaagatagagaacattctggtatgaatgtgaacaggagagaagaatccacacatgaccatacgatagaaaggcctgcttttggcattcagaagggagaatttgagcattcagaaacaagagaaggagaaacacaaggtgtagcctttgaacatgagtctccagcagactttcagaacagccaaagtccagttcaagaccaagataagtcacagctttctggacgtgaagagcagagttcagatgctggtctgtttaaagaagaaggcggtctggactttcttgggcggcaagacaccgattacagaagcatggagtaccgtgatgtggatcataggctgccaggaagccagatgtttggctatggccagagcaagtcttttccagagggcaaaactgcccgagatgcccaacgggaccttcaggatcaagattataggaccggcccaagtgaggagaaacccagcaggcttattcgattaagtggggtacctgaagatgccacaaaagaagagattcttaatgcttttcggactcctgatggcatgcctgtaaagaacttgcagttgaaggagtataacacaggttacgactatggctatgtctgcgtggagttttcactcttggaagatgccatcggatgcatggaggccaaccagggaactctaatgatccaggacaaagaagttaccctggagtatgtatcaagcctggatttttggtactgcaaacgatgtaaggcaaacattggtgggcaccgatcttcctgttcattctgcaagaacccaagagaagtgacagaggccaagcaagaattaataacctaccctcagcctcagaaaacatccataccagcaccattggaaaaacagcccaaccagcccctaagaccagctgataaggaacctgaacccaggaagagggaagaaggccaagagtcacgcttaggacatcaaaagagagaagcagaaaggtatctgcctccttctcgaagggaagggccaactttccgaagagaccgagagagggagtcatggtctggagagacacgccaggatggagagagcaaaactatcatgctaaagcgtatctatcgttccacaccacctgaggtgatagtggaagtgctggagccctatgtccgccttactactgccaacgtccgtatcatcaagaacagaacaggccctatggggcatacctatggctttattgacctcgactcccatgcggaagctcttcgtgtggtgaagatcttacagaaccttgatccgccatttagcattgatgggaagatggtagctgtaaacctggccactggaaaacgaagaaatgattctggggaccattctgaccacatgcattactatcagggtaaaaaatatttccgagataggaggggaggtggcagaaattcagactggtcttcagatacaaatcgacaaggacaacagtcatcatctgactgctacatatatgattctgctactggctactattatgaccccttggcaggaacttattatgaccccaatacccagcaagaagtctatgtgccccaggatcctggattacctgaggaagaagagatcaaggaaaaaaaacccaccagtcaaggaaagtcaagtagcaagaaggaaatgtctaaaagagatggcaaggagaaaaaagacagaggagtgacgaggtttcaggaaaatgccagtgaagggaaggcccctgcagaagacgtctttaagaagcccctgcctcctactgtgaagaaggaagagagtccccctccacctaaagtggtaaacccactgatcggcctcttgggtgaatatggaggagacagtgactatgaggaggaagaagaggaggaacagacccctcccccacagccccgcacagcacagccccagaagcgagaggagcaaaccaagaaggagaatgaagaagacaaactcactgactggaataaactggcttgtctgctttgcagaaggcagtttcccaataaagaagttctgatcaaacaccagcagctgtcagacctgcacaagcaaaacctggaaatccaccggaagataaaacagtctgagcaggagctagcctatctggaaaggagagaacgagaggagggaacatgcgaaccggtactcccttgacc

SEQ ID NO: 10605 - DNA, 2337 bp, Homo sapiens
agtaagagtctgcgggaccggcagctgtacttcatctcccagcgggccgagcgctgaaggcagcggcgcggcgcctttgtggtagcagtggccccgcgcggaggaagttccggtgtccgcggcgctgggtcggtggcggaggctgaggagaaggaggagcgggccgtggaggcttcgccgcctaggtactgctataaccagaatttggtagaaaaaggatttacttgttggggccctcttgataaaaagagatgtggggggattctcgacctgctaacagaactggaccttttcgtgggagccaagaagaaaggtttgctcccgggtggaacagggattatcctcctcctccccttaagagtcatgctcaagagagacactctggcaactttcctggcagagattcacttccctttgatttccaggggcattcggggcctccttttgcaaatgtagaggagcattctttcagctatggagctagagacggaccgcatggtgactatcgaggaggggagggacctggacatgatttcagggggggagatttttcgtcttctgatttccagagcagagattcatcacagttggacttcaggggtagggacatacattctggggattttcgggatagagaaggaccacctatggactataggggtggagatggtacttctatggattatagaggtagggaggcacctcatatgaactacagagacagggatgctcacgctgttgacttcagaggtagggatgctcctccatctgacttcaggggccggggcacttatgatttagattttagaggccgggatggatcccatgcagattttaggggaagggatttatcagatttggattttagggccagagaacagtcccgttctgattttaggaatagagatgtatctgatttggactttagagacaaagacggaacacaagtagactttagaggccgaggttcaggtactactgatctagactttagggacagggatacgccacattcagatttcagaggtagacaccgatctaggactgatcaggattttaggggcagagagatgggatcttgtatggaatttaaagatagggagatgccccctgtggatccaaatattttggattacattcagccctctacacaagatagagaacattctggtatgaatgtgaacaggagagaagaatccacacatgaccatacgatagaaaggcctgcttttggcattcagaagggagaatttgagcattcagaaacaagagaaggagaaacacaaggtgtagcctttgaacatgagtctccagcagactttcagaacagccaaagtccagttcaagaccaagataagtcacagctttctggacgtgaagagcagagttcagatgctggtctgtttaaagaagaaggcggtctggactttcttgggcggcaagacaccgattacagaagcatggagtaccgtgatgtggatcataggctgccaggaagccagatgtttggctatggccagagcaagtcttttccagagggcaaaactgcccgagatgcccaacgggaccttcaggatcaagattataggaccggcccaagtgaggagaaacccagcaggcttattcgattaagtggggtacctgaagatgccacaaaagaagagattcttaatgcttttcggactcctgatggcatgcctgtaaagaacttgcagttgaaggagtataacacaggttacgactatggctatgtctgcgtggagttttcactcttggaagatgccatcggatgcatggaggccaaccagggaactctaatgatccaggacaaagaagttaccctggagtatgtatcaagcctggatttttggtactgcaaacgatgtaaggcaaacattggtgggcaccgatcttcctgttcattctgcaagaacccaagagaagtgacagaggccaagcaagaattaataacctaccctcagcctcagaaaacatccataccagcaccattggaaaaacagcccaaccagcccctaagaccagctgataaggaacctgaacccaggaagagggaagaaggccaagagtcacgcttaggacatcaaaagagagaagcagaaaggtatctgcctccttctcgaagggaagggccaactttccgaagagaccgagagagggagtcatggtctggagagacacgccaggatggagagagcaaaactatcatgctaaagcgtatctatcgttccacaccacctgaggtgatagtggaagtgctggagccctatgtccgccttactactgccaaccgttgacaggggatccttatgagtcgac

SEQ ID NO: 10606 - DNA, 379 bp, Homo sapiens
tttttttttttgagatggagttttgctctttgttgcccaggctggagtgaagtggcacgatcttggctcactgcaacctccatctcccaggttcaagcgattctcctgacccagccgcatgagtaactgggattacaggagcccaccaccacacccggctaatttttgtatttttagaagagacagggtttcactatgttggccaggctggtctcgaactcctgacctcgtgatctacccgcctctgcctcccaaagtgctgagattacaggcgtgagccaccgcaccccgccagtgtttcttaaagagttagcatatttaaagaattggatgttttgggcttaatttcttattttttccctgggattcttagagaccc

SEQ ID NO: 10607 - DNA, 443 bp, Homo sapiens
cctgtgatcaattaagcagctgaccaatcattacctcctcttccctgctctttctacccagtaaatacaaagggctgtagaagctcagagctgctgcttttgctcagtagaagcagggagtcctcttcttcttcccccgaccccttcttttaaaacagtttcttttaagttttcatttctgcgttcatcctccttcattcagtcccgtagtaaccgtggcaaaccacggcacttcaaaacctcataaaaagcaccacatattgcttatttggatacatatgttgtaaatgtgtgaaaacatgcatgggaatgacaaataccaaagtcaggatagtgactggccatggggaagggatggttattattgtcgtcttatatcttcaattccaaatgagccacgggcttaaaagtacttcattgaataaaaaaaaaccaacaatgta

SEQ ID NO: 10608 - DNA, 426 bp, Homo sapiens
tgcgccaaggtctcactctgttgcccaggctggagtgcaatggtgtaaccattgcactttgtagccttggcctcctgggctcaaggatcctcctgcctcacattccagagcagctgggattacaggcacatgccaccatgtccagttaattttttctattttttcgtagagttggggtttcaccatgttgcccaggctggtctcgaactcctaagctcaggcaatctacctgccttggcctcctaacgtgttacgattacagtgattaatatttcaaatagattatcctgaaaaaaaaaaaaaaagataaaacttaccttttaaggctatagtttcttttgactatttctctccttctccattcttgtttgtttgttttttgagacggagtctcgctctgttgcccagtctggagtgcagtggcac

SEQ ID NO: 10609 - DNA, 1991 bp, Homo sapiens
gtgcggtggagcgaaatttgaagcaagcggaggcgcgggggcgcgtctacgaagccggacctgtagcagtttctttggctgcctgggccccttgagtccagccatcatgcctatccgtgctctgtgcactatctgctccgacttcttcgatcactcccgcgacgtggccgccatccactgcggccacaccttccacttgcagtgcctaattcagtggtttgagacagcaccaagtcggacctgcccacagtgccgaatccaggttggcaaaagaaccattatcaataagctcttctttgatcttgcccaggaggaggagaatgtcttggatgcagaattcttaaagaatgaactggacaatgtcagagcccagctttcccagaaagacaaggagaaacgagacagccaggtcatcatcgacactctgcgggatacgctggaagaacgcaatgctactgtggtatctctgcagcaggccttgggcaaggccgagatgctgtgctccacactgaaaaagcagatgaagtacttagagcagcagcaggatgagaccaaacaagcacaagaggaggcccgccggctcaggagcaagatgaagaccatggagcagattgagcttctactccagagccagcgccctgaggtggaggagatgatccgagacatgggtgtgggacagtcagcggtggaacagctggctgtgtactgtgtgtctctcaagaaagagtacgagaatctaaaagaggcacggaaggcctcaggggaggtggctgacaagctgaggaaggatttgttttcctccagaagcaagttgcagacagtctactctgaattggatcaggccaagttagaactgaagtcagcccagaaggacttacagagtgctgacaaggaaatcatgagcctgaaaaagaagctaacgatgctgcaggaaaccttgaacctgccaccagtggccagtgagactgtcgaccgcctggttttagagagcccagcccctgtggaggtgaatctgaagctccgccggccatccttccgtgatgatattgatctcaatgctacctttgatgtggatactcccccagcccggccctccagctcccagcatggttactacgaaaaactttgcctagagaagtcacactccccaattcaggatgtccccaagaagatatgcaaaggccccaggaaggagtcccagctctcactgggtggccagagctgtgcaggagagccagatgaggaactggttggtgccttccctatttttgtccggaatgccatcctaggccagaaacagcccaagaggcccaggtcagagtcctcttgcagcaaagatgtggtaaggacaggcttcgatgggctcggtggccggacaaaattcatccagcctactgacacagtcatgatccgcccattgcctgttaagcccaagaccaaggttaagcagagggtgagggtgaagaccgtgccttctctcttccaggccaagctggacaccttcctgtggtcgtgagaacagtgagtctgaccaatggccagacacatgcctgcaacttgtaggtcaaggactgtccaggcaggggttttgtggacagagccctactttcgggaccagcctgaggtgtaagggcagacaaacaggtgagggtgagtgtgacacccagagactgctcttcctgccctcaccctgccccactcctacgactgggagctgacatgaccagcccactgatcctgtcagcaggtcctgctcctgttgccaggctcttgtttatagccatgatcagatgtggtcagactctttctgggcctggagaccacggtcacttgttgactgtctctgtggaccagagtgcttgaggcatctcaggcagcctcagcccaagcttctacctgcctttgacttgcttctagcatagcctgggccaagcagggtggggaatggaggatagacatgggatgtatggagaggatggaagattttcccg

SEQ ID NO: 10610 - DNA, 953 bp, Homo sapiens
gtgcggtggagcgaaatttgaagcaagcggaggcgcgggggcgcgtctacgaagccggacctgtagcagtttctttggctgcctgggccccttgagtccagccatcatgcctatccgtgctctgtgcactatctgctccgacttcttcgatcactcccgcgacgtggccgccatccactgcggccacaccttccacttgcagtgcctaattcagtggtttgagacagcaccaagtcggacctgcccacagtgccgaatccaggttggcaaaagaaccattatcaataagctcttctttgatcttgcccaggaggaggagaatgtcttggatgcagaattcttaaagttgcagacagtctactctgaattggatcaggccaagttagaactgaagtcagcccagaaggacttacagagtgctgacaaggaaatcatgagcctgaaaaagaagctaacgatgctgcaggaaaccttgaacctgccaccagtggccagtgagactgtcgaccgcctggttttagagagcccagcccctgtggaggtgaatctgaagctccgccggccatccttccgtgatgatattgatctcaatgctacctttgatgtggatactcccccagcccggccctccagctcccagcatggttactacgaaaaactttgcctagagaagtcacactccccaattcaggatgtccccaagaagatatgcaaaggccccaggaaggagtcccagctctcactgggtggccagagctgtgcaggagagccagatgaggaactggttggtgccttccctatttttgtccggaatgccatcctaggccagaaacagcccaagaggcccaggtcagagtcctcttgcagcaaagatgtggtaaggacaggcttcgatgggctcggtggccggacaaaattcatccagcctgtttcctttttctgttaagttgagc

SEQ ID NO: 10611 - DNA, 1972 bp, Homo sapiens
cccgggaaaaaattcccggatgggcgtctacgaagccggacctgtagcagtttctttggctgcctgggccccttgagtccagccatcatgcctatccgtgctctgtgcactatctgctccgacttcttcgatcactcccgcgacgtggccgccatccactgcggccacaccttccacttgcagtgcctaattcagtggtttgagacagcaccaagtcggacctgcccacagtgccgaatccaggttggcaaaagaaccattatcaataagctcttctttgatcttgcccaggaggaggagaatgtcttggatgcagaattcttaaagaatgaactggacaatgtcagagcccagctttcccagaaagacaaggagaaacgagacagccaggtcatcatcgacactctgcgggatacgctggaagaacgcaatgctactgtggtatctctgcagcaggccttgggcaaggccgagatgctgtgctccacactgaaaaagcagatgaagtacttagagcagcagcaggatgagaccaaacaagcacaagaggaggcccgccggctcaggagcaagatgaagaccatggagcagattgagcttctactccagagccagcgccctgaggtggaggagatgatccgagacatgggtgtgggacagtcagcggtggaacagctggctgtgtactgtgtgtctctcaagaaagagtacgagaatctaaaagaggcacggaaggcctcaggggaggtggctgacaagctgaggaaggatttgttttcctccagaagcaagttgcagacagtctactctgaattggatcaggccaagttagaactgaagtcagcccagaaggacttacagagtgctgacaaggaaatcatgagcctgaaaaagaagctaacgatgctgcaggaaaccttgaacctgccaccagtggccagtgagactgtcgaccgcctggttttagagagcccagcccctgtggaggtgaatctgaagctccgccggccatccttccgtgatgatattgatctcaatgctacctttgatgtggatactcccccagcccggccctccagctcccagcatggttactacgaaaaactttgcctagagaagtcacactccccaattcaggatgtccccaagaagatatgcaaaggccccaggaaggagtcccagctctcactgggtggccagagctgtgcaggagagccagatgaggaactggttggtgccttccctatttttgtccggaatgccatcctaggccagaaacagcccaagaggcccaggtcagagtcctcttgcagcaaagatgtggtaaggacaggcttcgatgggctcggtggccggacaaaattcatccagcctactgacacagtcatgatccgcccattgcctgttaagcccaagaccaaggttaagcagagggtgagggtgaagaccgtgccttctctcttccaggccaagctggacaccttcctgtggtcgtgagaacagtgagtctgaccaatggccagacacatgcctgcaacttgtaggtcaaggactgtccaggcaggggttttgtggacagagccctactttcgggaccagcctgaggtgtaagggcagacaaacaggtgagggtgagtgtgacacccagagactgctcttcctgccctcaccctgccccactcctacgactgggagctgacatgaccagcccactgatcctgtcagcaggtcctgctcctgttgccaggctcttgtttatagccatgatcagatgtggtcagactctttctgggcctggagaccacggtcacttgttgactgtctctgtggaccagagtgcttgaggcatctcaggcagcctcagcccaagcttctacctgcctttgacttgcttctagcatagcctgggccaagcagggtggggaatggaggatagacatgggatgtatggagaggatggaagattttcccg

SEQ ID NO: 10612 - DNA, 1924 bp, Homo sapiens
cccgggaaaaaattcccggatgggcgtctacgaagccggacctgtagcagtttctttggctgcctgggccccttgagtccagccatcatgcctatccgtgctctgtgcactatctgctccgacttcttcgatcactcccgcgacgtggccgccatccactgcggccacaccttccacttgcagtgcctaattcagtggtttgagacagcaccaagtcggacctgcccacagtgccgaatccaggaggaggagaatgtcttggatgcagaattcttaaagaatgaactggacaatgtcagagcccagctttcccagaaagacaaggagaaacgagacagccaggtcatcatcgacactctgcgggatacgctggaagaacgcaatgctactgtggtatctctgcagcaggccttgggcaaggccgagatgctgtgctccacactgaaaaagcagatgaagtacttagagcagcagcaggatgagaccaaacaagcacaagaggaggcccgccggctcaggagcaagatgaagaccatggagcagattgagcttctactccagagccagcgccctgaggtggaggagatgatccgagacatgggtgtgggacagtcagcggtggaacagctggctgtgtactgtgtgtctctcaagaaagagtacgagaatctaaaagaggcacggaaggcctcaggggaggtggctgacaagctgaggaaggatttgttttcctccagaagcaagttgcagacagtctactctgaattggatcaggccaagttagaactgaagtcagcccagaaggacttacagagtgctgacaaggaaatcatgagcctgaaaaagaagctaacgatgctgcaggaaaccttgaacctgccaccagtggccagtgagactgtcgaccgcctggttttagagagcccagcccctgtggaggtgaatctgaagctccgccggccatccttccgtgatgatattgatctcaatgctacctttgatgtggatactcccccagcccggccctccagctcccagcatggttactacgaaaaactttgcctagagaagtcacactccccaattcaggatgtccccaagaagatatgcaaaggccccaggaaggagtcccagctctcactgggtggccagagctgtgcaggagagccagatgaggaactggttggtgccttccctatttttgtccggaatgccatcctaggccagaaacagcccaagaggcccaggtcagagtcctcttgcagcaaagatgtggtaaggacaggcttcgatgggctcggtggccggacaaaattcatccagcctactgacacagtcatgatccgcccattgcctgttaagcccaagaccaaggttaagcagagggtgagggtgaagaccgtgccttctctcttccaggccaagctggacaccttcctgtggtcgtgagaacagtgagtctgaccaatggccagacacatgcctgcaacttgtaggtcaaggactgtccaggcaggggttttgtggacagagccctactttcgggaccagcctgaggtgtaagggcagacaaacaggtgagggtgagtgtgacacccagagactgctcttcctgccctcaccctgccccactcctacgactgggagctgacatgaccagcccactgatcctgtcagcaggtcctgctcctgttgccaggctcttgtttatagccatgatcagatgtggtcagactctttctgggcctggagaccacggtcacttgttgactgtctctgtggaccagagtgcttgaggcatctcaggcagcctcagcccaagcttctacctgcctttgacttgcttctagcatagcctgggccaagcagggtggggaatggaggatagacatgggatgtatggagaggatggaagattttcccg

SEQ ID NO: 10613 - DNA, 2080 bp, Homo sapiens
gtgcggtggagcgaaatttgaagcaagcggaggcgcgggggcgcgtctacgaagccggacctgtagcagtttctttggctgcctgggccccttgagtccagccatcatgcctatccgtgctctgtgcactatctgctccgacttcttcgatcactcccgcgacgtggccgccatccactgcggccacaccttccacttgcagtgcctaattcagtggtttgagacagcaccaagtcggacctgcccacagtgccgaatccaggttggcaaaagaaccattatcaataagctcttctttgatcttgcccaggaggaggagaatgtcttggatgcagaattcttaaagaatgaactggacaatgtcagagcccagctttcccagaaagggatgaggcactgaatccaagggcccaagttcttctgctgatggatggacaggcctttccctttcctccgccctctacccctgctccagacaaggagaaacgagacagccaggtcatcatcgacactctgcgggatacgctggaagaacgcaatgctactgtggtatctctgcagcaggccttgggcaaggccgagatgctgtgctccacactgaaaaagcagatgaagtacttagagcagcagcaggatgagaccaaacaagcacaagaggaggcccgccggctcaggagcaagatgaagaccatggagcagattgagcttctactccagagccagcgccctgaggtggaggagatgatccgagacatgggtgtgggacagtcagcggtggaacagctggctgtgtactgtgtgtctctcaagaaagagtacgagaatctaaaagaggcacggaaggcctcaggggaggtggctgacaagctgaggaaggatttgttttcctccagaagcaagttgcagacagtctactctgaattggatcaggccaagttagaactgaagtcagcccagaaggacttacagagtgctgacaaggaaatcatgagcctgaaaaagaagctaacgatgctgcaggaaaccttgaacctgccaccagtggccagtgagactgtcgaccgcctggttttagagagcccagcccctgtggaggtgaatctgaagctccgccggccatccttccgtgatgatattgatctcaatgctacctttgatgtggatactcccccagcccggccctccagctcccagcatggttactacgaaaaactttgcctagagaagtcacactccccaattcaggatgtccccaagaagatatgcaaaggccccaggaaggagtcccagctctcactgggtggccagagctgtgcaggagagccagatgaggaactggttggtgccttccctatttttgtccggaatgccatcctaggccagaaacagcccaagaggcccaggtcagagtcctcttgcagcaaagatgtggtaaggacaggcttcgatgggctcggtggccggacaaaattcatccagcctactgacacagtcatgatccgcccattgcctgttaagcccaagaccaaggttaagcagagggtgagggtgaagaccgtgccttctctcttccaggccaagctggacaccttcctgtggtcgtgagaacagtgagtctgaccaatggccagacacatgcctgcaacttgtaggtcaaggactgtccaggcaggggttttgtggacagagccctactttcgggaccagcctgaggtgtaagggcagacaaacaggtgagggtgagtgtgacacccagagactgctcttcctgccctcaccctgccccactcctacgactgggagctgacatgaccagcccactgatcctgtcagcaggtcctgctcctgttgccaggctcttgtttatagccatgatcagatgtggtcagactctttctgggcctggagaccacggtcacttgttgactgtctctgtggaccagagtgcttgaggcatctcaggcagcctcagcccaagcttctacctgcctttgacttgcttctagcatagcctgggccaagcagggtggggaatggaggatagacatgggatgtatggagaggatggaagattttcccg

SEQ ID NO: 10614 - DNA, 413 bp, Homo sapiens
gacaagatgtgtcctgctgagacccagagaaagacattgcagcaggtcctgccggatccctacaacccacggctgcgtccgggggttgctgcatttttcatcgtggaagattcttcctaagcaccctccctagacaggcacgcacgcggcgtggatgcacaggcttgcacctgctgctcacacccttgtcagccctggctactgtcaaacaggaactcttgggccgatgtcagcagcaaaaggaaccccacatctcattgtttcattttgtaatgtaaaattctctggtcaagaaactcttcagatgtttctggctatttttactgctctcctgtgaattgcctccttggagcctttgtccattttcctattgagagttgtttcaattaatttataacttttttgtttattaa

SEQ ID NO: 10615 - DNA, 400 bp, Homo sapiens
tttttttgggattttgggatgtttacatatccacaatgatgttatctcaggggacggaacccaagtctaaacaagaaaaccatttacgtttctgatacactttgtacacatagcctgagggtaattttctacaatattttaaagaattttgtgcatgtaacaaagctttgactacgttttgactgtgacgcatcaaatgaggtccggtgtgaaattttccacttgggtcttgtcggtgctcagaaaccttcagatttgaagcatttcagattttggattttccgatgagggaggctttcagaagggttgtggcaatatatgtcacaaggtggtgagggtctggaatagaataggagtgggtgggaatgtggtatatgaagaaagaagtagggcattgatg

SEQ ID NO: 10616 - DNA, 301 bp, Homo sapiens
aagcaacaactaaagggagaaatgcaatacccacttttcaataatagataaaactaccaggcagacgatcaacaaggaaatagaagacttaacactataaagcaactagaccttatagacacctagagaacattccacccaagaacatcagaatacatactcttcacaagtgcccgtaaaacattttcaaagataggccatgtattaggccataaaacaagccttataaaattaaaaggattgaaatcatacaaagtatgctctcccctcacaagggaattaaatgagaaattattaacag

SEQ ID NO: 10617 - DNA, 193 bp, Homo sapiens
cctgccgcggccccctctgtagcccgagctgctccgcgacgcgacggagccggcctcggacagagggagcggtcgcggcctcgcggcccgcgcgggctgacgagcggagagcgcgacgccgcgcggtccccgaggatccgcacgccgggcagcgcggcccgagcagcgcgagaagcagcgggcgggcgggcgg

SEQ ID NO: 10618 - DNA, 350 bp, Homo sapiens
gattctacaaaaagagtgtttcaaaagtgctcaatcataaaataggatcaaccctgtgagatgaatgtatgtatgacaaagaggtttctcagaatgcttctgtgtagtttttatgggaagatatttgattttccacagtaggcctcaaagttctccaaatatccacttgcagattatgcaaaaagagagattcaaaactgctcaatcaaaagataggttcaactctattagttgaaagaccacatcaccaagaagtttctcaggatgcttctttctagcagaatatgaagaaatcccgtttccaacgaaagcctcaaggatgtctgaatatctacttgcagacgtcgacg

SEQ ID NO: 10619 - DNA, 1484 bp, Homo sapiens
acccggaagcggcggagtagagcggagcctggcgggcgtgggaacccaggccccgccgaggcggccaggaggtgagatggcagctgggcaaaatgggcacgaagagtgggtgggcagcgcatacctgtttgtggagtcctcgctggacaaggtggtcctgtcggatgcctacgcgcacccccagcagaaggtggcagtgtacagggctctgcaggctgccttggcagagagcggcgggagcccggacgtgctgcagatgctgaagatccaccgcagcgacccgcagctgatcgtgcagctgcgattctgcgggcggcagccctgtggccgcttcctccgcgcctaccgcgagggggcgctgcgcgccgcgctgcagaggagcctggcggccgcgctcgcccagcactcggtgccgctgcaactggagctgcgcgccggcgccgagcggctggacgctttgctggcggacgaggagcgctgtttgagttgcatcctagcccagcagcccgaccggctccgggatgaagaactggctgagctggaggatgcgctgcgaaatctgaagtgcggctcgggggcccggggtggcgacggggaggtcgcttcggcccccttgcagcccccggtgccctctctgtcggaggtgaagccgccgccgccgccgccacctgcccagacttttctgttccagggtcagcctgtagtgaatcggccgctgagcctgaaggaccaacagacgttcgcgcgctctgtgggtctcaaatggcgcaaggtggggcgctcactgcagcgaggctgccgggcgctgcgggacccggcgctggactcgctggcctacgagtacgagcgcgagggactgtacgagcaggccttccagctgctgcggcgcttcgtgcaggccgagggccgccgcgccacgctgcagcgcctggtggaggcactcgaggagaacgagctcaccagcctggcagaggacttgctgggcctgaccgatcccaatggcggcctggcctagaccaggggtgcagccagcttttggagaacctggatggccttagggttccttctgcggctattgctgaacccctgtccatccacgggaccctgaaactccacttggcctatctgctggacctgctggggcagagttgattgccttccccaggagccagaccactgggggtgcatcattggggattctgcctcaggtactttgatagagtgtggggtgggggggacctgctttggagatcagcctcaccttctcccatcccagaagcggggcttacagccagcccttacagtttcactcatgaagcaccttgatctttggtgtcctggacttcatcctgggtgctgcagatactgcagtgaagtaaaacaggaatcaatcttgcctgcccccagctcacactcagcgtgggaccccgaatgttaagcaatgataataaagtataacacggattttgatgtgagaaatacaa

SEQ ID NO: 10620 - DNA, 2807 bp, Homo sapiens
tcattcccagccaggctcttcccaagcagtgctaaaggagagctaccttttccttccagttcagccccaagggaagggaaagtagtgcctctttcctattggctcaaccagagtcgcagcgttgattctcatgggtccaacttaagtcctataccccgccctgaactaatcactgcagaaatgtgaatggaatatgcagattggccaggtctggtacacaagcccgacctggaactagggagtgggacacaggcacatggattgagaagagggaggagggaagtccccaaaggtaagtcaggcttggggagagaatctgggtagatgcaaactacaggtgcccttcgaagtgaagacaggaggtttagtcttaggctgaggtcctccagaaatgctgggctcaagtctactcagaaggcaaggccaggatatgggtctggttggctttggggcatgggcaccatccagaatgaagatgtctcttgtccgcattggtaagagagacacacaggcctgagaaggaagcagagaagccccattgcaggatctgcctctgctccccctccactgtgaccttgggctctttctccaagaaggcagtggagggacagtcctcactgcaagcctggggcgggtgggactctgtacagagccaggagctcaaggggcttcctgtgagatggtgaactcctgtcccaagtatgccaaccagtggtggggacaactgaaccatgtgggacttgaggctactgtggtggggacagctgaaccacgtggggctgggtagttgtctccagggtggagggaggggggatgaactggatacctgactgtctgcatctccaggaggtgagatggcagctgggcaaaatgggcacgaagagtgggtgggcagcgcatacctgtttgtggagtcctcgctggacaaggtggtcctgtcggatgcctacgcgcacccccagcagaaggtggcagtgtacagggctctgcaggctgccttggcagcactccttgctcaagacccctccccagtacctacccttccaggcccccctttcccatctcagggcagaggccacaggaggctgaagcgggttgggggatctgttcgtggcctcagagcggcgagagcccctcttcttcccgagcagtgggagtcgcgcttggtggaggccgaagacctgagacctctcgccctcctctgccctgctggccgcctacccagacggcttgtttgcccagggcacacgcccccttttctgtgcttcgaagtccctctcttttgccaaccctcatttggggcgtgagagcgggggttaggtggcacccactctgtcttagggtgctccctgtgacagatcctggtcttctttctgggttattgctgtttgtatcccaattttgcttcccagctgggtactctggggtaactgcaccctaggtcaggggatgggacgcggggcttcaccacgggcttcgcccctcctccggccgtttggagaacggccgagcttggggaccgcccggcgcctgaccgcccgcctccgcagagagcggcgggagcccggacgtgctgcagatgctgaagatccaccgcagcgacccgcagctgatcgtgcagctgcgattctgcgggcggcagccctgtggccgcttcctccgcgcctaccgcgagggggcgctgcgcgccgcgctgcagaggagcctggcggccgcgctcgcccagcactcggtgccgctgcaactggagctgcgcgccggcgccgagcggctggacgctttgctggcggacgaggagcgctgtttgagttgcatcctagcccagcagcccgaccggctccgggatgaagaactggctgagctggaggatgcgctgcgaaatctgaagtgcggctcgggggcccggggtggcgacggggaggtcgcttcggcccccttgcagcccccggtgccctctctgtcggaggtgaagccgccgccgccgccgccacctgcccagacttttctgttccagggtcagcctgtagtgaatcggccgctgagcctgaaggaccaacagacgttcgcgcgctctgtgggtctcaaatggcgcaaggtggggcgctcactgcagcgaggctgccgggcgctgcgggacccggcgctggactcgctggcctacgagtacgagcgcgagggactgtacgagcaggccttccagctgctgcggcgcttcgtgcaggccgagggccgccgcgccacgctgcagcgcctggtggaggcactcgaggagaacgagctcaccagcctggcagaggacttgctgggcctgaccgatcccaatggcggcctggcctagaccaggggtgcagccagcttttggagaacctggatggccttagggttccttctgcggctattgctgaacccctgtccatccacgggaccctgaaactccacttggcctatctgctggacctgctggggcagagttgattgccttccccaggagccagaccactgggggtgcatcattggggattctgcctcaggtactttgatagagtgtggggtgggggggacctgctttggagatcagcctcaccttctcccatcccagaagcggggcttacagccagcccttacagtttcactcatgaagcaccttgatctttggtgtcctggacttcatcctgggtgctgcagatactgcagtgaagtaaaacaggaatcaatcttgcctgcccccagctcacactcagcgtgggaccccgaatgttaagcaatgataataaagtataacacggattttgatgtgagaaatacaa

SEQ ID NO: 10621 - DNA, 1504 bp, Homo sapiens
  misc_feature (29)..(29): n is a, c, g, or t
gaattatgctaagtagaggccggggtaantctggcgagggagctggagcctggctttctgtggaacccagtgcccgccgaggcggcaggaggtgagatggcagctgggcaaaatgggcacgaagagtgggtgggcagcgcatacctgtttgtggagtcctcgctggacaaggtggtcctgtcggatgcctacgcgcacccccagcagaaggtggcagtgtacagggctctgcaggctgccttggcagagagcggcgggagcccggacgtgctgcagatgctgaagatccaccgcagcgacccgcagctgatcgtgcagctgcgattctgcgggcggcagccctgtggccgcttcctccgcgcctaccgcgagggggcgctgcgcgccgcgctgcagaggagcctggcggccgcgctcgcccagcactcggtgccgctgcaactggagctgcgcgccggcgccgagcggctggacgctttgctggcggacgaggagcgctgtttgagttgcatcctagcccagcagcccgaccggctccgggatgaagaactggctgagctggaggatgcgctgcgaaatctgaagtgcggctcgggggcccggggtggcgacggggaggtcgcttcggcccccttgcagcccccggtgccctctctgtcggaggtgaagccgccgccgccgccgccacctgcccagacttttctgttccagggtcagcctgtagtgaatcggccgctgagcctgaaggaccaacagacgttcgcgcgctctgtgggtctcaaatggcgcaaggtggggcgctcactgcagcgaggctgccgggcgctgcgggacccggcgctggactcgctggcctacgagtacgagcgcgagggactgtacgagcaggccttccagctgctgcggcgcttcgtgcaggccgagggccgccgcgccacgctgcagcgcctggtggaggcactcgaggagaacgagctcaccagcctggcagaggacttgctgggcctgaccgatcccaatggcggcctggcctagaccaggggtgcagccagcttttggagaacctggatggccttagggttccttctgcggctattgctgaacccctgtccatccacgggaccctgaaactccacttggcctatctgctggacctgctggggcagagttgattgccttccccaggagccagaccactgggggtgcatcattggggattctgcctcaggtactttgatagagtgtggggtgggggggacctgctttggagatcagcctcaccttctcccatcccagaagcggggcttacagccagcccttacagtttcactcatgaagcaccttgatctttggtgtcctggacttcatcctgggtgctgcagatactgcagtgaagtaaaacaggaatcaatcttgcctgcccccagctcacactcagcgtgggaccccgaatgttaagcaatgataataaagtataacacggattttgatgtgagaaatacaa

SEQ ID NO: 10622 - DNA, 1955 bp, Homo sapiens
tcattcccagccaggctcttcccaagcagtgctaaaggagagctaccttttccttccagttcagccccaagggaagggaaagtagtgcctctttcctattggctcaaccagagtcgcagcgttgattctcatgggtccaacttaagtcctataccccgccctgaactaatcactgcagaaatgtgaatggaatatgcagattggccaggtctggtacacaagcccgacctggaactagggagtgggacacaggcacatggattgagaagagggaggagggaagtccccaaaggtaagtcaggcttggggagagaatctgggtagatgcaaactacaggtgcccttcgaagtgaagacaggaggtttagtcttaggctgaggtcctccagaaatgctgggctcaagtctactcagaaggcaaggccaggatatgggtctggttggctttggggcatgggcaccatccagaatgaagatgtctcttgtccgcattggtaagagagacacacaggcctgagaaggaagcagagaagccccattgcaggatctgcctctgctccccctccactgtgaccttgggctctttctccaagaaggcagtggagggacagtcctcactgcaagcctggggcgggtgggactctgtacagagccaggagctcaaggggcttcctgtgagatggtgaactcctgtcccaagtatgccaaccagtggtggggacaactgaaccatgtgggacttgaggctactgtggtggggacagctgaaccacgtggggctgggtagttgtctccagggtggagggaggggggatgaactggatacctgactgtctgcatctccaggaggtgagatggcagctgggcaaaatggcactcggtgccgctgcaactggagctgcgcgccggcgccgagcggctggacgctttgctggcggacgaggagcgctgtttgagttgcatcctagcccagcagcccgaccggctccgggatgaagaactggctgagctggaggatgcgctgcgaaatctgaagtgcggctcgggggcccggggtggcgacggggaggtcgcttcggcccccttgcagcccccggtgccctctctgtcggaggtgaagccgccgccgccgccgccacctgcccagacttttctgttccagggtcagcctgtagtgaatcggccgctgagcctgaaggaccaacagacgttcgcgcgctctgtgggtctcaaatggcgcaaggtggggcgctcactgcagcgaggctgccgggcgctgcgggacccggcgctggactcgctggcctacgagtacgagcgcgagggactgtacgagcaggccttccagctgctgcggcgcttcgtgcaggccgagggccgccgcgccacgctgcagcgcctggtggaggcactcgaggagaacgagctcaccagcctggcagaggacttgctgggcctgaccgatcccaatggcggcctggcctagaccaggggtgcagccagcttttggagaacctggatggccttagggttccttctgcggctattgctgaacccctgtccatccacgggaccctgaaactccacttggcctatctgctggacctgctggggcagagttgattgccttccccaggagccagaccactgggggtgcatcattggggattctgcctcaggtactttgatagagtgtggggtgggggggacctgctttggagatcagcctcaccttctcccatcccagaagcggggcttacagccagcccttacagtttcactcatgaagcaccttgatctttggtgtcctggacttcatcctgggtgctgcagatactgcagtgaagtaaaacaggaatcaatcttgcctgcccccagctcacactcagcgtgggaccccgaatgttaagcaatgataataaagtataacacggattttgatgtgagaaatacaa

SEQ ID NO: 10623 - DNA, 2889 bp, Homo sapiens
tcattcccagccaggctcttcccaagcagtgctaaaggagagctaccttttccttccagttcagccccaagggaagggaaagtagtgcctctttcctattggctcaaccagagtcgcagcgttgattctcatgggtccaacttaagtcctataccccgccctgaactaatcactgcagaaatgtgaatggaatatgcagattggccaggtctggtacacaagcccgacctggaactagggagtgggacacaggcacatggattgagaagagggaggagggaagtccccaaaggtaagtcaggcttggggagagaatctgggtagatgcaaactacaggtgcccttcgaagtgaagacaggaggtttagtcttaggctgaggtcctccagaaatgctgggctcaagtctactcagaaggcaaggccaggatatgggtctggttggctttggggcatgggcaccatccagaatgaagatgtctcttgtccgcattggtaagagagacacacaggcctgagaaggaagcagagaagccccattgcaggatctgcctctgctccccctccactgtgaccttgggctctttctccaagaaggcagtggagggacagtcctcactgcaagcctggggcgggtgggactctgtacagagccaggagctcaaggggcttcctgtgagatggtgaactcctgtcccaagtatgccaaccagtggtggggacaactgaaccatgtgggacttgaggctactgtggtggggacagctgaaccacgtggggctgggtagttgtctccagggtggagggaggggggatgaactggatacctgactgtctgcatctccaggaggtgagatggcagctgggcaaaatgggcacgaagagtgggtgggcagcgcatacctgtttgtggagtcctcgctggacaaggtggtcctgtcggatgcctacgcgcacccccagcagaaggtggcagtgtacagggctctgcaggctgccttggcagcactccttgctcaagacccctccccagtacctacccttccaggcccccctttcccatctcagggcagaggccacaggaggctgaagcgggttgggggatctgttcgtggcctcagagcggcgagagcccctcttcttcccgagcagtgggagtcgcgcttggtggaggccgaagacctgagacctctcgccctcctctgccctgctggccgcctacccagacggcttgtttgcccagggcacacgcccccttttctgtgcttcgaagtccctctcttttgccaaccctcatttggggcgtgagagcgggggttaggtggcacccactctgtcttagggtgctccctgtgacagatcctggtcttctttctgggttattgctgtttgtatcccaattttgcttcccagctgggtactctggggtaactgcaccctaggtcaggggatgggacgcggggcttcaccacgggcttcgcccctcctccggccgtttggagaacggccgagcttggggaccgcccggcgcctgaccgcccgcctccgcagagagcggcgggagcccggacgtgctgcagatgctgaagatccaccgcagcgacccgcagctgatcgtgcagctgcgattctgcgggcggcagccctgtggccgcttcctccgcgcctaccgcgagggggcgctgcgcgccgcgctgcagaggagcctggcggccgcgctcgcccagcactcggtgccgctgcaactggagctgcgcgccggcgccgagcggctggacgctttgctggcggacgaggagcgctgtttgagttgcatcctagcccagcaggtgcggccgggctagggtcaggatggggtagggcggggatccgcggttaagtcccccgtgacggcacgttccattcccctagcccgaccggctccgggatgaagaactggctgagctggaggatgcgctgcgaaatctgaagtgcggctcgggggcccggggtggcgacggggaggtcgcttcggcccccttgcagcccccggtgccctctctgtcggaggtgaagccgccgccgccgccgccacctgcccagacttttctgttccagggtcagcctgtagtgaatcggccgctgagcctgaaggaccaacagacgttcgcgcgctctgtgggtctcaaatggcgcaaggtggggcgctcactgcagcgaggctgccgggcgctgcgggacccggcgctggactcgctggcctacgagtacgagcgcgagggactgtacgagcaggccttccagctgctgcggcgcttcgtgcaggccgagggccgccgcgccacgctgcagcgcctggtggaggcactcgaggagaacgagctcaccagcctggcagaggacttgctgggcctgaccgatcccaatggcggcctggcctagaccaggggtgcagccagcttttggagaacctggatggccttagggttccttctgcggctattgctgaacccctgtccatccacgggaccctgaaactccacttggcctatctgctggacctgctggggcagagttgattgccttccccaggagccagaccactgggggtgcatcattggggattctgcctcaggtactttgatagagtgtggggtgggggggacctgctttggagatcagcctcaccttctcccatcccagaagcggggcttacagccagcccttacagtttcactcatgaagcaccttgatctttggtgtcctggacttcatcctgggtgctgcagatactgcagtgaagtaaaacaggaatcaatcttgcctgcccccagctcacactcagcgtgggaccccgaatgttaagcaatgataataaagtataacacggattttgatgtgagaaatacaa

SEQ ID NO: 10624 - DNA, 468 bp, Homo sapiens
ctactactactaaattcgcggccctcgactggatggccttagggttccttctgcggctattgctgaacccctgtccatccacgggaccctgaaactccacttggcctatctgctggacctgctggggcagagttgattgccttccccaggagccagaccactgggggtgcatcattggggattctgcctcaggtactttgatagagtgtggggtgggggggacctgctttggagatcagcctcaccttctcccatcccagaagcggggcttacagccagcccttacagtttcactcatgaagcaccttgatctttggtgtcctggacttcatcctgggtgctgcagatactgcagtgaagtaaaacaggaatcaatcttgcctgcccccagctcacactcagcgtgggaccccgaatgttaagcaatgataataaagtataacacggattttgatgtgagaaatacaa

SEQ ID NO: 10625 - DNA, 2631 bp, Homo sapiens
ttgcattgtcaggtaaattgcctttttttctgtgggacgtcatcaaaaaggcttgaaaaacactgctggaatcaatttatcctgttttctattcttctgaatgctaattttttttccttgagccattctactttcatttcaatcatgaaatatttccaactggccttgattaatgctttaacttttcaaagaaaaaacacccacacacatctcagtagaaaatatggtgaactgaagatgatatttggttttcaaaagaaaagtttggccaaatgttctgcattgcatttctgaggcacacacaggagcgggtgccagggtatttgactgtaggtaagtgaacaaggagctatacagatagaatggcacggggtttgacagtaatcagaacaccacatcagaacacttgattgcacttcaactctcatgctgtgtttgccccaaataatcttaaaaattgtgactatatcgaataagttcacaatacttattaggatgtggtgaaactgaattatttgaagtaggaagacccgaagttcttcgcctatgagactggtgaagtgatttgtagccaacatgctccaacccatctattaagaaaactatggcatctattaagaaaattcaaaatcttaaacagagaaatccatatttagaaaacatggccagattaaatagggggtgggttattttcttaaatacgttttgtcaatttcacgtgaaaaatgaaaacccctagttcatgttacatattacatttctgttaagatgtatgttcctctgtttctaatagaagttgtggtggtttggaagtgaaaattgaatgtgagcacaggccatgtaaaggaaggagaaagtgtaaatgttaataacaggaaaactgaatttagctctcatgaggcagtcaaggaaatcattcattgaacatgttgggaaatacttttcatttggtgaccaaatacctacaaattcatttacaaaaaagaaaaatgaaagttacctcagaactaaactcagaaatatgtcccacatgggttcttgtaatgtttcttggtgaatgtctttatagaaagaagtgggcatgaaatgatgactcagtaattaaacacatgggggaagggaggctgtagaaaacactggattctatatttaaaatttcattcagttcactaatttgtttttactgaccaaagctttctatacctatgtagagtgtctgagaactagaagggcccatcagttgccactcggatgatccttttgtctcttttcagataaggccccagttcaacagcgtcctctgtgtcaatcagatactcccaggaatgagtgagccctgccgttttcccaagttgcccctcagcacattccagccagttccaaaacttttggcttgtttttgacacaaggccagataagctactcaaactggtttttttaaaaaaagaaaacaaccccaatctatattccttttttaatactgtgtacataacctgctgctcgaaagactaggttttcccctttccagctagttgtgttgtttctttatgtagacagctttaaatcatgtttacatgattcagccattttaaacaacctcttcctatttttttttcctttttgtacaaaaaaaaaaaaaagaagaagaaagaaagcaactaactaaaacctttcctttcaaggatttatgcagcataggatagggcaaccacaagtaaacacaaacatcacgtgagccttcttaaagaaaacatttccagaaatcactccaatgtcttaaaaaacacacaaaataaaacctttctccactgcagtttaactgtggcaatgagttgcagacgatcaccaacactgaaacttaatttagcttttttctctcctctccaatcataaaaagtctctttttggttcttcatgcaggagctattttctttcttttctggcctctaacaggaaaacagagtttctagccgagctgctcctgaggtattaaaagtgatgttcgtgtcatgcggatcaatcctgcccaaacattagtgtgcatgcaaatcacctggcagtcttattaaatgcagaatctgattccatgaggtccatgttgtccgtggaccaaacttgcagtagtagcgaggagtctagaagacgtccatgttatagaaattgaacccaggaaaggatttggggcttatgaagctaacaaaagcacgtaaaacccagcctgagaaacagtagctacacccagctcttgttgctattctggaaccaaataatgcaaaatatgctcgagacacatctcagttcttgcttgcttgactttctgagtgtctctctggcacaagggcctgtcatttgaattcccatcccccacctcatccccatgtattattccactggatatcccaaatatctagagtttcaaaacccaaatgatcccatttggccagagccttttttatgagtatgctaatgttatctgtgtatgaagcacacaaacttttccaggatacccggctatctattaatccttcagcacggacgttctccatggtaacagtctgacctataagatctaatgcctttcccagggggctcagaatcccatgagtttgggttaaatctgccataacatct

SEQ ID NO: 10626 - DNA, 598 bp, Homo sapiens
ttttttttttttttaagatagccagtaacttggttttcttcccctaaggaaacattacgcacctcagagaaacaaggaaaaattttaaacagatactttgcaaaaataattacagttgactcttaattttctgtggtagaggaaagcagagatagcatgtgtgactgaaattcatggacatgccccaaatttcattttgaaaagcaatttcaacttctcatttaaacaaacctgttatttgctgcaaaattggttgatgtgagctttgcttcttttttcgagccagccagagggtaaagcagggaatgtataaaatagaagtaccctcaaacttgataatcaattcccaaggaaatgaaagttaaccataatcacttggcactgcataaagaaagaattctacaggaaatgtaaacacagctaaaaccgtctgatgtttactgttttcagagtctaaatgccctctttaaaaccaatatgtaagaaaagtcattagattttctttaccaagtctgtgattatttaaaaccaaatcatgaagctacagatttagaagtatctctaggaaatataaaaatgaagatatcacgcttaatct

SEQ ID NO: 10627 - DNA, 379 bp, Homo sapiens
tcaccttgagttttatagaaaattgatcatacatttgcctaagagccactaaagttgacaagcttcattttttattttttaatttttttagagaagatgatgaactagttttatgtccatgtgtaggggtgagtgcagtgatcacaagcatatctgtagggttaccacttatttgattctgtgcactgaaacatataacttgtatttgtacctttttttaatcagtatttgcacctttttatcagtatttgcagatactgattaccaacaccatgattgatgttcctaataagcaccttaagtcatttttctttcttcactaaagtattgatttatagaataaacatttcacttttatactgtttctcctcattcacta

SEQ ID NO: 10628 - DNA, 437 bp, Homo sapiens
atatcagagctagcttcacgcattcttttctcttgcctcccagctatcacgcagttgttggataaagcggccactgctcccaaagatttgatggaagttctgccagatttacccactcacctgaagggagattttctgtacaccccatgcccccggactggtcacaagggtcagctgagttggttcaccccctcccactctcgtcttcgaggcccttcatccaggaaaagtcagtcgcaaatttaaggcctggccctgtcgggtttcaaaacgatcccggaggacttgggccgagggacaaaggaaagcgaggtcagaggcggcctttcagcccgggagaggcctggggccgcacagccgccaccccctacatcacctccgccgtccccagtcacccccagaagtcccaaactagccagagcccgggcttgctcgcg

SEQ ID NO: 10629 - DNA, 817 bp, Homo sapiens
aggaaaggggcagcctacaaatcacagaacttttcgatggtaagtactttcctccagctaaatatcacaggaaaccctgcagcaccaccctcaccctgctaatcagagaacttttcggcggtaagtactttcctccagctaaatatcacaggaaaccctgcagcaccaccctcaccctgctaatcagaggctgagcaggtacttcagattcccactcatgacaagctgggatgagatgctcctctctgcagggttgctgtcagagaagactggctgaggagttggggttttacttctgctgggtggtgacagagcacagcctcctttctgctagggtatcataagagggaccttgcaaaactcaggaactttactgctgccctgtggtcatgaggccacccccctgtggtgtgggggagactgtatagggagcagcacggaggcagccctgattcagccttggtggtgggagtggaagttcggcaggaggctgaactttccttctcatgcaggggtccgtggaggctgagtgggaatctcaacttccacctcaccgtccacatccacctggcagaggcctgctctaacagaagacttacatcagatcctgagtctgatgtcaggatttcaatggaaaatcactcataggaaaatctcaacctcagtaagaaaagaccactgatgccaacgtagagatgacacagagtttagaattatttgacaaggaccttaaagcagcgattgtagaaatgcttcaataaccaattaacattcgagacaaacgacaaatagcctcaggaagaaaatacaggatgta

SEQ ID NO: 10630 - DNA, 294 bp, Homo sapiens
gaaaccagaaggccatcacttggttgtttgtttctacagtagaaatgaaaacaatttattgtttgctaaataatggacacactttaagaattttaaagtgattcgtaaccttcaagagtttacttggcatgtacagctgtttttaaaattgcattgaaatgctgttttcaaatatcctagagagaaggggtcttgtttttagtctgaagcaatatcagatcacatatatagtcagaaatatcataagtttgagtagaaatgtttatccttccttctacctaacttaaatgcctt

SEQ ID NO: 10631 - DNA, 379 bp, Homo sapiens
ctcaaatgtgtatacttatatccacaaatgtgtttaggtagaaaaacacttattctctactcctgtttgctgagaggccctgaaagcaatgaatccaaggtagcaatgataatacttagtgcccagaattggtttctaaataccattatcctcttaaaggaactagagctctttggagaaaaggctgactccagggctggagaaggaaaaatatgagatgagcctagaacatcttaagactggaaagttctcatggaatgacgggtcatgtcaaggggatacaggaggcagccaaggggccttccactggccaaagctgggacaactagagcaaaataagtaatgagtatatgggaacccatgaattcacactgctaca

SEQ ID NO: 10632 - DNA, 352 bp, Homo sapiens
cgcagacattgccctccccaacatccttctaatacaaattcttaagcattaagtcaggcggaaaatgagtctactctacatttatcttcctgaatggcagtcaactcccgcttaatctttcaacatatatttgttcaatggatcaacagattgtgtaagcagcatgacggttggatttagaaatgtgtctgctcatgtttggtttgtgctgaaccattgaccattttgtttgtgaatccatgataaattatatctctgcattacccagcactagggatgggacagaggacagtgctcacacaggcggaaagacttttttagtcactgtcattttccagcattgagaatgctg

SEQ ID NO: 10633 - DNA, 246 bp, Homo sapiens
tgacctgagccacatggagaggctgagtgactggggggaagtcactccctgagaggggcagcaatgaagagtggtgagagcaagatttgcaggcagcaggccgccagctctacccccaactccaccctgccagtggggctgtcctgggacacagctgcagcctttggtcccatgagccatttcaggattcttgccgtccttttcccttttgaagctggttccagttgagtttctatcactggaaac

SEQ ID NO: 10634 - DNA, 322 bp, Homo sapiens
tataaagcaggagtcagcaaaccatccctctctggccaatttcagccaattttgtgagtaaaattttattgtaacactggcatgtccatttgtttatgtgttgtctgtggcagctttatgtttataacagcagagttgagtagttacagcagtgtccttacggcttgcaaagcctaaaatactgactctctgtgccgctacagcaccctggtctgaagtaaacattttattataagattcaactgctctcatttttgtctttttcttcttttgatttttttttcaaatgcgtacctttctgtttttaatttgtgtgtctcca

SEQ ID NO: 10635 - DNA, 466 bp, Homo sapiens
aagatatactctgaacttactgcacttaaaaaataatgaaataatactttagaaaacaaagtaagtcatcaaatcatttatatgagaaaaatattccaactatccttggacttcttcacagcaatattcaattctcggaaacactggaagaacttcaaaatcctcaaaaaaaaaaagaatgtgacccatgaattttgtagacaggctgtcaaacataaaggcaacagtcacagagctattatatgcaatgaacttggggaatactgtttttataataagccttcttggagagtatattttagaaaaaagctttaatcatgagatgagtggttaaacagccaaagatgtaagaactaatggtagaattataactaaaaaataaaataaaataaaaaacagaggtagaacaaaacctaaatgccataagccctgacaatgtaaacatatattttacagaaattgaaag

SEQ ID NO: 10636 - DNA, 400 bp, Homo sapiens
tcagttgcccaggcgatctcggctcactgcaagctccgcctcccaggctaaccccattctcctgcctcagccttcggagtagctgggactacaggcgcccgccactacgcctagctaatttttttgtatttttagtacacacgggtttcactgtgttagcgaggatggtctcaatctgctgacctcgtgatccaccagtctcagcctcccaaagtgcttaatgtatttttattcagtgaaaagttttaaatgtcatgaatggaagttgaatctttctgaatgctcttttgagacctattaaaaggctcacaggaccccaggcccataatctgaattatattaattgtcttctactaatcaattcatatatatatccaattttgtcatataggttgataac

SEQ ID NO: 10637 - DNA, 371 bp, Homo sapiens
gatgtcctagcctctggaacttgtgaatgcaaccttagatggcagaactgattttgaagatgtgattaagttgaagatcatgaaaggggttaagtattctggattgtttgggtgggccctaaatgtaatcatgaggtccttataaaaaggacacaggagttgtcagagcgagagaaggcagtgtgaggactggaagcagaactggaaggttatgaccatgacccagggagacaagaaggggacaccccctgccatctccagaaggaaccagccctgtggacaccctgcctgtaaaccagtgaggttgattttggacttctggcctccagagctgtcagagaataaatttgtgttgttttaaatccctcagc

SEQ ID NO: 10638 - DNA, 315 bp, Homo sapiens
  misc_feature (206)..(206): n is a, c, g, or t
  misc_feature (241)..(241): n is a, c, g, or t
  misc_feature (298)..(298): n is a, c, g, or t
gagagtttttgatgaaacctgttgctttatataagccctaatgagttgtaattcagtactaaaatggttttcttgtgggctgggacttacaggatttggctgactatgcctctaagaatttagaagccatgaatcccccacttttcctccgctttcttaacctgctaatgaatgatgccatcttccttttggatgaagccatacangtatttgagcaagataaaagattcagcaaattganaaggatcgaggtgaatgggatagtctgactccagaagcccgccgagaaaaggagggntggcctacagatgtttg

SEQ ID NO: 10639 - DNA, 1158 bp, Homo sapiens
  misc_feature (1049)..(1049): n is a, c, g, or t
  misc_feature (1084)..(1084): n is a, c, g, or t
  misc_feature (1141)..(1141): n is a, c, g, or t
ctcggctcctcacctttaatcccacatactgtgccctcaaggagttgaatgatgaagaacgaaaaattaaaaatgtacacatgagaggtttggacaaagaaacctgtttgatcccagctgtgcaggagccgaagtttccacagaactacaaccttgtaacagagaaccttgctctgacagagtacaccttgtacttgggatttcacaggttgcatgatcagatggtaaaaatcaaccaaaatctgcatcggctgcaggttgcctggcgggatgctcagcaaagttctagccctgctgctgacaatcttcgtgagcagtttgaacgactgatgaccatctatctttctaccaagactgccatgacagagccacaaatgctacaaaactgcctaaacttgcaggtgtccatggctgttctactggttcaactggccataggcaatgagggctcacagccaatagagctaacctttcctttgccagatggctacagctctttggcttatgtgccagaattttttgcagataacctgggtgattttctcatttttctccgccgctttgccgatgacattttggagacatcagcagattccctggagcatgtccttcactttatcaccattttcactggaagcatagaaagaatgaagaatccccacctgagggccaaactagcagaggtgttggaagcagtgatgccccacctggatcagaccccaaatcccttggtatccagtgtgttccaccggaaacgtgtgttctgcaactttcagtatgcaccccaacttgcagaggctctaatcaaggtttttgtggacatcgaatttacaggagacccccatcaatttgaacagaagtttaattaccgccgtcccatgtatcctatcctaagatacatgtgggggacagatacctatcgggagagcattaaggatttggctgactatgcctctaagaatttagaagccatgaatcccccacttttcctccgctttcttaacctgctaatgaatgatgccatcttccttttggatgaagccatacangtatttgagcaagataaaagattcagcaaattganaaggatcgaggtgaatgggatagtctgactccagaagcccgccgagaaaaggagggntggcctacagatgtttg

SEQ ID NO: 10640 - DNA, 244 bp, Homo sapiens
tttactttttctctccccttttcttcctatctcttccctcctttcttaacacgttcccctatccttccctcctttcaccactctctgcacttgatccccggtgtattccagcccccaggccaacacacttcaccgcgtccgcctggggcaggtcagagaagggacgcgaggcggcgctgtcacagcattctatgcgccccagcgccctgggccgcgcaggtcttttatcatttcagtggtcact

SEQ ID NO: 10641 - DNA, 235 bp, Homo sapiens
ggcttaacttgaaagctttttcattctaaaaatcttctcaagtctgagtgatgtggaatttgttctgtttatgtcacttcttgtctatggatgagccacggtgagggttttttcacaattatctctatttctgggcccctttggccttatcaagtaataacttttcttgattccagtcagtatcattctcctcaccagtctgatttcttgggatagtgtctcatacttccaagta

SEQ ID NO: 10642 - DNA, 304 bp, Homo sapiens
aaaccaacaaaaatcacacctaatggtgaaagattgaatgctttcctcctgtaaatgagaacaaggcagacttcctctacctccattcctatttgatgtcgtactgtaattcctagccagtgcaatcaggaaagaaaaagaaaggaatccagactggaaaagaagaaataaaactatccctgttcacagatgaaattactgtttacatgtgtccaaaaaacagacacactcgacacacacacacacacacacacacccctcctagaactaataaccgagtttagcaatgttgtagagtacaagt

SEQ ID NO: 10643 - DNA, 598 bp, Homo sapiens
ccgttcgtcagctgatggacacttgcgttgcttccacctttgggttcttgtgactaacgctgctatgaacgtgagtgtgcaaatatctgagtccttgtttttggttctttggggtatatacccagaagtggaattgctggatcatacagaaatttgatttttgattttttgaggaattagcagactgatcttcgtagcagctataccaccatcagagtactcaggttccaattgtctgttgacttttaaccagtccatcttgtcaatttatttaattttgccacaagttctggtaggtggcaggaaagcccatttgaaaattttgatgcagataaacagttcttttctgatatactcaggatcaaaggatcagaatcactttctgataaacttaccacttgtgtggcacagacacccagagttttagagtaagaatctgttgaacatactggtagggtttcattattttaataaccaacttcaccccattagctcagggctgcccacttccataaattctttgtcatgattctgaggagtgcttaaacagtgcttttcattctcttctgctgtcttataaatataaaaaagacttagc

SEQ ID NO: 10644 - DNA, 565 bp, Homo sapiens
cggcagctctgtgcagtaggtactattaatattatcacacccactttaaaatggaagaaaccaaggcaggaagtggtggggtcaggagctgaaccctgtaggtctgcctccgggcctgtgggtttattgtttcttgcaaatagcgaacagataacaagacaatcccaggccacggtgaatgtcatgcagacccaggctgggcgccatcactgcctgcactggtcactcccctgctgggcctccctgtcctctctgactagaggctcggtggtccctccttcctcatgggggctgcgggtgagctgagctgagctgagctgagctgtgggcagcccagcacgtgcaggagccggaagatgcctggccccctctctatggctcagtcttcaccgggtccccagggtggtgggcaggcacaggcactagctcagccctggcacctgcttgtacagggcaaggttggagtagctgccaagggtaagactcgcagcaaaggtggttgctggccccaggtgacccaggtggctggctgcccaaccctccgtcctaaagtgtcgatgctgga

SEQ ID NO: 10645 - DNA, 554 bp, Homo sapiens
tttcctgggtgaagtttacaagaaggctgcttaaatgcctgcttcggggaaatctctgcctctctctctctctgtctctctctctgtctctctctctgtctctctctctctctctctctctctctctctctcagtgtatttctctactttcttttacatttcctttttttctatccaaaaacaatgtgcttgttgaggcactggtaaccctgattaaccagaacctcccattcccagtatcgctgttcctacgcccatttcaccctcattaccttctgcttccaaggaatatgacagatcaccaggatgctgctcgtcgtgaggatttatctcaaaaaccaacatccaaaatgggagggagatgtggcttgaggtcaagcgccatgcatcccaagcctttgaccttcccgctatgggaagtgcactgggatgacagaaactgaatacattgctccctttccctaggggcaaagttcggacctctgttaagtgggagggatttgtgagataaaaattcaaaatgttgggcctgaggcctgagagtgtcaccaaag

SEQ ID NO: 10646 - DNA, 500 bp, Homo sapiens
aaggcatgattgtaactttgagatttaattttaataactagataagaaatataggagatttttattggctaaattctacgtcacacaggacaatgctggaaagaagcaggtattttaaaaattgtactccagtggcacatatagtcacgtctttactcttaagcctgtctgagaaacacttagagaaataacattcttgatattatgttggtccagtgaggatgagaaggtattttgacccaaacatatggatgcaggcttcaaggacacagcgaattataccatctgaagcaactggaaacgaaaagctgtgtggctgggaatcagcagtttgtaacaacagctggtgctgtgggcagcagtctaatggggaaatgtctcagcagcaagccttgcacacagacaaaacaaaatccacacctgtggttgtttacaaagggcagaaagggccatggaagacacatcattaatatggtggagagcaccattagcgattctag

SEQ ID NO: 10647 - DNA, 538 bp, Homo sapiens
tttaatttttattcaattcccaggacacagccccaggagatcctgagaacaaatgcaccatggatgcactttgaaaacatgctaagtgaaagaagccagacataatagactatggtttcatttacatgaaatgtccaaaatatagcaaaatccatagagacaggaagcagattagtgactgcttagggctagagaggaaggggaaatttaggagctagaggtttcttttgagggtgatgaaaatattctaaagttgaggcaatggttgcacaattctgtgcatgtactaaaagctactgaatttatactttaaatgaatgaatgaacgatactactatacaacatagtgctgtgcctatacttaactatactatattacatatttaaagttttctaagatagtagatcataataaaggggcagggtaaactctgggaggtgacagatacgttgatggccttgatgatggtgatggtttcacaggaatatatttatccccaaactcatagagctgtatacattaagtacagctttttat

SEQ ID NO: 10648 - DNA, 272 bp, Homo sapiens
gattactttgggtgttcaggaaggggaaagcttcatcatgcaggaagtgagatttgagttagttcttgcagattttgtgataataacaggcagaaatgggagagtggggtagtccatattgaaaaagcaagtgaacaaaagccttgggtcagggatgtcctggatgtattctgaaagtgagaataatgaagtatacattaaaaaaaatacaggctgggcacagtggctcatgcctgtaatcccagcactttgggaggctgaggtaggaggat

SEQ ID NO: 10649 - DNA, 439 bp, Homo sapiens
ttttttcaaaaaggcggactacctctactctgacttttgttgtttgtttttgagacagcagcttgctctgtcacacaggctggagcgcagtggtgcgatcatagctcactgtaaccttgaactcctggactcaagggatcttctcctctcagcctctcctggcctcaagtgatcctcccacctcagcctttcaaagtgttgggattacaggcgtgagcccactgtgcccagccaacttcgacatttttgaaaagtgaaacatataggtagatgtgatcttatctacatatggattttatatttaaccaaaaagtcaaggaataacttggctagtgatgttgtcaccattatcatcaaaattgccttcgttaaggcatttgcttctcttgactcatgtctagaaatgtctagaaagaatataaaaatagatgaaaaaaaa

SEQ ID NO: 10650 - DNA, 285 bp, Homo sapiens
ttaaatatcagtttatgttttattatgaagacaataaagtctcaaggttatgttcacttccaaaaaacaaaaaaggaaaaaggccatgcacaatgtctcacacctgtgagcccagcactttgggaagccaaggtgggagggtcgcttgagcccaggagttccagaccaacctgggcaacacagcaaaacctcatctctgcaaacaattaaaaaattagctgggtgtggtggtgtgcgcctgttgtcccaactacttgggaggctgaggaaggagaattgcttgag

SEQ ID NO: 10651 - DNA, 300 bp, Homo sapiens
ggtcccctcggggtgatggagatcatctgggtgtatggaactgtgtgtggttggccttactgggtggtcttccttcactgtctgcgggacagatggaggggcacagctgcccatggacccaggctctggggcttctggaaggtgccgaggagggcaggtgcgatgcctgggggcgttcagcaaatgcctggccctgccccctgtgccaacttggcctgggaggctcaggcacagctgtttcaagggtcctttatttcattcctggttcatttcaaagtgtctgtgtcttgttcggagcag

SEQ ID NO: 10652 - DNA, 329 bp, Homo sapiens
agaatataaattcctcaaaggcttttcctacaaataaaattaaacgcatctaatagttacctccattttaaagcccttctaatgataaaaacaatttgaatacaaaacaattttttatcttgacgttgtaaagttgctttaattgttttcatgtgttttgctttattttctaaaagagcctcaagattgatttactttctcccagatttcttacctctagtaaaatggttacggtagtttgggatgccatttcgcatgtaccgtgtgcctaaaaaggctgctaactatttggagtgggtatgtctaaaagtagttgggttgaatgaaaa

SEQ ID NO: 10653 - DNA, 332 bp, Homo sapiens
tagcaactctgtggggtagtttatggaagaggcagccaaacttcacacagctctgtgtgactagctagtaattgctagattcctgatctgcggcttctgggtcctatttcactactgtcatgatgcctactgtatgtatatcccactattcagaacagattcataaatagtgaaaatagaatgagctggagcatattaataaatatctattaaaatatttacttaataaataaatattggaattaatgaatttatgaaaaagggaactgtagcacaatggacccctttcccttcttatcactgtggccactggctatttgatatttattgaa

SEQ ID NO: 10654 - DNA, 326 bp, Homo sapiens
atctgtaatttaaactatctcaaaaccctatttttgaaatcaatcacttaatgtttttccttatgaccctcatgttgagataaaatgactaaatactttggttgactttaaatatcatttcttatttcttaaacaccctaccaataattaatctttcctataagaataacgttggcctgttggccgggcatcatggcagcaggtgcctatagtcccagctactcagaggctgaggcaggagaattgcttgacatggagattgcaatgagcccagatagcgccattgcactccagccttgtgcaacaggagtgaagctctgtctcaa

SEQ ID NO: 10655 - DNA, 404 bp, Homo sapiens
agcttgaccacagccatggggtcttcagcacgcttggctctttaagcttctcgtagagagcgtggaccatgtgcccaagggaccgagggtgttgtgagaggcaggcatgtcgcccacttcagccttgtttcctctgagttcctcttgccacctcccccgtgaccccctcgtacttaagtgctgttatcatgagatccatttttctggtttgacttctgtcgccatggcttattctaactggcaccgtgtacggagttccactttccatgactgaggaagtccagattttgtttgttttgagacagggtcttggtgtgtcactcaggctggagtgtagtgagccgagattgtgccactgcattccagcctaggtgacagagtaagaccctgtctcaaaaaagaaa

SEQ ID NO: 10656 - DNA, 349 bp, Homo sapiens
gtaatcaaaactctatgggactggcattaaaacagacacatagaccagaaacagaatagatagcccagaaataaacccaggtacatacagtctactactttttgaccatgtccccaagaacacaaaatggggaaaggatagtctcttaaacaaatggtgcttggaaaactggatatccacatgcaaaacaatgaaattggacacatacaaatacacaaaaatcaactcaaaatggattaaagacttatgtgtagaatgtgaaatcataaaatttctagaagaaaacataggggaaaagctccttgacattggtcttggcaataattcttttgataggacatcaaaagca

SEQ ID NO: 10657 - DNA, 246 bp, Homo sapiens
tgtttgctaacaatatttttgttgattctgtcgatcttttgctttatggcttctgggttattgttttacttagaaagttcttctgattccaatgcttttccaaatttgtgttatatttatgggatttttctctttacttttagctgttttatctagctgtagtttcccttttctgcaagacatgaagtatgggttgaaatttttctctcttccataatggatatctagcacacccaacattatgcg

SEQ ID NO: 10658 - DNA, 421 bp, Homo sapiens
gatataaatattaccatcttggaaatagtctctacaaagctgtgtactttctcacctgtgacgaaacagattttgaagtacttctgtccacaatttttatatgtctctgaatagagacagttagtggggtgcacgtgtgggagaagtcttataaaacttggggcattttcttttttaatatctagcccccctttcttcctcctccttaggaggtatgaatccttccctgcccctcatcccccaggcctgaagaacctttccccttccaaccctctcataactggctgccaccatttatgccttgcctgaagctcattcataccaacttgttgattccccctggtagctgcatttttagacttcttttcaatatctagcatgaaagtttgtatgttctgtaaaaggaatgtcatgtgactat

SEQ ID NO: 10659 - DNA, 424 bp, Homo sapiens
gcacccacaattactcaccgaggagctctctcagattccatggggctggaagggtcagtgtgataccgtgcacccacacttactcaccgaggagctctcggattccgtggggctggacgggtcagtgtgataccgtgcacccacacttactcaccgaggagctctcggattccgtggggctggaagggtcagtgtgataccgtgcacccacacttactcaccgaggagctcttggattctgtgttttcaagcctgcccatgtgtaggaaaagcacagcctccatgagaacagcaggaacacaccccccaacacgcacacccaaacacacacgcatgcacgtgcatgtgcacacacacacactcgtgcacgcacacgtgcacgcacacacacacagagcaacgtcctgcagctcccatcttttct

SEQ ID NO: 10660 - DNA, 504 bp, Homo sapiens
ctttttcttcctccctagaaatgaaaacattaaaaattcccacaaagggctcacaggtgactctactaagatgagtcgcatccgagaacaatggcaatggcagccaccatttactgagtgtttacatgggttgtttcacttaatctttatggaaacactgtgagatgggaactcttgttatatcttcaataagtgagcaaacccggaccagagaacctggtcactggcccagggctcacacttagtggtagagaagggtttgagccgactttggatcacagtccacactggaaacagctgtgccctgccgatgcttggcaggacagttcctgaccatctttcacatcaacaggaaatcgacccaactttactttcaggtgacagaaatccatctgtgcgctttcacctttgcagcactgagagatgttatttcggggtttttttgcacataattatcaagtgtaatttgaaaatcgttttttggttttttaatcccaaagatcc

SEQ ID NO: 10661 - DNA, 466 bp, Homo sapiens
gtttccttccgtgtcatgagctgcaaccttgtatcttaatgtgaaggtctgtgggaagctgaaacatgacttaggggaaatgaccttctcttagttgtgtctgggacagggagtctgacatcccatccctctccaatcaggactgcattcagtgtgcacataggtaaacaaaccaaaatagacctcacccaaaatagctccttccaagacaccctacagctctgtgtgaggccaggaaggctagtctggtttggatgctggctagggggccagcgctggtctggcatgcctcctaaggaagcaggagaagtacctgagactgttgtgtttgtgatccgacagcagttactgttccctttcctaagaaaccttggacagtctcagaggctcctttcttgtcctttgtgccagacacattcagctccctgtcctcagtagagattttagtttttctttccctttttaa

SEQ ID NO: 10662 - DNA, 372 bp, Homo sapiens
agatggagattgtgatcaagagctgttgactagaggtctatataagctaagaaaaattaaggctttaatggtagcatggatataaagggtagcaggaatttaggaaaagatgttcaagatggaaattaatctgaggtgttggttttcagggctagatttagagtttgaaaaccaggaggccagaggcaaagaaatctagtatctatgggcagggcaaggtcgaagacctggaaaattgaaatatgaggcagaaatgaaagtgtcattataagaaataagccacgcctggcatggtggctcacacctgtaatcccagcactttgggaggccaaggcaggcagatcacttgagcccaggagtttgagaccagtc

SEQ ID NO: 10663 - DNA, 509 bp, Homo sapiens
tacatttttataagtttccaaagaatttaggatttagtattaaagcacccctaactcaactttgtatacattactattaagcaatactacgaggccaaaaggatttcagaggatcttcttattctgtattatatcctgcagaattatgaagtttgtgtagttattattttgaaataaaatgatagtgaattacagaagaaagaggatttttcaggccaagcatggtggctcatgcctgtaatcccagcactttgggaggtcaaggcaggcggatcacttgaggtcaggagtttgagaccagcctgggcaacatagggagaccccatctaaactaaaaatacaaaaatgagctgggcatgttgacaggtgtctgtaatcccagcttcttgagagactgaggcacgagaatggcttgagcccgggaggtggaggttgtagtgagctgggatcctgtcactgcactccaacctaggtgacagggcaagactgtgtcccaaaccaaaaaaaaa

SEQ ID NO: 10664 - DNA, 436 bp, Homo sapiens
tacagggaacagaacattaaggggacccccaggttctggccatgttacgttttatggtactggttacatggacttgttctgtgaaaatttactgcattttgcacttctctgtatatgtattacacttcagtaaaagtttgccttaaaagaaaaagtaaagataacatgcaactattttctaaatggaaaatttccattcaatcaagttactgtttaaagtggggagggagtccccgatattttaacaaatggtcctaacatttagctactgcgtcttcactgaggtctgtggaggctgcaagtggtgtcacatccttagttctctgaatcatcgaaagcttctgtaaggcaattaattactcagacaaacatttccttcccaaaataaaacaaaaccaagatgtggtatttggtgttccaggggacacacacacac

SEQ ID NO: 10665 - DNA, 700 bp, Homo sapiens
ttcttttttttcagagacagggtctcactctgttgcccaggctggaatgcagtggcaccgggctacgtttattttgtagaaatggggtctcactaatattgcccaggctggtctcaagcaatcctcctgccttggcctcccaaagtgctgggattacaagtgtgtgccactgcacctggcccgctctgacttccgagtcttgagcaacacaaagccagggagacccccggtgggaccgtgagtcccagcacctccccatccctctgtctccctggaggctcattcctcacctttgtccatcccacagatacttctagagcacgtggtgcaggccaggccctaaggaaactgcagggaacgagggggaggctctgtctggactctggacttgctgggttgggttgtgttcctgaggcccctagggatccagctcggccatactctggctgggtgacctcaggtgggagctttaccacctgacacctcagcttctgtatctacagtggggacagtggacagcacggaagccttgctgtgcggatgaaaggagatggagggaaagagctgaacctgcctggtgaggtgtgagctttgggagcgctgagctccctgtgggatgatgggaatgacggggatgacggggatgatgggaatcatggggatgacgaggataatggggatgacagggcagccaccccgg

SEQ ID NO: 10666 - DNA, 396 bp, Homo sapiens
cattattctccaaacaatacagtctaataactatttacatcgcatttacacttactagatattgtaagtaattgagagatgatttaaagtacacgggagaatgtgcataggctatatgcaaatactataccactttaattttattatttatttatttttataacttcagcataccctgagaaaatactacatcattttatgtaggattctggtatctgagggaggtcctggaaccaatctcccacagataccaaggaatgactgtactttattaatacacaggggcttatttttgtggctttatcttctatcttgcattttactaacttcaattactatctgtagtaattttcagattgatttcttttgattttctaggtaattactgcacagtta

SEQ ID NO: 10667 - DNA, 3565 bp, Homo sapiens
ggggggtggggagccccacatctgagtagcctggatgtctcatgctggccctggcctcggtgaagcccttccggaaaggaagggggtgagaatcgggggaccccctttgcctttcaggcaaggccaagaattttctatctggagggacagacactctaaacaaattccccaagctgcattttcagatctattgaggagctttataagaacagagtagcccagccctctctgcatcaaacaatccagctcctgggcaggcagatggtgggagcctccccacgtgattctggcatgtggcagctgagagcggcacattgggcctccctgccaggcatgctaggctgtgggtttggacagccagaccctccctgggatcagaagggcgaggaacactgactctcccccactgggggctttgtcaccttgccttccccttaaccctgtgagggcacattgtcacccccattttgcagatgagtaaactgaggctcggagctgtcaggttctctgtcagggtcaccgagctgggaagcgagggtgcgggattcatgtaactggttggccacagacccctcccactgtcctcggctgctggaaatcacatccacctgccttcgatctcctgccctgcccccaactagccgtgccctctgagcccacacccaggggccctggtggcacatacgaagccactcacttctgttttgcatccgttaagtctgtagacatctgggaggagtcagcgatgcatcttgcccatgcatgtactcctagaacgccacccgggagcctggatactttaacgcaggttttccaggacccccacttctcacaggctgtcatgtgccccccagtcacctctgccacatctgctctggaaggctttctgggagtttctctggagcacagttgatgagaaccatggagactgaactagcggctcgagggtttcaccttggcacactcctgacagtctgactccatcttctcagccagatgggcctcctcaagacgaagctgtgccatgctgggcatggggcaaggagtgggacgctgctccgtgggccacctggcctctcaggggacctacagtgtagggagccacgaggcaaaatgtccggtccaggtcctggaggtttgttccaagtgctcagcctctgtctgtggtgtggaaactctcgggatgatggtgtggtgtttgcggcagagactggactgtgttcagggggagaggaaggcatgggggacagccctgcctcctacattcccgcagtgacagttttctcaggcactgggaagtcgccgcccctccctcactggccacatctagagtaggtcctgagtacctgtctccataatatccccagcacccagccatgacctccgcctggctcagccttcccccgctctcctgggcctgggcatccctcgcctcccccagatggccgcctgcctcatcgaacccccaatctgatctgcacattccaccaggccacccttctgaggcagctgcgagtccagctggacttgagtggcagagagcagctggggcggctgtgccctgccaggaggatgctgccccaagcctgccggctggcaggtctgagaaccatccggatcagtcctgtccaatagagacatgatgcaagccacagatgtcacttaaaatgtgccagtaggcacagtaaagaaagaaaaaaaggttaaattattttaaccatatgttttattaaacccagtgtaaatgattatcatttcaacctgcaattgatataaagcatttttaatgaactatttgatagtctagtaagtaaatgtttggaacccagtgtgtgtttacacgagggcacgtctcagtgtggaccagccacatgtcagtctcagcagcctggcgagaggccgccgtcactcagacttgaggggtcgcctggctgagtcgagcaagcccccagcctcagccacagagagaaacatacacttcctgcctttaccgttttgctgtatctgttgtgacctgtgctattgtttcttattatttttctttaaattaactcatgcattgaattttagtgaattcatttaaaagggaatctttaaatcagtactgtaagtgggaagccgggagcagaagtggaaggtaaccaccacattgccatgaaataaggcagcagcgataaactcccacccatggtctgtggcctgttgaggctctgagctgaggccgtgccctccctttgtaaagagaatggcagtggggagctggagagtgtgctggccccgagtctaagtcatctcctgcacctcgtaggtgcagctccccactgccagagacctcaggccaaagcccccaggacgcagctgactcagaacaggctgggtttacccctgttgaataacaggagaacgcataccccagggaccctggcaagctgcatgagaacgggtgagctagaatccattaccggatttggggctcagttgggtgctttgggtaattttgaggttctaaggaacctcaaaaagttggtgtgaccattaaatatgataacccctccaaacaactaactcagcaccagcacacagcaggggcatcacccacgccatctttttccatccctccctggctccccacaggccaggaggacttagaaggaagttgaggcctggtcctggcctgcctggctgggcaggagctacagatctcggccaccaggtgactggcagagaatggcctgcctggctcaccagcagcctctatccttcagggaaacttgtgacctttgagaaggctgcaggtccccagggccagcctagggccgtttctgggacacagccctaaatgcccacactgccaagtatgccaccagggactctgcctgaacccagggcccagatcttctggcttcactcgtctctgccactcaaccctggccatcctctaaagctggtagacaatgacagttctgtcacccattaaaatgaggccggcatcgagcaggagtgggaggagagagccccaggtgaattgtgaagagcacaggggacttttgatcattcgtgaatatttattcagagccttgtgcatgcttgcgtttttaacaccttctttttgggtgcatgagagtattttttgatggaaatctttattgagctcgttgtagattcacatgcagttgcaggagctcacaaagagggcccatgtacacttaacctggtttccccaatgacagcatatttcaaaactacaacacaatagcacaactggagtgtctgcaatgatgcaacccaccagtcctagtccgatttcccagttcacacgcactcatttccgtgtgcattttttgctacaatttttatcacgtgtaggttcaggcactcaacagcaccatcaagatgcaaaacagctctgtcccctcaaggcccctcctgccgccctgtgagagccacacccctctccctcctgcctgcctccccccatccttaacccctggccctctaatctgttctccatttctaaaactttgtcattttacaatgttatataaatagaatcacacagaatgtg

SEQ ID NO: 10668 - DNA, 551 bp, Homo sapiens
ataaggtaagaagtggtactgggttcttggggaaagtctccattgagaagaccatgtcatttttcctaacgttagtaaatttctcagatcctattccctcctccccccaactttctttttttttttttgcctcctttgagtctcttcttgcctcatttgcaccccccggcagctcaaacctacttgtttcaacaatgcttttatgaactaactggtcccccttacccttttgtcccttcccagcatccactcttgccaagcccaactctagattaatttgagtctccttacctcccattgccccccgctgggctggcaagcatttcctgaagaaagtcataaaaccaggctgagttgttcatgggagtggagagacgccgagatcatcgattgtacaaattgaaagaatcaggagatatcaagtcttatcaccatcctgaaagagaaatggagagttcgtttttagtagagctaaaaataagagcgaaaatttccttactcctgtattggtgttttccaacatagtgagttgagaagtagataaattgagg

SEQ ID NO: 10669 - DNA, 389 bp, Homo sapiens
gcctcttccctgcctccctgtcaccaagcagcctgctgggcaactcccctccttcttggctgcgacataactcagagtccaaagtttctgctgtctcaagcccttcagccaccaagacactcagcacagggatagggaaactggatcctggacataaggagatggcggaggagtcagagcttttgaagaataagatgcaagcccctcccctttcgaggtgtcctgagagccaaaaatgccagcaccagctgaggcttcatcactggaaacccagcgtccggcaccaggtgaaacgctgtagccccgctgtgctccgctcagccatgccacctgcagactgtcctgcagttctggaggccaccacagccacacgtgaagaaacagtgatg

SEQ ID NO: 10670 - DNA, 429 bp, Homo sapiens
cccagctacactaacttcttttcttttggctttaaaaaaaaaagtatgcatgttgctaatttcttatttctattatttaaaatttatataaatttgatctctggttttcgaaataatttgctaggtgttgtctcccctaaggtattggagagttgaaataatttaagatgagatgtcctttgttgaattgctttgtcttgtctccaagttttaggatcattcttaagggttataatttttataaaggctgacttatgaattacagaaaatacatatatagaaatacctaaattaaagttatacctataaaaccattatataactattatgtataaacagaaagtttagactcttaaatttgctctaaattacctatatcctagttttaagagtcctgtcaggatagtaaatgtttgctgacttttaaag

SEQ ID NO: 10671 - DNA, 417 bp, Homo sapiens
gttatacagttccaaagccacttacacactttcaggtatttgttgtagtaacaaccccacatcttggtaccaactttctgtcttagttcttttgttaaatgcctgagactgggtaatttataaagaaaataaatttaattcacagctgggcacagtggctcatgcctgtaatcccaccactttgggaggccaaggcaggcagatcacttgaggtcgggagttcgagagcaggctggccaacatggtgaaacccccatctctactaaaaatacaaaaaaaaaaaattagctgggcatggtggcacacacctgagtcctagttacccgggaggctgaggcaggagaatcgcttgagccggggaggtggaggttgcagtgagctgagatcatgttactgcactccagcctgggtgacaga

SEQ ID NO: 10672 - DNA, 368 bp, Homo sapiens
ctggtatcagcatatcacatgcatccccaaaatttgaacaactattatatatccatagtacttaaaaataaaaaattaaaaaatgtaatatactagacaatgagctttacaagtgttttgatactttcctcaggtttttcttctctttgagcatatggcttgagatagttgagaacatgagacatactagcacccatatttcttttgttctctttttaaacatgaactctagatatataatagttgttcaaattttaggggatgcatgtgatatgctgataccagcatacaacgtgtaatgattaaatcaaggtaattggggtactcctcacctccagcatttatcttttctatgtgttagagtcgac

SEQ ID NO: 10673 - DNA, 269 bp, Homo sapiens
ctgaattgagatgtgctataggtgtaaaatatgtaccaacttttattttgttttatttttgagataagatcttgctgcgttgtccagatgggagtgcagtcatgtgatctcagtttattgtagccttgagctcctgggcttgagggatcctcccacctagctacttgggaggcaaaagtgggaggatcagctgagccgggggaggtcgaggatgcagtgatgggccactgcactctagcctggctgacacagtgagaccctgtttggaa

SEQ ID NO: 10674 - DNA, 320 bp, Homo sapiens
tattgagtagatacattgaaacattggtatattctagtctagaaacataaagaggtcacaatttgggcatagttaagtactgagaaataagattggaatatagcctcaggagatattgaataccaggatgagaaatattgactcatatagttaattagtttgagtctgtaaatggtttgagtatgggaattatatgatcatggctataaaatgggaagactaatctgtcagcagaatatagattagactactggagtcaagagaaataaaaggtaaggaaactaggtcaactgtcattgcaagtctgagagtgtgtcaat

SEQ ID NO: 10675 - DNA, 400 bp, Homo sapiens
aatttcagactatggctaaacgtcctgaggcacggaggtttgccctgaaggttgaacttaaggaaaggtactaactgaaaatgaccaggagtttgcttaaatttagagaaagcttggatgagttcaaatgagaaatcatttcaggcatttttttctgttcctaaatagttctcctagcatgtgatagacaggctagaaaggacatatcctggtgtgtgagactggacatatcctgatgtcatatattgccacagagaactcagaaattccaagaagtttttgcatatgaacacttgccaacttatgtctcttgatatttcataaacatacaccaacttcattggctccaggaatccagaaattaaaaacaaatcctcaatgggaaattacactttcagga

SEQ ID NO: 10676 - DNA, 356 bp, Homo sapiens
agacagggtttcactctgtcacccaggctgcccaggctgtggcacagtcacagttcactgcagcatctacctcttgggctcaagtgatcctcgtgcctcagcctcccgagtagctgggactacagatgtgtgccaccacacctggctaatttttctactttttgtagagataaggtctcattatgttgcccaggctaggaatcccaacattcaacataaagctgtatttataaaaacataatttgtggccgggtgtggtggctcacaccttgtaatcccagcacttcgggaagccaaggcgagtggatcacccaaggtcaggagttcgagaccagcctggccaacatggtgaaacc

SEQ ID NO: 10677 - DNA, 538 bp, Homo sapiens
ggctcttgtgctgggaggtggccagtttcctggaaaggaatttatggagtctgaaagaggaattagtacaaattatattttcaaataagatacttgaaagttattgatgacagggaaaagattgtctaaagagggcttgaaattggggaaataattgaggctcagtgacaaaggagaagattacaacttcaaaaatgaataaataaataacattgcatgtttattttacaacaccagggggcgatgatgtctacgtttttattctgtatcctttatcgctgacaaagatttggtctctgcaattttaccttattgtttctcagatgaccaaggggttggcttaatttgttctgtttaaacttattgcaagtccttctgtaatttcctaatgttttcataatgtgtgttgtgaccagactctccttataaccccagttaataaaagttaacaggaaaaaaaaaaaatagaaggattggaagataaagttggggaaatttctctgaaagtaaaacaaaaagatagagatgaaaagtagga

SEQ ID NO: 10678 - DNA, 375 bp, Homo sapiens
taacatcttaaaagatcttaccactatgaaatcaatctctgtgaaatgataaaaccatacatcttttgtcaagtaatttattttttaccatttccatttgactatcaatttcaagaactctatttccatcagcgttctcgatggtgagcaacaaaaaccaactatgatgatttttacctgaaaaggaattcatcaaaggatattggggagctcatagaatctttgaggagactgaagaaccagattaagagtctatacagcctgaaacaatgcctaactgcaactcagggcttgtccagtgacaccaccacccaagctgccatgggacacacacatcaccccttgttccacgaagccctaatgctggactctgcc

SEQ ID NO: 10679 - DNA, 447 bp, Homo sapiens
ttttctgctgtctgtaacttatctatgccatggatgctagcatgacctgtatccataaaatgggcagtgggggtggagattccaattggcaggaattagtcatgctcacctgcactgtgccccttgactattgtctgccgctggatccctcagatccattttcctttctagagcttcagcctgaagcttggagttcagtttgggacaagcaacttccttaggaaggggcatggtttcattaagtccaggttgccctcaccagactgcagccagcagctgtgagggctacttctttgccatcttcttataagctgaatactcaggtatagctgtgcaacgggtttgtactcagacaatggagagaaagggagaattggggatctggcctagtaagatgccttccaaaagaaaacaaaacctcttgcatagaaaagctccctgtatgtg

SEQ ID NO: 10680 - DNA, 392 bp, Homo sapiens
tctttttttttctttaattgtgcagtggcgtggtcttggctcactgcaacctctgttacccgggttcaagcaatctcgtgcctcagcctcccaagtagctgggactacaggcgcgtgccaccacacccaactaacttttttgcatttttagtagagacggggtttcaccatgtcggccaggctggcctgaaactcctaacctcaagcgatctgcccaccatggcctcccaaagtgctgggattacagacatgagccactgcgcctaccctaggtctgcatttttcttacacagaagtatgttaaccctttctctcgcatattgtacagtacccctccccaactttctctcttttggttttttttttttttgagatggaatctcactctgtca

SEQ ID NO: 10681 - DNA, 144 bp, Homo sapiens
tttttgtctttaataaactgctggtatcatttcagaccacttgctatttaggcacttaggaatttttcactggaattcatgtaaagaaagaccatgggcgtttgtactggatttagtattcatcattcgactgcatgactcacc

SEQ ID NO: 10682 - DNA, 389 bp, Homo sapiens
attttatttctaaaaagaataagtcacatgtttgggcaactgtaatatattcacatgcaagttagtgatactatatgattctttgtttgcctctgacaatttgtagatgcaaacttggggttggtgtgtcttaaattttctgaagtttttagcattgtcaaatataatgaatggtacagttagtatcgacagaaaatgttagatagattataatacattataaaattaaatgtgcccgatgttttaataaatgccggttttacaagttacaagttatctaatgatctgtcatgtttttgctatccagacagttacagacaaagggataattaactacatataacccatttgcggaagtaatttctgttttaattaaagtaatgcaatta

SEQ ID NO: 10683 - DNA, 555 bp, Homo sapiens
cctcagcctcccaaagtgctgctgagattacagatgtgagccaccgtgcctggccacaaatggtatcgttttattttatatgcaatggttcgtttcaagtatattgaatacagttcccttctgcctgtttgtgttgtatcacaaaactcatattgaagctctaaaaccagagcatttgtaagccactcctggattttgaatggggcatggatggactcaacctcttttaattcctccaaagaatcccatgagatttaaaaaaaactttcactttagattcaaggggtacatgtgcaggtttgttatgtgggtatattgtgcagtgctaaggtttggggtatgaatgatccccagcacccagataggacccaatatgtaggttttcagcgcttgcccctctccctctcagcccctgcggttgtccccagtgtctattgttccatcttgatgtccatgtgtacccagtgcttggctcccacttgaagtgagaacgtggtatatggtggctcacgcctgtaatcccagcactttgggaagccgaggcgggcggatcac

SEQ ID NO: 10684 - DNA, 375 bp, Homo sapiens
ggacatggtgccatagtcacttacatattccttctgagggtatgttctgtgcatccccactgctggtaccaaatctgcctgccttcattggattagaaggagcagaaagccacttagactgccttagggaaacacaagattattacgcacctgttaaatatatttttctatttataactctcgctttttaaaagggtcctgtttggtggcttttcttctactaagcacagggtctggttaagcaaggggagctgaatgtctctgtatgataatacttggggagggatttggcctccacttgatatagaaggaaaaggagccaataggaggcaggtggccacatactatgatgtaacctcgcccccaagagccccc

SEQ ID NO: 10685 - DNA, 377 bp, Homo sapiens
tctgtataaaattccttcctgtttacatcaaacagcttggttttggaggttttctgaaactttcttaaaaactgaccatttgggctgggcacggtggctcatgcctgtaatcccagcattttgggaggccgaggcgggcggaccacctgaggtcaggagttcgagaccagcctggccaatgtggtgaaaccccatctctactaaaaatacaaaaattagctgagcatggtggcgggtgcctgtaatcccggctacttgggaggctgaggcaggagaattatttgaacccaggaggcagaggttgcaatgagccgagattgcaccattgcactccagcctgggagaaaagagtcaaactccatctcaaaacaaacaaa

SEQ ID NO: 10686 - DNA, 382 bp, Homo sapiens
ggctagagtccagccagggacaagctgtcccagtgggattagccttgactttaggagcatggccaggaagccaaagaagccttccaagaatggctgcctcagcccctgcactctggtcgcccatgttgggagaagagggaaaggctgagagaatggcagaagaggacctcaggggtcctgggagaatgcagacaagccttcctccagccagaatttctcttctcgggtccttatgggcaacagccttctgcaaagttgtcctaagacttcatctaagaagtggaagaggccgggtgcagtggctcatgcctgtaatcccagcactttgggaggctgaggcgggtggatcacctgaggtcaagagtttgagaccagcctggcc

SEQ ID NO: 10687 - DNA, 672 bp, Homo sapiens
ggttatgctgcatcaggtcctaagaaaacccaccttctgccagtagtaaaatccagtaagattggtattcttttggactatgaattgggtgattttttaaagtaatataaataataggtttgttctgtatattttaatgatctttcacaagagctgtttggccttatttctatgctgaagcagattctgaacgtcttaaaatctgttcattatcagatgctgaaagataaagagcaagtaaatgaatctatttcagttttgtgggtaatttagccagtaaatttaatcttatttcctttaatctttaagttttacctactgaaggcccagaatagatttttttctcttaaatttttggcaagtataaaagcacattcagaatgtcactttcatagatactatgaatatcaattgtcaagtgtgttgatttctaagataaaatatttgagaattaatattacccaacttgtccaataaaatgtttttaagttgcctattttttaaaaaatctatcaattttgaattgcatacctagctaaatttttttaagattgaggataatatgtaaaataatttatacaagtaatataaactaagtttacttaaattatttacttatttaagaaatctaattacattttaaataaattgctgttacctgttaaaaaaaaa

SEQ ID NO: 10688 - DNA, 374 bp, Homo sapiens
ggttctctgtctccccctgaacctttagccagaaatagagatgcaccctttcttcttcagtagctttgaggatcaaagaatcttagttgccagagctgggaggggaatctcaaagattgcctagtggaacaatatgattgttcatgtgaataaactgaaactcagagagaatgtggtctatgcaagacatggcccatagtctgtgtcaaaagccaggttttctgacttgtggcccagggctctctgtagtattctgggccagcaaaatcccgtgtctctccagacacatcttctcttgcaccaaatgggcctccttgctgtgtcctcctcaaaccaccctcactcccacctctgaacctttgctgatgttcaca

SEQ ID NO: 10689 - DNA, 364 bp, Homo sapiens
ccccatggcaatgtaaaatctcctctgccaagctggtttcaacttcctcccacttcacagctgttgggccttaaactctagccttaaacaagaaacacagcactgccgggaaaacccaggaaactggcacaggctccctgaactcagtgattcccctgctggttttcttctcatgccatatgggccagctgaggccagttcccacagtctgcaaggagactccacggttcttggacacgtgtgtcttggtccctgtggtgaagggaccacttccccagtgggagccatggagaccccctgctctctgtgtccatgggttactttggcagtggttccctagcactggctagggactggacattca

SEQ ID NO: 10690 - DNA, 307 bp, Homo sapiens
agtaataactgaaataaaatcaggaatgtgcaaaattgtttcttcatacctcactttctgaagacacttctttgcattctgctgcctggcatttacacagcagactcaggacaaagggacaaatggagtgagtgaggtgggcaggagctttagaagagatgaagcaaagagagttagttttttattcaggaagatgtagagactcttaaaggagaggcaatttccgtaacaaacacctctggtttaatggaagccacatgatttatttgactactggtcactcatttttaaaaagaaaagagaaaga

SEQ ID NO: 10691 - DNA, 468 bp, Homo sapiens
aattaactccctattgtctgctaacatcccattgtccaaatctagggacatcctgagcctgatatcaatggagtgaggggaaatggggaactgcacctgaactgggagggcagtgagtgatgtatggacactgaatgatgacatgattaggatcatgtaaaagactgtctggcaatatagcagcacaaagtaaatattcttgaacattaaattaatctgctaacaactgacaaacttacctaaagggagacattaaaaagaaaaatgggaaagacacaaataatgaataaattatttaaaaggagatctccctaagacccttcagccatataaaataagagtatattcagtagattgaggtgggagcattgcttgagcccaggagtttgaggctacagtgagctatcatctcacctgtgaatagcccctgcactccagcctgggcaatatagtgagacgttatctgtt

SEQ ID NO: 10692 - DNA, 211 bp, Homo sapiens
gctgggaaacagaccagaatcaggacatgtaaaacaaggccagggtgattaagtcacctctaaggtgtaaaatgaaagctacgccttaaaacaggagcaaatcagaaccaagaatctagttcttagccaatgcaaagtagagaacagaagcactaccacaccaattcaagtatcattgtttgatcagctacttgaaacaaaggaatacaaa

SEQ ID NO: 10693 - DNA, 426 bp, Homo sapiens
gctcatgcctataatcccagcactttgggaggccaaggcaggagggtcccttgaggccaggagtgcgagaccagcctgggcaacatatcgagacctcatctctacagacaaaaattaaccgggtatggtggtgcaagcctgtagtcctaggtgcttgggaagctgaggtgggagaatctcttgagcctgggagttcaaggctttgaagctgcagtgagctaggatcacaccactgcactccagcctgggcaacagagcaagaccccatctatttaaaaactagaatgtagataatcatatgcactttctctagagcctagagctgatctgacagtcacagaatcctgaactctgtacactttcttctacttagtagaagaaagagaagtgtactaactgcctcagtgggctctaggagcttgagtg

SEQ ID NO: 10694 - DNA, 335 bp, Homo sapiens
ttttagcaactctttaacagagttacccaatgctttttttaaaaaaataaagaaggccgggcgcggtggctcacgcctgtaatcccagcactttgggaggccgagacgggcggatcacgaggtcaggagattgagaccatcctggctgacacggtgaaaccccgtctctactaaaaatacaaaaattagccgggcatggtggcgcgcgcctgtagtcccagctactcgggaggctgaggcaggagaatggcgtgaacccgggaggcggagcttgcagtgagtcaagatcgcgccactgcgctccagcctgggcaacagagcgaaactccgtcaga

SEQ ID NO: 10695 - DNA, 6581 bp, Homo sapiens
tgcggctgttaaacatagagtcatttgctttgatagtcatctgacagtctcttttgaagtttgacaagcttttacatgacccaagcctaaagagaaagccatttctttcctctattcagaagtgaactgaatgagtgtgtgcaggttcaactaagatctcataaagaagtaatctggattctaccttaatacagactaatagatgatcaaagccttgcagttctattatatcacatagggtattgtcatatttgttttaatctggatgagaaatattttaaaaatgtgtatcactttgagattttttaaaaatctcagtaatatctagccctcacaatgtaattgaccaaccaaaggaaacatcttttgactgacaagtgactgtttagggaacaagaataagttgacttactatctgagattgtcaagcatttagacagttaaatgttagtgtacaagtaggaccagacatttgaaaactatgactttaatgttaaattcttgcatctctctgaaagcaattatataatatggccagtaattgattcaggtcattctaattttgtgacagtgtttctgtatttatatacagatacagatttattttatttttgaatgattgattgctagtcaaaagaattagcatccatgtgttgccctactaaaagtagcctttatgtttcatcaaacttgttccagctaatccatattttagaggcactatttggaggccgaagcattaatacccaggaagtatattttaatatggcaaagagaactcaaagcggtttgcttagtatcaagaatattagcaaagtgaattaggggaaaagaagttttaattttgttttgtttttcttacagctttgccgggaagtaaagctttggaggaaaatcaatatcaatgaacgtgctaagatcattgatctttaccatgagaagaccattccagagaaagtgatagaatcttccccaaattaccccgatttaggacaaagtgaatttataaggacgaatcacaaagatggtctgagaaaagaaaataaaagagagcagagcttagtcagtggaggaaatcaaatgtgtaaggaacaaaaagcaacaaaaaaatcaaaagtagggtttttggatcctttggctacagacaaccaaaaggaatgtgaggcctggcctgacctgaggacttctgaggaagacagcaagagctgttctggcgccctcagtacagctcttgaagaacttgcgaaggtgagtgaagaattatgcagctttcaagaggaaattcgaaagcggtctaaccatagaaggatgaagtcagattcttttctccaggaaatgccaaatgtaactaatatacctcatggggaccccatgatcaacaatgaccagtgcattcttccaatcagtttagaaaaagaaaaacagaaaaataggaagaatctgagctgtaccaatgtgctccagagcaattctacgaaaaaatgtggaattgatacaatcgatttaaaaagaaatgaaactccaccagttcctcctccaagaagcacctctcgaaattttcccagctcggattctgaacaagcctatgaaagatggaaggaaaggttagaccacaacagctgggtgccccatgagggtcgaagtaaaaggaattacaaccctcacttccctttgagacaacaagagatgtctatgttgtatccaaatgaagggaaaacttcgaaagatggtatcatcttttcctctttggtaccagaagtcaaaatagatagcaagcctccaagtaatgaagatgttggacttagcatgtggtcatgtgacattgggataggtgcaaaaaggagcccctctacttcgtggtttcagaaaacctgctctacccccagtaatccaaaatatgaaatggtgatcccagatcaccctgctaaatctcatcctgatcttcatgtaagtaatgactgtagctcctcagtagcagagagcagtagcccacttagaaatttcagttgtggctttgaaaggactacaaggaatgagaagctggcagcaaagactgatgaatttaacagaactgtatttagaacagatagaaattgtcaggcaatacagcaaaatcacagctgctcaaaatcatcggaggatctcaagccctgtgatacctcatctactcacacaggtagcatatcacaaagtaacgatgtgtccggtatttggaaaaccaatgcccacatgcctgtgcccatggaaaatgtgcctgataatcccaccaagaaatccacaacaggcctagtaagacaaatgcagggacacctaagtcctcgcagttatcgaaatatgctccacgagcatgactggagaccgagtaatttgtctggccgtccgaggtcagctgatcccaggtcaaattatggtgttgtggaaaagctgctgaaaacctatgagacagcaacagagtctgcattgcaaaattctaagtgcttccaggataattggaccaaatgtaattctgatgtcagtggtggtgccacattaagtcagcatttagaaatgctccaaatggaacaacagtttcagcaaaagacagctgtgtgggggggacaggaagtgaagcaaggaatagatccgaaaaagataacagaggaatccatgtcagtgaacgcctcacatggaaaaggattttcccgacctgctagaccagcaaatcgtcgtctcccctccagatgggcatccagatctccatctgcaccccctgccttgcggagaactacccacaactataccatttctctgcgatccgaagcattgatggtttaagtctttggcctggattgctatattacagaagttctagtcccacttgtcaaacagagcattctgagtgtttacaggcggacctgttctcttccgacaagcaatttgaatcttaactttccatcagtcttcagtgtttttaatctaaggaataattatcttcctgcattttgatttcttagatcagaattttttaatgccatcctcattagttttccaatacaatataagttgaaacaatgtacaatattgtatattctttgttgcaagtggcagaaagtaaggttatgtgcatggccatgtgtttgtaggtgcatgtgttgaaataggaagtatcctagtatgtatttagatatgaaaaacttatgtgctagtgttgactttgaaattataacatgtatacctatatattctttgtgtttatttaaaagttttgaaaatatgcagtactgtttatattttgtataccttttaataggtatccacttaaggcatttgcagtacaaatattaattgaccacttccttggcccccagctacaatgaaaaagaagaattatgcacacatctaacattggtagatttctaaagacaactcataaataatttcttaacccatataaggataaaataataccattgatattcttgtttattctttttaaataaaaatgtcacaagtttaatagatcagccttgtaaagcaagcataaaatgttcataaatgttttatatattatttggtagtctagtatggctttaactgaatatttgatcctcagagacagtatcatgagactgcattataaatgacatgattaaatgatgaatttattttgtcagcctcagcaacaaacatttcctaaatgggatgcaaaaagaaactgaatgatgttgaattttagtttttctttaagttgtggtaagcttttagtttagctgctttaacatgaagtcatacatacttagaggtaagtcatttattatttttttcctttttctaatcttttccttaaaattaatagataacaaactaagttacttttttactaacaaggaagatcaggaataatatttctttgaaagctgaaattatacttctcacagtttgctaccaaaaaaaggcttaaactaaaccttgacatccacagtagcatcaggaatagaaatgtatattttggctacagtttgcatacagtgaacacataaaatctatattgaaaactgacagaaatatgaatgtcgaggggcttggaattctaaatggaagattttagaaggaactttgctctctactgtcactatataaaaccaattatgttatgttattagatattaactctatttaagcttttcttttactaagaaattcttatgccaaatgtattccaagagccatctccttatgatgtatttgaaccatttagagaaattcacttcattgtaccccatgacctgaggtaaagaaaataattttcaaattgcagacttccttgaaaggctcaagactgtagcatggtgatgtctagattcatactttactgtaaggacagtttcggtagttaagtggaattaaaggtctagagtgatttgtattggatggtaactaaggtctatacatctactcttttaattcttatttccttcaggaagatccttttccacaggaagctatcaaagaaaagtaaactagacaccaagtaatatcactctcataatatgctttccagctagaggggagaaaacaccaggaaagaggaaccctgggtcataaaatgacggacctgttaggaaaatgctgttgtgtgacaatggagagcctgcccaaggactgtgcaacctatctgttcctctccaccagtgtatcccaagtagtctggtatgatctgtggttccttagaatattgaggatctctttaaaaaatgaaatttctgatctcaccccatattactaaagcaaaatttccaggggtagggactgggactccagaaccattaataaaacaaaacaaaacaaagcaaaatattgatgatcaggcagatttgaaaacagtgacattgcttgatctctgaatggatggatgcccttgggtggtcacttttcttcctaggacttgcctttgttatctgtaaattagaatggctatactttcagacttcacaattttaagccacttttttctattaacagttgaatgaaccagtgggacacattttaacgtcttcttatgttgactaaaattatagttagagctgagaaaaaaaaaatagcatctagtccaactccttgattgtaaaactgaaaaactaaggttatttgaatgttctgttttctctttttaaatattttataacttttaaatggaaaaacctattaggtaaatggaaataatccttgaaaatagtttttgatgttttgtgatttttaactggtaaatttctactttaggtgggcattttcttccctagaatatgccctttattatgctatcattgctagatttaaagggacttgtaagcatttctggaaatatttgatttaaaaacatatattaatagatgttttccctagcagacttttggagcaaaaatattattttagttcagcagaggattactgatattatgggctgatctcagaaaggaataaggatgaggcagagaggagtacttgagtttgtgtgtgtgtgtgtgtgtgtgtgtttgtgtcagtgtcacataagttctccatattgccttatgtcccaaagccaaatataaaaatataaatgatgctttgtataattcattttatcaaaaattacccataactttcatttgtttttatatcgacaatgaagatgatcatatttcattttgcagatgtggccataaaatattatttacttctacataggtgattttaccaggtttagttatcctgagaaaacatctggacttaagagtttctgcttccctacaaagatctttaaagttatttttaggcacatttgtgacaaacaactacttgatattgaaatctccttcagccattagaagctatcaaataaagtaggtgtaaaaacaactgtctgtggcatttgtatacatcgagaacatttttctttccctcattttctgcagtgaactccagtaaagctaagtgtcttatgaaatctaaactcatatatgtacacagttcactctagcttcttccaaaatatctctaggtagtacaactgaagccaaacctgcctgacttcctgctcctggccacccaaaactccatatggcttctcgtacactgacatcctctctctacccatttaactgctaattgagtctgataaaagtcttctttgaaaaaagtttttacttctaagatttgcatttacatcataaaattaaacgattttcaggaaaatcagattttttttattacagtactatttgctttaaattcggcatgtttttcttaagtagcaagtacatgtatcggaacttagaactggtgggcgcggtggctcttgcctgtaatcccagcactttgggaggccaaggtggggggatcacgaggtcaggagatggagacaatcctggtttcatcacggtgaaaccccctctctgctaaaaatacaaaaaattagccaggcattgtggtggtcacctgtagtcccagctgctcgggaggctgaggcaggagaatggcatgaacccgggaggcagagcttgcagtgagcagagatcgcgccactgcactccagcctgggtgacagagtgagactctgtctc

SEQ ID NO: 10696 - DNA, 792 bp, Homo sapiens
agtccggcggccacgacagcgcgcggcaccacgacaacgccaagaccgaggccctgcaggaggagctgaaggcggcgcgcctgcagatcaacgagctcagcggcaaggtcatgcagctgcagtacgagaaccgcgtgcttatgtccaacatgcagcgctacgacctggcctcgcacctgggcatccgcggcagcccccgcgacagcgacgccgagagcgacgcgggcaagaaggagagcgacgacgactcgcggcctccgcaccgcaagcgcgaagggcccatcggcggcgagagcgactcggaggaggtgcgcaacatccgctgcctcacgcccactcgctccttctacccggcgcccgggccctggcccaagagcttctccgatcggcagcagatgaaggacatccgctcggaggccgagcgcctgggcaagaccatcgaccggctcatcgccgacacgagcaccatcatcaccgaggcgcgcatctacgtggccaacggggacctgttcggactcatggacgaggaggacgacggcagccgcatccgggagcacgagctgctctaccgcatcaacgctcagatgaaggccttccgcaaggagctgcagaccttcatcgaccgcctcgaggtgcccaagtctgcggacgaccgcggcgccgaggagcccatttccgtgagtcaggtacagttctgcctattgcgagccacggcggtggccaggctggcccgtggagccgcgtccctggggggcgtctcggcgcccggactgccgcgccccgcttgaggga

SEQ ID NO: 10697 - DNA, 6970 bp, Homo sapiens
agtccggcggccacgacagcgcgcggcaccacgacaacgccaagaccgaggccctgcaggaggagctgaaggcggcgcgcctgcagatcaacgagctcagcggcaaggtcatgcagctgcagtacgagaaccgcgtgcttatgtccaacatgcagcgctacgacctggcctcgcacctgggcatccgcggcagcccccgcgacagcgacgccgagagcgacgcgggcaagaaggagagcgacgacgactcgcggcctccgcaccgcaagcgcgaagggcccatcggcggcgagagcgactcggaggaggtgcgcaacatccgctgcctcacgcccactcgctccttctacccggcgcccgggccctggcccaagagcttctccgatcggcagcagatgaaggacatccgctcggaggccgagcgcctgggcaagaccatcgaccggctcatcgccgacacgagcaccatcatcaccgaggcgcgcatctacgtggccaacggggacctgttcggactcatggacgaggaggacgacggcagccgcatccgggagcacgagctgctctaccgcatcaacgctcagatgaaggccttccgcaaggagctgcagaccttcatcgaccgcctcgaggtgcccaagtctgcggacgaccgcggcgccgaggagcccatttccgtgagtcagatgttccagcctatcattttacttattctcattcttgtattattttcatcactttcttacacaacaatatttaaacttgtcttcctttttacactgttttttgtactgtaaatctttcatcatttaccattcattgtagtattttcagtttgtttattttgttcacccttcaagacaagaagtaaaagaagtataatttctgtagtaaccaatgctataaaaacactgaagactgcttatttctttaaaaagatacaactcatcttaccaagaccaaattcaataagaagcccaaacactaaaatatttcaggctttattttaaaggcaagtgagactgcttcaaataaaacaacttcaagcttccaagaaacagttaagaggaggcagagaagagcagaaacacttctttgctgacacttacactgttgccatggacctacataagcagtgggagaacacagagactaactggcataaggaaaagatggaattactggaccagtttgacaatgaaagaaaggaatgggaaagtcaatggaagattatgcagaagaaaatagaagagctttgccgggaagtaaagctttggaggaaaatcaatatcaatgaacgtgctaagatcattgatctttaccatgagaagaccattccagagaaagtgatagaatcttccccaaattaccccgatttaggacaaagtgaatttataaggacgaatcacaaagatggtctgagaaaagaaaataaaagagagcagagcttagtcagtggaggaaatcaaatgtgtaaggaacaaaaagcaacaaaaaaatcaaaagtagggtttttggatcctttggctacagacaaccaaaaggaatgtgaggcctggcctgacctgaggacttctgaggaagacagcaagagctgttctggcgccctcagtacagctcttgaagaacttgcgaaggtgagtgaagaattatgcagctttcaagaggaaattcgaaagcggtctaaccatagaaggatgaagtcagattcttttctccaggaaatgccaaatgtaactaatatacctcatggggaccccatgatcaacaatgaccagtgcattcttccaatcagtttagaaaaagaaaaacagaaaaataggaagaatctgagctgtaccaatgtgctccagagcaattctacgaaaaaatgtggaattgatacaatcgatttaaaaagaaatgaaactccaccagttcctcctccaagaagcacctctcgaaattttcccagctcggattctgaacaagcctatgaaagatggaaggaaaggttagaccacaacagctgggtgccccatgagggtcgaagtaaaaggaattacaaccctcacttccctttgagacaacaagagatgtctatgttgtatccaaatgaagggaaaacttcgaaagatggtatcatcttttcctctttggtaccagaagtcaaaatagatagcaagcctccaagtaatgaagatgttggacttagcatgtggtcatgtgacattgggataggtgcaaaaaggagcccctctacttcgtggtttcagaaaacctgctctacccccagtaatccaaaatatgaaatggtgatcccagatcaccctgctaaatctcatcctgatcttcatgtaagtaatgactgtagctcctcagtagcagagagcagtagcccacttagaaatttcagttgtggctttgaaaggactacaaggaatgagaagctggcagcaaagactgatgaatttaacagaactgtatttagaacagatagaaattgtcaggcaatacagcaaaatcacagctgctcaaaatcatcggaggatctcaagccctgtgatacctcatctactcacacaggtagcatatcacaaagtaacgatgtgtccggtatttggaaaaccaatgcccacatgcctgtgcccatggaaaatgtgcctgataatcccaccaagaaatccacaacaggcctagtaagacaaatgcagggacacctaagtcctcgcagttatcgaaatatgctccacgagcatgactggagaccgagtaatttgtctggccgtccgaggtcagctgatcccaggtcaaattatggtgttgtggaaaagctgctgaaaacctatgagacagcaacagagtctgcattgcaaaattctaagtgcttccaggataattggaccaaatgtaattctgatgtcagtggtggtgccacattaagtcagcatttagaaatgctccaaatggaacaacagtttcagcaaaagacagctgtgtgggggggacaggaagtgaagcaaggaatagatccgaaaaagataacagaggaatccatgtcagtgaacgcctcacatggaaaaggattttcccgacctgctagaccagcaaatcgtcgtctcccctccagatgggcatccagatctccatctgcaccccctgccttgcggagaactacccacaactataccatttctctgcgatccgaagcattgatggtttaagtctttggcctggattgctatattacagaagttctagtcccacttgtcaaacagagcattctgagtgtttacaggcggacctgttctcttccgacaagcaatttgaatcttaactttccatcagtcttcagtgtttttaatctaaggaataattatcttcctgcattttgatttcttagatcagaattttttaatgccatcctcattagttttccaatacaatataagttgaaacaatgtacaatattgtatattctttgttgcaagtggcagaaagtaaggttatgtgcatggccatgtgtttgtaggtgcatgtgttgaaataggaagtatcctagtatgtatttagatatgaaaaacttatgtgctagtgttgactttgaaattataacatgtatacctatatattctttgtgtttatttaaaagttttgaaaatatgcagtactgtttatattttgtataccttttaataggtatccacttaaggcatttgcagtacaaatattaattgaccacttccttggcccccagctacaatgaaaaagaagaattatgcacacatctaacattggtagatttctaaagacaactcataaataatttcttaacccatataaggataaaataataccattgatattcttgtttattctttttaaataaaaatgtcacaagtttaatagatcagccttgtaaagcaagcataaaatgttcataaatgttttatatattatttggtagtctagtatggctttaactgaatatttgatcctcagagacagtatcatgagactgcattataaatgacatgattaaatgatgaatttattttgtcagcctcagcaacaaacatttcctaaatgggatgcaaaaagaaactgaatgatgttgaattttagtttttctttaagttgtggtaagcttttagtttagctgctttaacatgaagtcatacatacttagaggtaagtcatttattatttttttcctttttctaatcttttccttaaaattaatagataacaaactaagttacttttttactaacaaggaagatcaggaataatatttctttgaaagctgaaattatacttctcacagtttgctaccaaaaaaaggcttaaactaaaccttgacatccacagtagcatcaggaatagaaatgtatattttggctacagtttgcatacagtgaacacataaaatctatattgaaaactgacagaaatatgaatgtcgaggggcttggaattctaaatggaagattttagaaggaactttgctctctactgtcactatataaaaccaattatgttatgttattagatattaactctatttaagcttttcttttactaagaaattcttatgccaaatgtattccaagagccatctccttatgatgtatttgaaccatttagagaaattcacttcattgtaccccatgacctgaggtaaagaaaataattttcaaattgcagacttccttgaaaggctcaagactgtagcatggtgatgtctagattcatactttactgtaaggacagtttcggtagttaagtggaattaaaggtctagagtgatttgtattggatggtaactaaggtctatacatctactcttttaattcttatttccttcaggaagatccttttccacaggaagctatcaaagaaaagtaaactagacaccaagtaatatcactctcataatatgctttccagctagaggggagaaaacaccaggaaagaggaaccctgggtcataaaatgacggacctgttaggaaaatgctgttgtgtgacaatggagagcctgcccaaggactgtgcaacctatctgttcctctccaccagtgtatcccaagtagtctggtatgatctgtggttccttagaatattgaggatctctttaaaaaatgaaatttctgatctcaccccatattactaaagcaaaatttccaggggtagggactgggactccagaaccattaataaaacaaaacaaaacaaagcaaaatattgatgatcaggcagatttgaaaacagtgacattgcttgatctctgaatggatggatgcccttgggtggtcacttttcttcctaggacttgcctttgttatctgtaaattagaatggctatactttcagacttcacaattttaagccacttttttctattaacagttgaatgaaccagtgggacacattttaacgtcttcttatgttgactaaaattatagttagagctgagaaaaaaaaaatagcatctagtccaactccttgattgtaaaactgaaaaactaaggttatttgaatgttctgttttctctttttaaatattttataacttttaaatggaaaaacctattaggtaaatggaaataatccttgaaaatagtttttgatgttttgtgatttttaactggtaaatttctactttaggtgggcattttcttccctagaatatgccctttattatgctatcattgctagatttaaagggacttgtaagcatttctggaaatatttgatttaaaaacatatattaatagatgttttccctagcagacttttggagcaaaaatattattttagttcagcagaggattactgatattatgggctgatctcagaaaggaataaggatgaggcagagaggagtacttgagtttgtgtgtgtgtgtgtgtgtgtgtgtttgtgtcagtgtcacataagttctccatattgccttatgtcccaaagccaaatataaaaatataaatgatgctttgtataattcattttatcaaaaattacccataactttcatttgtttttatatcgacaatgaagatgatcatatttcattttgcagatgtggccataaaatattatttacttctacataggtgattttaccaggtttagttatcctgagaaaacatctggacttaagagtttctgcttccctacaaagatctttaaagttatttttaggcacatttgtgacaaacaactacttgatattgaaatctccttcagccattagaagctatcaaataaagtaggtgtaaaaacaactgtctgtggcatttgtatacatcgagaacatttttctttccctcattttctgcagtgaactccagtaaagctaagtgtcttatgaaatctaaactcatatatgtacacagttcactctagcttcttccaaaatatctctaggtagtacaactgaagccaaacctgcctgacttcctgctcctggccacccaaaactccatatggcttctcgtacactgacatcctctctctacccatttaactgctaattgagtctgataaaagtcttctttgaaaaaagtttttacttctaagatttgcatttacatcataaaattaaacgattttcaggaaaatcagattttttttattacagtactatttgctttaaattcggcatgtttttcttaagtagcaagtacatgtatcggaacttagaactggtgggcgcggtggctcttgcctgtaatcccagcactttgggaggccaaggtggggggatcacgaggtcaggagatggagacaatcctggtttcatcacggtgaaaccccctctctgctaaaaatacaaaaaattagccaggcattgtggtggtcacctgtagtcccagctgctcgggaggctgaggcaggagaatggcatgaacccgggaggcagagcttgcagtgagcagagatcgcgccactgcactccagcctgggtgacagagtgagactctgtctc

SEQ ID NO: 10698 - DNA, 6796 bp, Homo sapiens
agtccggcggccacgacagcgcgcggcaccacgacaacgccaagaccgaggccctgcaggaggagctgaaggcggcgcgcctgcagatcaacgagctcagcggcaaggtcatgcagctgcagtacgagaaccgcgtgcttatgtccaacatgcagcgctacgacctggcctcgcacctgggcatccgcggcagcccccgcgacagcgacgccgagagcgacgcgggcaagaaggagagcgacgacgactcgcggcctccgcaccgcaagcgcgaagggcccatcggcggcgagagcgactcggaggaggtgcgcaacatccgctgcctcacgcccactcgctccttctacccggcgcccgggccctggcccaagagcttctccgatcggcagcagatgaaggacatccgctcggaggccgagcgcctgggcaagaccatcgaccggctcatcgccgacacgagcaccatcatcaccgaggcgcgcatctacgtggccaacggggacctgttcggactcatggacgaggaggacgacggcagccgcatccgggagcacgagctgctctaccgcatcaacgctcagatgaaggccttccgcaaggagctgcagaccttcatcgaccgcctcgaggtgcccaagtctgcggacgaccgcggcgccgaggagcccatttccgtgagtcagacaagaagtaaaagaagtataatttctgtagtaaccaatgctataaaaacactgaagactgcttatttctttaaaaagatacaactcatcttaccaagaccaaattcaataagaagcccaaacactaaaatatttcaggctttattttaaaggcaagtgagactgcttcaaataaaacaacttcaagcttccaagaaacagttaagaggaggcagagaagagcagaaacacttctttgctgacacttacactgttgccatggacctacataagcagtgggagaacacagagactaactggcataaggaaaagatggaattactggaccagtttgacaatgaaagaaaggaatgggaaagtcaatggaagattatgcagaagaaaatagaagagctttgccgggaagtaaagctttggaggaaaatcaatatcaatgaacgtgctaagatcattgatctttaccatgagaagaccattccagagaaagtgatagaatcttccccaaattaccccgatttaggacaaagtgaatttataaggacgaatcacaaagatggtctgagaaaagaaaataaaagagagcagagcttagtcagtggaggaaatcaaatgtgtaaggaacaaaaagcaacaaaaaaatcaaaagtagggtttttggatcctttggctacagacaaccaaaaggaatgtgaggcctggcctgacctgaggacttctgaggaagacagcaagagctgttctggcgccctcagtacagctcttgaagaacttgcgaaggtgagtgaagaattatgcagctttcaagaggaaattcgaaagcggtctaaccatagaaggatgaagtcagattcttttctccaggaaatgccaaatgtaactaatatacctcatggggaccccatgatcaacaatgaccagtgcattcttccaatcagtttagaaaaagaaaaacagaaaaataggaagaatctgagctgtaccaatgtgctccagagcaattctacgaaaaaatgtggaattgatacaatcgatttaaaaagaaatgaaactccaccagttcctcctccaagaagcacctctcgaaattttcccagctcggattctgaacaagcctatgaaagatggaaggaaaggttagaccacaacagctgggtgccccatgagggtcgaagtaaaaggaattacaaccctcacttccctttgagacaacaagagatgtctatgttgtatccaaatgaagggaaaacttcgaaagatggtatcatcttttcctctttggtaccagaagtcaaaatagatagcaagcctccaagtaatgaagatgttggacttagcatgtggtcatgtgacattgggataggtgcaaaaaggagcccctctacttcgtggtttcagaaaacctgctctacccccagtaatccaaaatatgaaatggtgatcccagatcaccctgctaaatctcatcctgatcttcatgtaagtaatgactgtagctcctcagtagcagagagcagtagcccacttagaaatttcagttgtggctttgaaaggactacaaggaatgagaagctggcagcaaagactgatgaatttaacagaactgtatttagaacagatagaaattgtcaggcaatacagcaaaatcacagctgctcaaaatcatcggaggatctcaagccctgtgatacctcatctactcacacaggtagcatatcacaaagtaacgatgtgtccggtatttggaaaaccaatgcccacatgcctgtgcccatggaaaatgtgcctgataatcccaccaagaaatccacaacaggcctagtaagacaaatgcagggacacctaagtcctcgcagttatcgaaatatgctccacgagcatgactggagaccgagtaatttgtctggccgtccgaggtcagctgatcccaggtcaaattatggtgttgtggaaaagctgctgaaaacctatgagacagcaacagagtctgcattgcaaaattctaagtgcttccaggataattggaccaaatgtaattctgatgtcagtggtggtgccacattaagtcagcatttagaaatgctccaaatggaacaacagtttcagcaaaagacagctgtgtgggggggacaggaagtgaagcaaggaatagatccgaaaaagataacagaggaatccatgtcagtgaacgcctcacatggaaaaggattttcccgacctgctagaccagcaaatcgtcgtctcccctccagatgggcatccagatctccatctgcaccccctgccttgcggagaactacccacaactataccatttctctgcgatccgaagcattgatggtttaagtctttggcctggattgctatattacagaagttctagtcccacttgtcaaacagagcattctgagtgtttacaggcggacctgttctcttccgacaagcaatttgaatcttaactttccatcagtcttcagtgtttttaatctaaggaataattatcttcctgcattttgatttcttagatcagaattttttaatgccatcctcattagttttccaatacaatataagttgaaacaatgtacaatattgtatattctttgttgcaagtggcagaaagtaaggttatgtgcatggccatgtgtttgtaggtgcatgtgttgaaataggaagtatcctagtatgtatttagatatgaaaaacttatgtgctagtgttgactttgaaattataacatgtatacctatatattctttgtgtttatttaaaagttttgaaaatatgcagtactgtttatattttgtataccttttaataggtatccacttaaggcatttgcagtacaaatattaattgaccacttccttggcccccagctacaatgaaaaagaagaattatgcacacatctaacattggtagatttctaaagacaactcataaataatttcttaacccatataaggataaaataataccattgatattcttgtttattctttttaaataaaaatgtcacaagtttaatagatcagccttgtaaagcaagcataaaatgttcataaatgttttatatattatttggtagtctagtatggctttaactgaatatttgatcctcagagacagtatcatgagactgcattataaatgacatgattaaatgatgaatttattttgtcagcctcagcaacaaacatttcctaaatgggatgcaaaaagaaactgaatgatgttgaattttagtttttctttaagttgtggtaagcttttagtttagctgctttaacatgaagtcatacatacttagaggtaagtcatttattatttttttcctttttctaatcttttccttaaaattaatagataacaaactaagttacttttttactaacaaggaagatcaggaataatatttctttgaaagctgaaattatacttctcacagtttgctaccaaaaaaaggcttaaactaaaccttgacatccacagtagcatcaggaatagaaatgtatattttggctacagtttgcatacagtgaacacataaaatctatattgaaaactgacagaaatatgaatgtcgaggggcttggaattctaaatggaagattttagaaggaactttgctctctactgtcactatataaaaccaattatgttatgttattagatattaactctatttaagcttttcttttactaagaaattcttatgccaaatgtattccaagagccatctccttatgatgtatttgaaccatttagagaaattcacttcattgtaccccatgacctgaggtaaagaaaataattttcaaattgcagacttccttgaaaggctcaagactgtagcatggtgatgtctagattcatactttactgtaaggacagtttcggtagttaagtggaattaaaggtctagagtgatttgtattggatggtaactaaggtctatacatctactcttttaattcttatttccttcaggaagatccttttccacaggaagctatcaaagaaaagtaaactagacaccaagtaatatcactctcataatatgctttccagctagaggggagaaaacaccaggaaagaggaaccctgggtcataaaatgacggacctgttaggaaaatgctgttgtgtgacaatggagagcctgcccaaggactgtgcaacctatctgttcctctccaccagtgtatcccaagtagtctggtatgatctgtggttccttagaatattgaggatctctttaaaaaatgaaatttctgatctcaccccatattactaaagcaaaatttccaggggtagggactgggactccagaaccattaataaaacaaaacaaaacaaagcaaaatattgatgatcaggcagatttgaaaacagtgacattgcttgatctctgaatggatggatgcccttgggtggtcacttttcttcctaggacttgcctttgttatctgtaaattagaatggctatactttcagacttcacaattttaagccacttttttctattaacagttgaatgaaccagtgggacacattttaacgtcttcttatgttgactaaaattatagttagagctgagaaaaaaaaaatagcatctagtccaactccttgattgtaaaactgaaaaactaaggttatttgaatgttctgttttctctttttaaatattttataacttttaaatggaaaaacctattaggtaaatggaaataatccttgaaaatagtttttgatgttttgtgatttttaactggtaaatttctactttaggtgggcattttcttccctagaatatgccctttattatgctatcattgctagatttaaagggacttgtaagcatttctggaaatatttgatttaaaaacatatattaatagatgttttccctagcagacttttggagcaaaaatattattttagttcagcagaggattactgatattatgggctgatctcagaaaggaataaggatgaggcagagaggagtacttgagtttgtgtgtgtgtgtgtgtgtgtgtgtttgtgtcagtgtcacataagttctccatattgccttatgtcccaaagccaaatataaaaatataaatgatgctttgtataattcattttatcaaaaattacccataactttcatttgtttttatatcgacaatgaagatgatcatatttcattttgcagatgtggccataaaatattatttacttctacataggtgattttaccaggtttagttatcctgagaaaacatctggacttaagagtttctgcttccctacaaagatctttaaagttatttttaggcacatttgtgacaaacaactacttgatattgaaatctccttcagccattagaagctatcaaataaagtaggtgtaaaaacaactgtctgtggcatttgtatacatcgagaacatttttctttccctcattttctgcagtgaactccagtaaagctaagtgtcttatgaaatctaaactcatatatgtacacagttcactctagcttcttccaaaatatctctaggtagtacaactgaagccaaacctgcctgacttcctgctcctggccacccaaaactccatatggcttctcgtacactgacatcctctctctacccatttaactgctaattgagtctgataaaagtcttctttgaaaaaagtttttacttctaagatttgcatttacatcataaaattaaacgattttcaggaaaatcagattttttttattacagtactatttgctttaaattcggcatgtttttcttaagtagcaagtacatgtatcggaacttagaactggtgggcgcggtggctcttgcctgtaatcccagcactttgggaggccaaggtggggggatcacgaggtcaggagatggagacaatcctggtttcatcacggtgaaaccccctctctgctaaaaatacaaaaaattagccaggcattgtggtggtcacctgtagtcccagctgctcgggaggctgaggcaggagaatggcatgaacccgggaggcagagcttgcagtgagcagagatcgcgccactgcactccagcctgggtgacagagtgagactctgtctc

SEQ ID NO: 10699 - DNA, 6227 bp, Homo sapiens
gagcagctttttgacttgtaaaagtggtgaaggtttcaaagggacttgtcagtactgctctgtggaatggttggacttattttgcatccccttttcttgtaaagaatcgagattcaccgagctgagacttttctctttaagacagctagccatccactttcttccactgctaattgaccagtggtcgagcatccataggatttctccccagtgtgaaaggctttattttaaaggcaagtgagactgcttcaaataaaacaacttcaagcttccaagaaacagttaagaggaggcagagaagagcagaaacacttctttgctgacacttacactgttgccatggacctacataagcagtgggagaacacagagactaactggcataaggaaaagatggaattactggaccagtttgacaatgaaagaaaggaatgggaaagtcaatggaagattatgcagaagaaaatagaagaggcatcaactctagtgcttctctcaactgagttatcgctttgccgggaagtaaagctttggaggaaaatcaatatcaatgaacgtgctaagatcattgatctttaccatgagaagaccattccagagaaagtgatagaatcttccccaaattaccccgatttaggacaaagtgaatttataaggacgaatcacaaagatggtctgagaaaagaaaataaaagagagcagagcttagtcagtggaggaaatcaaatgtgtaaggaacaaaaagcaacaaaaaaatcaaaagtagggtttttggatcctttggctacagacaaccaaaaggaatgtgaggcctggcctgacctgaggacttctgaggaagacagcaagagctgttctggcgccctcagtacagctcttgaagaacttgcgaaggtgagtgaagaattatgcagctttcaagaggaaattcgaaagcggtctaaccatagaaggatgaagtcagattcttttctccaggaaatgccaaatgtaactaatatacctcatggggaccccatgatcaacaatgaccagtgcattcttccaatcagtttagaaaaagaaaaacagaaaaataggaagaatctgagctgtaccaatgtgctccagagcaattctacgaaaaaatgtggaattgatacaatcgatttaaaaagaaatgaaactccaccagttcctcctccaagaagcacctctcgaaattttcccagctcggattctgaacaagcctatgaaagatggaaggaaaggttagaccacaacagctgggtgccccatgagggtcgaagtaaaaggaattacaaccctcacttccctttgagacaacaagagatgtctatgttgtatccaaatgaagggaaaacttcgaaagatggtatcatcttttcctctttggtaccagaagtcaaaatagatagcaagcctccaagtaatgaagatgttggacttagcatgtggtcatgtgacattgggataggtgcaaaaaggagcccctctacttcgtggtttcagaaaacctgctctacccccagtaatccaaaatatgaaatggtgatcccagatcaccctgctaaatctcatcctgatcttcatgtaagtaatgactgtagctcctcagtagcagagagcagtagcccacttagaaatttcagttgtggctttgaaaggactacaaggaatgagaagctggcagcaaagactgatgaatttaacagaactgtatttagaacagatagaaattgtcaggcaatacagcaaaatcacagctgctcaaaatcatcggaggatctcaagccctgtgatacctcatctactcacacaggtagcatatcacaaagtaacgatgtgtccggtatttggaaaaccaatgcccacatgcctgtgcccatggaaaatgtgcctgataatcccaccaagaaatccacaacaggcctagtaagacaaatgcagggacacctaagtcctcgcagttatcgaaatatgctccacgagcatgactggagaccgagtaatttgtctggccgtccgaggtcagctgatcccaggtcaaattatggtgttgtggaaaagctgctgaaaacctatgagacagcaacagagtctgcattgcaaaattctaagtgcttccaggataattggaccaaatgtaattctgatgtcagtggtggtgccacattaagtcagcatttagaaatgctccaaatggaacaacagtttcagcaaaagacagctgtgtgggggggacaggaagtgaagcaaggaatagatccgaaaaagataacagaggaatccatgtcagtgaacgcctcacatggaaaaggattttcccgacctgctagaccagcaaatcgtcgtctcccctccagatgggcatccagatctccatctgcaccccctgccttgcggagaactacccacaactataccatttctctgcgatccgaagcattgatggtttaagtctttggcctggattgctatattacagaagttctagtcccacttgtcaaacagagcattctgagtgtttacaggcggacctgttctcttccgacaagcaatttgaatcttaactttccatcagtcttcagtgtttttaatctaaggaataattatcttcctgcattttgatttcttagatcagaattttttaatgccatcctcattagttttccaatacaatataagttgaaacaatgtacaatattgtatattctttgttgcaagtggcagaaagtaaggttatgtgcatggccatgtgtttgtaggtgcatgtgttgaaataggaagtatcctagtatgtatttagatatgaaaaacttatgtgctagtgttgactttgaaattataacatgtatacctatatattctttgtgtttatttaaaagttttgaaaatatgcagtactgtttatattttgtataccttttaataggtatccacttaaggcatttgcagtacaaatattaattgaccacttccttggcccccagctacaatgaaaaagaagaattatgcacacatctaacattggtagatttctaaagacaactcataaataatttcttaacccatataaggataaaataataccattgatattcttgtttattctttttaaataaaaatgtcacaagtttaatagatcagccttgtaaagcaagcataaaatgttcataaatgttttatatattatttggtagtctagtatggctttaactgaatatttgatcctcagagacagtatcatgagactgcattataaatgacatgattaaatgatgaatttattttgtcagcctcagcaacaaacatttcctaaatgggatgcaaaaagaaactgaatgatgttgaattttagtttttctttaagttgtggtaagcttttagtttagctgctttaacatgaagtcatacatacttagaggtaagtcatttattatttttttcctttttctaatcttttccttaaaattaatagataacaaactaagttacttttttactaacaaggaagatcaggaataatatttctttgaaagctgaaattatacttctcacagtttgctaccaaaaaaaggcttaaactaaaccttgacatccacagtagcatcaggaatagaaatgtatattttggctacagtttgcatacagtgaacacataaaatctatattgaaaactgacagaaatatgaatgtcgaggggcttggaattctaaatggaagattttagaaggaactttgctctctactgtcactatataaaaccaattatgttatgttattagatattaactctatttaagcttttcttttactaagaaattcttatgccaaatgtattccaagagccatctccttatgatgtatttgaaccatttagagaaattcacttcattgtaccccatgacctgaggtaaagaaaataattttcaaattgcagacttccttgaaaggctcaagactgtagcatggtgatgtctagattcatactttactgtaaggacagtttcggtagttaagtggaattaaaggtctagagtgatttgtattggatggtaactaaggtctatacatctactcttttaattcttatttccttcaggaagatccttttccacaggaagctatcaaagaaaagtaaactagacaccaagtaatatcactctcataatatgctttccagctagaggggagaaaacaccaggaaagaggaaccctgggtcataaaatgacggacctgttaggaaaatgctgttgtgtgacaatggagagcctgcccaaggactgtgcaacctatctgttcctctccaccagtgtatcccaagtagtctggtatgatctgtggttccttagaatattgaggatctctttaaaaaatgaaatttctgatctcaccccatattactaaagcaaaatttccaggggtagggactgggactccagaaccattaataaaacaaaacaaaacaaagcaaaatattgatgatcaggcagatttgaaaacagtgacattgcttgatctctgaatggatggatgcccttgggtggtcacttttcttcctaggacttgcctttgttatctgtaaattagaatggctatactttcagacttcacaattttaagccacttttttctattaacagttgaatgaaccagtgggacacattttaacgtcttcttatgttgactaaaattatagttagagctgagaaaaaaaaaatagcatctagtccaactccttgattgtaaaactgaaaaactaaggttatttgaatgttctgttttctctttttaaatattttataacttttaaatggaaaaacctattaggtaaatggaaataatccttgaaaatagtttttgatgttttgtgatttttaactggtaaatttctactttaggtgggcattttcttccctagaatatgccctttattatgctatcattgctagatttaaagggacttgtaagcatttctggaaatatttgatttaaaaacatatattaatagatgttttccctagcagacttttggagcaaaaatattattttagttcagcagaggattactgatattatgggctgatctcagaaaggaataaggatgaggcagagaggagtacttgagtttgtgtgtgtgtgtgtgtgtgtgtgtttgtgtcagtgtcacataagttctccatattgccttatgtcccaaagccaaatataaaaatataaatgatgctttgtataattcattttatcaaaaattacccataactttcatttgtttttatatcgacaatgaagatgatcatatttcattttgcagatgtggccataaaatattatttacttctacataggtgattttaccaggtttagttatcctgagaaaacatctggacttaagagtttctgcttccctacaaagatctttaaagttatttttaggcacatttgtgacaaacaactacttgatattgaaatctccttcagccattagaagctatcaaataaagtaggtgtaaaaacaactgtctgtggcatttgtatacatcgagaacatttttctttccctcattttctgcagtgaactccagtaaagctaagtgtcttatgaaatctaaactcatatatgtacacagttcactctagcttcttccaaaatatctctaggtagtacaactgaagccaaacctgcctgacttcctgctcctggccacccaaaactccatatggcttctcgtacactgacatcctctctctacccatttaactgctaattgagtctgataaaagtcttctttgaaaaaagtttttacttctaagatttgcatttacatcataaaattaaacgattttcaggaaaatcagattttttttattacagtactatttgctttaaattcggcatgtttttcttaagtagcaagtacatgtatcggaacttagaactggtgggcgcggtggctcttgcctgtaatcccagcactttgggaggccaaggtggggggatcacgaggtcaggagatggagacaatcctggtttcatcacggtgaaaccccctctctgctaaaaatacaaaaaattagccaggcattgtggtggtcacctgtagtcccagctgctcgggaggctgaggcaggagaatggcatgaacccgggaggcagagcttgcagtgagcagagatcgcgccactgcactccagcctgggtgacagagtgagactctgtctc

SEQ ID NO: 10700 - DNA, 6191 bp, Homo sapiens
gagcagctttttgacttgtaaaagtggtgaaggtttcaaagggacttgtcagtactgctctgtggaatggttggacttattttgcatccccttttcttgtaaagaatcgagattcaccgagctgagacttttctctttaagacagctagccatccactttcttccactgctaattgaccagtggtcgagcatccataggatttctccccagtgtgaaaggctttattttaaaggcaagtgagactgcttcaaataaaacaacttcaagcttccaagaaacagttaagaggaggcagagaagagcagaaacacttctttgctgacacttacactgttgccatggacctacataagcagtgggagaacacagagactaactggcataaggaaaagatggaattactggaccagtttgacaatgaaagaaaggaatgggaaagtcaatggaagattatgcagaagaaaatagaagagctttgccgggaagtaaagctttggaggaaaatcaatatcaatgaacgtgctaagatcattgatctttaccatgagaagaccattccagagaaagtgatagaatcttccccaaattaccccgatttaggacaaagtgaatttataaggacgaatcacaaagatggtctgagaaaagaaaataaaagagagcagagcttagtcagtggaggaaatcaaatgtgtaaggaacaaaaagcaacaaaaaaatcaaaagtagggtttttggatcctttggctacagacaaccaaaaggaatgtgaggcctggcctgacctgaggacttctgaggaagacagcaagagctgttctggcgccctcagtacagctcttgaagaacttgcgaaggtgagtgaagaattatgcagctttcaagaggaaattcgaaagcggtctaaccatagaaggatgaagtcagattcttttctccaggaaatgccaaatgtaactaatatacctcatggggaccccatgatcaacaatgaccagtgcattcttccaatcagtttagaaaaagaaaaacagaaaaataggaagaatctgagctgtaccaatgtgctccagagcaattctacgaaaaaatgtggaattgatacaatcgatttaaaaagaaatgaaactccaccagttcctcctccaagaagcacctctcgaaattttcccagctcggattctgaacaagcctatgaaagatggaaggaaaggttagaccacaacagctgggtgccccatgagggtcgaagtaaaaggaattacaaccctcacttccctttgagacaacaagagatgtctatgttgtatccaaatgaagggaaaacttcgaaagatggtatcatcttttcctctttggtaccagaagtcaaaatagatagcaagcctccaagtaatgaagatgttggacttagcatgtggtcatgtgacattgggataggtgcaaaaaggagcccctctacttcgtggtttcagaaaacctgctctacccccagtaatccaaaatatgaaatggtgatcccagatcaccctgctaaatctcatcctgatcttcatgtaagtaatgactgtagctcctcagtagcagagagcagtagcccacttagaaatttcagttgtggctttgaaaggactacaaggaatgagaagctggcagcaaagactgatgaatttaacagaactgtatttagaacagatagaaattgtcaggcaatacagcaaaatcacagctgctcaaaatcatcggaggatctcaagccctgtgatacctcatctactcacacaggtagcatatcacaaagtaacgatgtgtccggtatttggaaaaccaatgcccacatgcctgtgcccatggaaaatgtgcctgataatcccaccaagaaatccacaacaggcctagtaagacaaatgcagggacacctaagtcctcgcagttatcgaaatatgctccacgagcatgactggagaccgagtaatttgtctggccgtccgaggtcagctgatcccaggtcaaattatggtgttgtggaaaagctgctgaaaacctatgagacagcaacagagtctgcattgcaaaattctaagtgcttccaggataattggaccaaatgtaattctgatgtcagtggtggtgccacattaagtcagcatttagaaatgctccaaatggaacaacagtttcagcaaaagacagctgtgtgggggggacaggaagtgaagcaaggaatagatccgaaaaagataacagaggaatccatgtcagtgaacgcctcacatggaaaaggattttcccgacctgctagaccagcaaatcgtcgtctcccctccagatgggcatccagatctccatctgcaccccctgccttgcggagaactacccacaactataccatttctctgcgatccgaagcattgatggtttaagtctttggcctggattgctatattacagaagttctagtcccacttgtcaaacagagcattctgagtgtttacaggcggacctgttctcttccgacaagcaatttgaatcttaactttccatcagtcttcagtgtttttaatctaaggaataattatcttcctgcattttgatttcttagatcagaattttttaatgccatcctcattagttttccaatacaatataagttgaaacaatgtacaatattgtatattctttgttgcaagtggcagaaagtaaggttatgtgcatggccatgtgtttgtaggtgcatgtgttgaaataggaagtatcctagtatgtatttagatatgaaaaacttatgtgctagtgttgactttgaaattataacatgtatacctatatattctttgtgtttatttaaaagttttgaaaatatgcagtactgtttatattttgtataccttttaataggtatccacttaaggcatttgcagtacaaatattaattgaccacttccttggcccccagctacaatgaaaaagaagaattatgcacacatctaacattggtagatttctaaagacaactcataaataatttcttaacccatataaggataaaataataccattgatattcttgtttattctttttaaataaaaatgtcacaagtttaatagatcagccttgtaaagcaagcataaaatgttcataaatgttttatatattatttggtagtctagtatggctttaactgaatatttgatcctcagagacagtatcatgagactgcattataaatgacatgattaaatgatgaatttattttgtcagcctcagcaacaaacatttcctaaatgggatgcaaaaagaaactgaatgatgttgaattttagtttttctttaagttgtggtaagcttttagtttagctgctttaacatgaagtcatacatacttagaggtaagtcatttattatttttttcctttttctaatcttttccttaaaattaatagataacaaactaagttacttttttactaacaaggaagatcaggaataatatttctttgaaagctgaaattatacttctcacagtttgctaccaaaaaaaggcttaaactaaaccttgacatccacagtagcatcaggaatagaaatgtatattttggctacagtttgcatacagtgaacacataaaatctatattgaaaactgacagaaatatgaatgtcgaggggcttggaattctaaatggaagattttagaaggaactttgctctctactgtcactatataaaaccaattatgttatgttattagatattaactctatttaagcttttcttttactaagaaattcttatgccaaatgtattccaagagccatctccttatgatgtatttgaaccatttagagaaattcacttcattgtaccccatgacctgaggtaaagaaaataattttcaaattgcagacttccttgaaaggctcaagactgtagcatggtgatgtctagattcatactttactgtaaggacagtttcggtagttaagtggaattaaaggtctagagtgatttgtattggatggtaactaaggtctatacatctactcttttaattcttatttccttcaggaagatccttttccacaggaagctatcaaagaaaagtaaactagacaccaagtaatatcactctcataatatgctttccagctagaggggagaaaacaccaggaaagaggaaccctgggtcataaaatgacggacctgttaggaaaatgctgttgtgtgacaatggagagcctgcccaaggactgtgcaacctatctgttcctctccaccagtgtatcccaagtagtctggtatgatctgtggttccttagaatattgaggatctctttaaaaaatgaaatttctgatctcaccccatattactaaagcaaaatttccaggggtagggactgggactccagaaccattaataaaacaaaacaaaacaaagcaaaatattgatgatcaggcagatttgaaaacagtgacattgcttgatctctgaatggatggatgcccttgggtggtcacttttcttcctaggacttgcctttgttatctgtaaattagaatggctatactttcagacttcacaattttaagccacttttttctattaacagttgaatgaaccagtgggacacattttaacgtcttcttatgttgactaaaattatagttagagctgagaaaaaaaaaatagcatctagtccaactccttgattgtaaaactgaaaaactaaggttatttgaatgttctgttttctctttttaaatattttataacttttaaatggaaaaacctattaggtaaatggaaataatccttgaaaatagtttttgatgttttgtgatttttaactggtaaatttctactttaggtgggcattttcttccctagaatatgccctttattatgctatcattgctagatttaaagggacttgtaagcatttctggaaatatttgatttaaaaacatatattaatagatgttttccctagcagacttttggagcaaaaatattattttagttcagcagaggattactgatattatgggctgatctcagaaaggaataaggatgaggcagagaggagtacttgagtttgtgtgtgtgtgtgtgtgtgtgtgtttgtgtcagtgtcacataagttctccatattgccttatgtcccaaagccaaatataaaaatataaatgatgctttgtataattcattttatcaaaaattacccataactttcatttgtttttatatcgacaatgaagatgatcatatttcattttgcagatgtggccataaaatattatttacttctacataggtgattttaccaggtttagttatcctgagaaaacatctggacttaagagtttctgcttccctacaaagatctttaaagttatttttaggcacatttgtgacaaacaactacttgatattgaaatctccttcagccattagaagctatcaaataaagtaggtgtaaaaacaactgtctgtggcatttgtatacatcgagaacatttttctttccctcattttctgcagtgaactccagtaaagctaagtgtcttatgaaatctaaactcatatatgtacacagttcactctagcttcttccaaaatatctctaggtagtacaactgaagccaaacctgcctgacttcctgctcctggccacccaaaactccatatggcttctcgtacactgacatcctctctctacccatttaactgctaattgagtctgataaaagtcttctttgaaaaaagtttttacttctaagatttgcatttacatcataaaattaaacgattttcaggaaaatcagattttttttattacagtactatttgctttaaattcggcatgtttttcttaagtagcaagtacatgtatcggaacttagaactggtgggcgcggtggctcttgcctgtaatcccagcactttgggaggccaaggtggggggatcacgaggtcaggagatggagacaatcctggtttcatcacggtgaaaccccctctctgctaaaaatacaaaaaattagccaggcattgtggtggtcacctgtagtcccagctgctcgggaggctgaggcaggagaatggcatgaacccgggaggcagagcttgcagtgagcagagatcgcgccactgcactccagcctgggtgacagagtgagactctgtctc

SEQ ID NO: 10701 - DNA, 6506 bp, Homo sapiens
agtccggcggccacgacagcgcgcggcaccacgacaacgccaagaccgaggccctgcaggaggagctgaaggcggcgcgcctgcagatcaacgagctcagcggcaaggtcatgcagctgcagtacgagaaccgcgtgcttatgtccaacatgcagcgctacgacctggcctcgcacctgggcatccgcggcagcccccgcgacagcgacgccgagagcgacgcgggcaagaaggagagcgacgacgactcgcggcctccgcaccgcaagcgcgaagggcccatcggcggcgagagcgactcggaggaggtgcgcaacatccgctgcctcacgcccactcgctccttctacccggcgcccgggccctggcccaagagcttctccgatcggcagcagatgaaggacatccgctcggaggccgagcgcctgggcaagaccatcgaccggctcatcgccgacacgagcaccatcatcaccgaggcgcgcatctacgtggccaacggggacctgttcggactcatggacgaggaggacgacggcagccgcatccgggagcacgagctgctctaccgcatcaacgctcagatgaaggccttccgcaaggagctgcagaccttcatcgaccgcctcgaggtgcccaagtctgcggacgaccgcggcgccgaggagcccatttccgtgagtcagatgttccagcctatcattttacttattctcattcttgtattattttcatcactttcttacacaacaatatttaaacttgtcttcctttttacactgttttttgtactgtaaatctttcatcatttaccattcattgtagtattttcagtttgtttattttgttcacccttcaagacaagaagtaaaagaagtataatttctgtagtaaccaatgctataaaaacactgaagactgcttatttctttaaaaagatacaactcatcttaccaagaccaaattcaataagaagcccaaacactaaaatatttcaggctttattttaaaggcaagtgagactgcttcaaataaaacaacttcaagcttccaagaaacagttaagaggaggcagagaagagcagaaacacttctttgctgacacttacactgttgccatggacctacataagcagtgggagaacacagagactaactggcataaggaaaagatggaattactggaccagtttgacaatgaaagaaaggaatgggaaagtcaatggaagattatgcagaagaaaatagaagagctttgccgggaagtaaagctttggaggaaaatcaatatcaatgaacgtgctaagatcattgatctttaccatgagaagaccattccagagaaagtgatagaatcttccccaaattaccccgatttaggacaaagtgaatttataaggacgaatcacaaagatggtctgagaaaagaaaataaaagagagcagagcttagtcagtggaggaaatcaaatgtgtaaggaacaaaaagcaacaaaaaaatcaaaagtagggtttttggatcctttggctacagacaaccaaaaggaatgtgaggcctggcctgacctgaggacttctgaggaagacagcaagagctgttctggcgccctcagtacagctcttgaagaacttgcgaaggtgagtgaagaattatgcagctttcaagaggaaattcgaaagcggtctaaccatagaaggatgaagtcagattcttttctccaggaaatgccaaatgtaactaatatacctcatggggaccccatgatcaacaatgaccagtgcattcttccaatcagtttagaaaaagaaaaacagaaaaataggaagaatctgagctgtaccaatgtgctccagagcaattctacgaaaaaatgtggaattgatacaatcgatttaaaaagaaatgaaactccaccagttcctcctccaagaagcacctctcgaaattttcccagctcggattctgaacaagcctatgaaagatggaaggaaaggttagaccacaacagctgggtgccccatgagggtcgaagtaaaaggaattacaaccctcacttccctttgagacaacaagagatgtctatgttgtatccaaatgaagggaaaacttcgaaagatggtatcatcttttcctctttggtaccagaagtcaaaatagatagcaagcctccaagtaatgaagatgttggacttagcatgtggtcatgtgacattgggataggtgcaaaaaggagcccctctacttcgtggtttcagaaaacctgctctacccccagtaatccaaaatatgaaatggtgatcccagatcaccctgctaaatctcatcctgatcttcatgtaagtaatgactgtagctcctcagtagcagagagcagtagcccacttagaaatttcagttgtggctttgaaaggactacaaggaatgagaagctggcagcaaagactgatgaatttaacagaactgtatttagaacagatagaaattgtcaggcaatacagcaaaatcacagctgctcaaaatcatcggaggatctcaagccctgtgatacctcatctactcacacaggaatccatgtcagtgaacgcctcacatggaaaaggattttcccgacctgctagaccagcaaatcgtcgtctcccctccagatgggcatccagatctccatctgcaccccctgccttgcggagaactacccacaactataccatttctctgcgatccgaagcattgatggtttaagtctttggcctggattgctatattacagaagttctagtcccacttgtcaaacagagcattctgagtgtttacaggcggacctgttctcttccgacaagcaatttgaatcttaactttccatcagtcttcagtgtttttaatctaaggaataattatcttcctgcattttgatttcttagatcagaattttttaatgccatcctcattagttttccaatacaatataagttgaaacaatgtacaatattgtatattctttgttgcaagtggcagaaagtaaggttatgtgcatggccatgtgtttgtaggtgcatgtgttgaaataggaagtatcctagtatgtatttagatatgaaaaacttatgtgctagtgttgactttgaaattataacatgtatacctatatattctttgtgtttatttaaaagttttgaaaatatgcagtactgtttatattttgtataccttttaataggtatccacttaaggcatttgcagtacaaatattaattgaccacttccttggcccccagctacaatgaaaaagaagaattatgcacacatctaacattggtagatttctaaagacaactcataaataatttcttaacccatataaggataaaataataccattgatattcttgtttattctttttaaataaaaatgtcacaagtttaatagatcagccttgtaaagcaagcataaaatgttcataaatgttttatatattatttggtagtctagtatggctttaactgaatatttgatcctcagagacagtatcatgagactgcattataaatgacatgattaaatgatgaatttattttgtcagcctcagcaacaaacatttcctaaatgggatgcaaaaagaaactgaatgatgttgaattttagtttttctttaagttgtggtaagcttttagtttagctgctttaacatgaagtcatacatacttagaggtaagtcatttattatttttttcctttttctaatcttttccttaaaattaatagataacaaactaagttacttttttactaacaaggaagatcaggaataatatttctttgaaagctgaaattatacttctcacagtttgctaccaaaaaaaggcttaaactaaaccttgacatccacagtagcatcaggaatagaaatgtatattttggctacagtttgcatacagtgaacacataaaatctatattgaaaactgacagaaatatgaatgtcgaggggcttggaattctaaatggaagattttagaaggaactttgctctctactgtcactatataaaaccaattatgttatgttattagatattaactctatttaagcttttcttttactaagaaattcttatgccaaatgtattccaagagccatctccttatgatgtatttgaaccatttagagaaattcacttcattgtaccccatgacctgaggtaaagaaaataattttcaaattgcagacttccttgaaaggctcaagactgtagcatggtgatgtctagattcatactttactgtaaggacagtttcggtagttaagtggaattaaaggtctagagtgatttgtattggatggtaactaaggtctatacatctactcttttaattcttatttccttcaggaagatccttttccacaggaagctatcaaagaaaagtaaactagacaccaagtaatatcactctcataatatgctttccagctagaggggagaaaacaccaggaaagaggaaccctgggtcataaaatgacggacctgttaggaaaatgctgttgtgtgacaatggagagcctgcccaaggactgtgcaacctatctgttcctctccaccagtgtatcccaagtagtctggtatgatctgtggttccttagaatattgaggatctctttaaaaaatgaaatttctgatctcaccccatattactaaagcaaaatttccaggggtagggactgggactccagaaccattaataaaacaaaacaaaacaaagcaaaatattgatgatcaggcagatttgaaaacagtgacattgcttgatctctgaatggatggatgcccttgggtggtcacttttcttcctaggacttgcctttgttatctgtaaattagaatggctatactttcagacttcacaattttaagccacttttttctattaacagttgaatgaaccagtgggacacattttaacgtcttcttatgttgactaaaattatagttagagctgagaaaaaaaaaatagcatctagtccaactccttgattgtaaaactgaaaaactaaggttatttgaatgttctgttttctctttttaaatattttataacttttaaatggaaaaacctattaggtaaatggaaataatccttgaaaatagtttttgatgttttgtgatttttaactggtaaatttctactttaggtgggcattttcttccctagaatatgccctttattatgctatcattgctagatttaaagggacttgtaagcatttctggaaatatttgatttaaaaacatatattaatagatgttttccctagcagacttttggagcaaaaatattattttagttcagcagaggattactgatattatgggctgatctcagaaaggaataaggatgaggcagagaggagtacttgagtttgtgtgtgtgtgtgtgtgtgtgtgtttgtgtcagtgtcacataagttctccatattgccttatgtcccaaagccaaatataaaaatataaatgatgctttgtataattcattttatcaaaaattacccataactttcatttgtttttatatcgacaatgaagatgatcatatttcattttgcagatgtggccataaaatattatttacttctacataggtgattttaccaggtttagttatcctgagaaaacatctggacttaagagtttctgcttccctacaaagatctttaaagttatttttaggcacatttgtgacaaacaactacttgatattgaaatctccttcagccattagaagctatcaaataaagtaggtgtaaaaacaactgtctgtggcatttgtatacatcgagaacatttttctttccctcattttctgcagtgaactccagtaaagctaagtgtcttatgaaatctaaactcatatatgtacacagttcactctagcttcttccaaaatatctctaggtagtacaactgaagccaaacctgcctgacttcctgctcctggccacccaaaactccatatggcttctcgtacactgacatcctctctctacccatttaactgctaattgagtctgataaaagtcttctttgaaaaaagtttttacttctaagatttgcatttacatcataaaattaaacgattttcaggaaaatcagattttttttattacagtactatttgctttaaattcggcatgtttttcttaagtagcaagtacatgtatcggaacttagaactggtgggcgcggtggctcttgcctgtaatcccagcactttgggaggccaaggtggggggatcacgaggtcaggagatggagacaatcctggtttcatcacggtgaaaccccctctctgctaaaaatacaaaaaattagccaggcattgtggtggtcacctgtagtcccagctgctcgggaggctgaggcaggagaatggcatgaacccgggaggcagagcttgcagtgagcagagatcgcgccactgcactccagcctgggtgacagagtgagactctgtctc

SEQ ID NO: 10702 - DNA, 3687 bp, Homo sapiens
  misc_feature (3647)..(3647): n is a, c, g, or t
  misc_feature (3681)..(3681): n is a, c, g, or t
  misc_feature (3687)..(3687): n is a, c, g, or t
agtccggcggccacgacagcgcgcggcaccacgacaacgccaagaccgaggccctgcaggaggagctgaaggcggcgcgcctgcagatcaacgagctcagcggcaaggtcatgcagctgcagtacgagaaccgcgtgcttatgtccaacatgcagcgctacgacctggcctcgcacctgggcatccgcggcagcccccgcgacagcgacgccgagagcgacgcgggcaagaaggagagcgacgacgactcgcggcctccgcaccgcaagcgcgaagggcccatcggcggcgagagcgactcggaggaggtgcgcaacatccgctgcctcacgcccactcgctccttctacccggcgcccgggccctggcccaagagcttctccgatcggcagcagatgaaggacatccgctcggaggccgagcgcctgggcaagaccatcgaccggctcatcgccgacacgagcaccatcatcaccgaggcgcgcatctacgtggccaacggggacctgttcggactcatggacgaggaggacgacggcagccgcatccgggagcacgagctgctctaccgcatcaacgctcagatgaaggccttccgcaaggagctgcagaccttcatcgaccgcctcgaggtgcccaagtctgcggacgaccgcggcgccgaggagcccatttccgtgagtcagatgttccagcctatcattttacttattctcattcttgtattattttcatcactttcttacacaacaatatttaaacttgtcttcctttttacactgttttttgtactgtaaatctttcatcatttaccattcattgtagtattttcagtttgtttattttgttcacccttcaagacaagaagtaaaagaagtataatttctgtagtaaccaatgctataaaaacactgaagactgcttatttctttaaaaagatacaactcatcttaccaagaccaaattcaataagaagcccaaacactaaaatatttcaggctttattttaaaggcaagtgagactgcttcaaataaaacaacttcaagcttccaagaaacagttaagaggaggcagagaagagcagaaacacttctttgctgacacttacactgttgccatggacctacataagcagtgggagaacacagagactaactggcataaggaaaagatggaattactggaccagtttgacaatgaaagaaaggaatgggaaagtcaatggaagattatgcagaagaaaatagaagagctttgccgggaagtaaagctttggaggaaaatcaatatcaatgaacgtgctaagatcattgatctttaccatgagaagaccattccagagaaagtgatagaatcttccccaaattaccccgatttaggacaaagtgaatttataaggacgaatcacaaagatggtctgagaaaagaaaataaaagagagcagagcttagtcagtggaggaaatcaaatgtgtaaggaacaaaaagcaacaaaaaaatcaaaagtagggtttttggatcctttggctacagacaaccaaaaggaatgtgaggcctggcctgacctgaggacttctgaggaagacagcaagagctgttctggcgccctcagtacagctcttgaagaacttgcgaaggtgagtgaagaattatgcagctttcaagaggaaattcgaaagcggtctaaccatagaaggatgaagtcagattcttttctccaggaaatgccaaatgtaactaatatacctcatggggaccccatgatcaacaatgaccagtgcattcttccaatcagtttagaaaaagaaaaacagaaaaataggaagaatctgagctgtaccaatgtgctccagagcaattctacgaaaaaatgtggaattgatacaatcgatttaaaaagaaatgaaactccaccagttcctcctccaagaagcacctctcgaaattttcccagctcggattctgaacaagcctatgaaagatggaaggaaaggttagaccacaacagctgggtgccccatgagggtcgaagtaaaaggaattacaaccctcacttccctttgagacaacaagagatgtctatgttgtatccaaatgaagggaaaacttcgaaagatggtatcatcttttcctctttggtaccagaagtcaaaatagatagcaagcctccaagtaatgaagatgttggacttagcatgtggtcatgtgacattgggataggtgcaaaaaggagcccctctacttcgtggtttcagaaaacctgctctacccccagtaatccaaaatatgaaatggtgatcccagatcaccctgctaaatctcatcctgatcttcatgtaagtaatgactgtagctcctcagtagcagagagcagtagcccacttagaaatttcagttgtggctttgaaaggactacaaggaatgagaagctggcagcaaagactgatgaatttaacagaactgtatttagaacagatagaaattgtcaggcaatacagcaaaatcacagctgctcaaaatcatcggaggatctcaagccctgtgatacctcatctactcacacaggtagcatatcacaaagtaacgatgtgtccggtatttggaaaaccaatgcccacatgcctgtgcccatggaaaatgtgcctgataatcccaccaagaaatccacaacaggcctagtaagacaaatgcagggacacctaagtcctcgcagttatcgaaatatgctccacgagcatgactggagaccgagtaatttgtctggccgtccgaggtcagctgatcccaggtcaaattatggtgttgtggaaaagctgctgaaaacctatgagacagcaacagagtctgcattgcaaaattctaagtgcttccaggataattggaccaaatgtaattctgatgtcagtggtggtgccacattaagtcagcatttagaaatgctccaaatggaacaacagtttcagcaaaagacagctgtgtgggggggacaggaagtgaagcaaggaatagatccgaaaaagataacagaggaatccatgtcagtgaacgcctcacatggaaaaggattttcccgacctgctagaccagcaaatcgtcgtctcccctccagatgggcatccagatctccatctgcaccccctgccttgcggagaactacccacaactataccatttctctgcgatccgaagcattgatggtttaagtctttggcctggattgctatattacagaagttctagtcccacttgtcaaacagagcattctgagtgtttacaggcggacctgttctcttccgacaagcaatttgaatcttaactttccatcagtcttcagtgtttttaatctaaggaataattatcttcctgcattttgatttcttagatcagaattttttaatgccatcctcattagttttccaatacaatataagttgaaacaatgtacaatattgtatattctttgttgcaagtggcagaaagtaaggttatgtgcatggccatgtgtttgtaggtgcatgtgttgaaataggaagtatcctagtatgtatttagatatgaaaaacttatgtgctagtgttgactttgaaattataacatgtatacctatatattctttgtgtttatttaaaagttttgaaaataaaaanctggcctcgttggcctcagcggtggagctctgcngccggn

SEQ ID NO: 10703 - DNA, 3223 bp, Homo sapiens
  misc_feature (3183)..(3183): n is a, c, g, or t
  misc_feature (3217)..(3217): n is a, c, g, or t
  misc_feature (3223)..(3223): n is a, c, g, or t
agtccggcggccacgacagcgcgcggcaccacgacaacgccaagaccgaggccctgcaggaggagctgaaggcggcgcgcctgcagatcaacgagctcagcggcaaggtcatgcagctgcagtacgagaaccgcgtgcttatgtccaacatgcagcgctacgacctggcctcgcacctgggcatccgcggcagcccccgcgacagcgacgccgagagcgacgcgggcaagaaggagagcgacgacgactcgcggcctccgcaccgcaagcgcgaagggcccatcggcggcgagagcgactcggaggaggtgcgcaacatccgctgcctcacgcccactcgctccttctacccggcgcccgggccctggcccaagagcttctccgatcggcagcagatgaaggacatccgctcggaggccgagcgcctgggcaagaccatcgaccggctcatcgccgacacgagcaccatcatcaccgaggcgcgcatctacgtggccaacggggacctgttcggactcatggacgaggaggacgacggcagccgcatccgggagcacgagctgctctaccgcatcaacgctcagatgaaggccttccgcaaggagctgcagaccttcatcgaccgcctcgaggtgcccaagtctgcggacgaccgcggcgccgaggagcccatttccgtgagtcagatgttccagcctatcattttacttattctcattcttgtattattttcatcactttcttacacaacaatatttaaacttgtcttcctttttacactgttttttgtactgtaaatctttcatcatttaccattcattgtagtattttcagtttgtttattttgttcacccttcaagacaagaagtaaaagaagtataatttctgtagtaaccaatgctataaaaacactgaagactgcttatttctttaaaaagatacaactcatcttaccaagaccaaattcaataagaagcccaaacactaaaatatttcaggctttattttaaaggcaagtgagactgcttcaaataaaacaacttcaagcttccaagaaacagttaagaggaggcagagaagagcagaaacacttctttgctgacacttacactgttgccatggacctacataagcagtgggagaacacagagactaactggcataaggaaaagatggaattactggaccagtttgacaatgaaagaaaggaatgggaaagtcaatggaagattatgcagaagaaaatagaagagctttgccgggaagtaaagctttggaggaaaatcaatatcaatgaacgtgctaagatcattgatctttaccatgagaagaccattccagagaaagtgatagaatcttccccaaattaccccgatttaggacaaagtgaatttataaggacgaatcacaaagatggtctgagaaaagaaaataaaagagagcagagcttagtcagtggaggaaatcaaatgtgtaaggaacaaaaagcaacaaaaaaatcaaaagtagggtttttggatcctttggctacagacaaccaaaaggaatgtgaggcctggcctgacctgaggacttctgaggaagacagcaagagctgttctggcgccctcagtacagctcttgaagaacttgcgaaggtgagtgaagaattatgcagctttcaagaggaaattcgaaagcggtctaaccatagaaggatgaagtcagattcttttctccaggaaatgccaaatgtaactaatatacctcatggggaccccatgatcaacaatgaccagtgcattcttccaatcagtttagaaaaagaaaaacagaaaaataggaagaatctgagctgtaccaatgtgctccagagcaattctacgaaaaaatgtggaattgatacaatcgatttaaaaagaaatgaaactccaccagttcctcctccaagaagcacctctcgaaattttcccagctcggattctgaacaagcctatgaaagatggaaggaaaggttagaccacaacagctgggtgccccatgagggtcgaagtaaaaggaattacaaccctcacttccctttgagacaacaagagatgtctatgttgtatccaaatgaagggaaaacttcgaaagatggtatcatcttttcctctttggtaccagaagtcaaaatagatagcaagcctccaagtaatgaagatgttggacttagcatgtggtcatgtgacattgggataggtgcaaaaaggagcccctctacttcgtggtttcagaaaacctgctctacccccagtaatccaaaatatgaaatggtgatcccagatcaccctgctaaatctcatcctgatcttcatgtaagtaatgactgtagctcctcagtagcagagagcagtagcccacttagaaatttcagttgtggctttgaaaggactacaaggaatgagaagctggcagcaaagactgatgaatttaacagaactgtatttagaacagatagaaattgtcaggcaatacagcaaaatcacagctgctcaaaatcatcggaggatctcaagccctgtgatacctcatctactcacacaggaatccatgtcagtgaacgcctcacatggaaaaggattttcccgacctgctagaccagcaaatcgtcgtctcccctccagatgggcatccagatctccatctgcaccccctgccttgcggagaactacccacaactataccatttctctgcgatccgaagcattgatggtttaagtctttggcctggattgctatattacagaagttctagtcccacttgtcaaacagagcattctgagtgtttacaggcggacctgttctcttccgacaagcaatttgaatcttaactttccatcagtcttcagtgtttttaatctaaggaataattatcttcctgcattttgatttcttagatcagaattttttaatgccatcctcattagttttccaatacaatataagttgaaacaatgtacaatattgtatattctttgttgcaagtggcagaaagtaaggttatgtgcatggccatgtgtttgtaggtgcatgtgttgaaataggaagtatcctagtatgtatttagatatgaaaaacttatgtgctagtgttgactttgaaattataacatgtatacctatatattctttgtgtttatttaaaagttttgaaaataaaaanctggcctcgttggcctcagcggtggagctctgcngccggn

SEQ ID NO: 10704 - DNA, 2088 bp, Homo sapiens
agtccggcggccacgacagcgcgcggcaccacgacaacgccaagaccgaggccctgcaggaggagctgaaggcggcgcgcctgcagatcaacgagctcagcggcaaggtcatgcagctgcagtacgagaaccgcgtgcttatgtccaacatgcagcgctacgacctggcctcgcacctgggcatccgcggcagcccccgcgacagcgacgccgagagcgacgcgggcaagaaggagagcgacgacgactcgcggcctccgcaccgcaagcgcgaagggcccatcggcggcgagagcgactcggaggaggtgcgcaacatccgctgcctcacgcccactcgctccttctacccggcgcccgggccctggcccaagagcttctccgatcggcagcagatgaaggacatccgctcggaggccgagcgcctgggcaagaccatcgaccggctcatcgccgacacgagcaccatcatcaccgaggcgcgcatctacgtggccaacggggacctgttcggactcatggacgaggaggacgacggcagccgcatccgggagcacgagctgctctaccgcatcaacgctcagatgaaggccttccgcaaggagctgcagaccttcatcgaccgcctcgaggtgcccaagtctgcggacgaccgcggcgccgaggagcccatttccgtgagtcagatgttccagcctatcattttacttattctcattcttgtattattttcatcactttcttacacaacaatatttaaacttgtcttcctttttacactgttttttgtactgtaaatctttcatcatttaccattcattgtagtattttcagtttgtttattttgttcacccttcaagacaagaagtaaaagaagtataatttctgtagtaaccaatgctataaaaacactgaagactgcttatttctttaaaaagatacaactcatcttaccaagaccaaattcaataagaagcccaaacactaaaatatttcaggctttattttaaaggcaagtgagactgcttcaaataaaacaacttcaagcttccaagaaacagttaagaggaggcagagaagagcagaaacacttctttgctgacacttacactgttgccatggacctacataagcagtgggagaacacagagactaactggcataaggaaaagatggaattactggaccagtttgacaatgaaagaaaggaatgggaaagtcaatggaagattatgcagaagaaaatagaagagctttgccgggaagtaaagctttggaggaaaatcaatatcaatgaacgtgctaagatcattgatctttaccatgagaagaccattccagagaaagtgatagaatcttccccaaattaccccgatttaggacaaagtgaatttataaggacgaatcacaaagatggtctgagaaaagaaaataaaagagagcagagcttagtcagtggaggaaatcaaatgtgtaaggaacaaaaagcaacaaaaaaatcaaaagtagggtttttggatcctttggctacagacaaccaaaaggaatgtgaggcctggcctgacctgaggacttctgaggaagacagcaagagctgttctggcgccctcagtacagctcttgaagaacttgcgaaggtgagtgaagaattatgcagctttcaagaggaaattcgaaagcggtctaaccatagaaggtaggttggtacatctgattattttagatgggtaaataaaaaataatattgtttttagttaatgactccaaactgcctcctccttacatgtaagaactaatgagttattaaaatgtactatctagggtgggagatagaaactttaattttttgtttgctcgtttgtttttgagatgttatcttgctctgtctccaaggctggaaagcagtggcatgatcttggctcactgcagcctctgcctcccaggttcaagcgattctcctacctcagtctcccagctgctcgggaggctgaggcaggagaatggcatgaacccgggaggcagagcttgcagtgagcagagatcgcgccactgcactccagcctgggtgacagagtgagactctgtctc

SEQ ID NO: 10705 - DNA, 2180 bp, Homo sapiens
ctcaaagccccctattagtaacattctggttcactgaggtttgatcatattcctatctgcattccttcccttctttgaaggacagctgatctttcagaagcagaataaaattaagatgttagaacaaaggtctcagtctcagagaaccgcatcacttcatttgctcagacccatcctcttttgcaaaagggtctgcttggagaggccaaaattcagggtgctctcaaaggcaaagaaagcacattgttttccttctccagtccaactttcatcttttcttctgctgttttcttttcccctcttctttttcacaaatgttcaaaatggtctcatgcgcatgtgtcttgccccactttcccctttagctgaacagaaaattttgtctcagtaaaacgaagtcaaaaaacaggattcctccaaacatgcctcctcccgcactggccagccgagtccagctgagaaacttatgctagattcaatgtcattgagcaatgctttattgaagtctcgttcttctcacttctgcaccagtgagccaatgatactgacagaaatgtcatctctcttctatctgtggttgctgtttttggagtaaaagtttctgtgtgtgtttttttagttcttttgatggctgttgttttgcattgtaaataccatgatgggggacccccatcagaacatggcttatttaataatttatttcgtatttattgagtaatattgggaaaagagaaggaccacctctttccctgaattgctattgagaattggtccatctcccagctccaggtgctgctgtctgcagcaagggcattactgcccaggtaaggagtgctagaatcaccaagcaaattgaaattggcagaaatggaggcttcagtcacacaaattagactcaaatggaactaaaacactggttatctccaggaaaacctcatttagatggaaattaatggaagaataaaatgcctacacatgaaccaacttctattaaaaagtcacaactccttgaaaaaaaaaataaagaaaaattgtaaaactcttttttttttctggccaaggaaagctatgcctcatcttctaacgagccaagccaaaaagactgcaatggtattcctatgtgtttctttggcctgtgtatcagtctgaatgaaatggaatgggtctctagcctcagtcttgtcatctgtaaaatggggcttgtcctatatattatctgcaagacgtgggaaatgggggctcaagccctgatgctatggactccatactgttggatatattgtctcttgtgtcttctgctgactgcagattaaagggtgtcaaccaaggaaggaaacaaaaaagtagggcctggacttcatttgcagaatgaggtcatagtcgttgagtcccacagtcatatatgggagacctcaagttgctgtcaccttgataactcttgtatcctgggttaaagccctctgtatttagtttgaacttctctctaagccccgtggtccaaagtcatcacgggagagaccaagatgggcttaccttgccctgctctggatttaaccattgttcattgtcaggctatatttttgtacaatcattcaaataacccagtgacataggtcatattgccacttttcagaggagaaaactgaggctcaggagggggagttgacatgcccaagctcccttgagctcagatcagcttgactcaatgtccaacattcccttggtagctttttctccggggtcctgtgctataagaacttctctctgcactgtatttttttttctcccaattcttagctatttcctcaagcaatgattggccaaggacctagcataatccaccacattggccaaggggacgtggtgcaccccaaggccatttctctgcattggaggctgcgaatctcctctggaaaattcccaacccgaggacccaccatgagcccagctcagcctgaccagacagcctctgcctggagcattcacatcagatggaaagaagctgctgtgtcctccagcatcctgggaccctgtcctctgcccagtgacacagcagccatggctagcttgatttctggtctccaaagctaagcataaccttcccggggtttctggtttttcagcctgtacgaaacatgtctctgttctaattaaagttcccatggtatggtgttctcaaa

SEQ ID NO: 10706 - DNA, 392 bp, Homo sapiens
ttttttcttttgtaggtaattcacatgtcagtaatacaaatgtttagcaaaaatagagtggaagcattgtaaaatcacccaaagaagttatgctttggtttatgcatctttaacaatagtatttgacatcaaaacactctttatctataaatttaataaataattttttagtgataaaacttaaggatcgcaagtatatcaaaagccgaaaaccactttaatttacggctggtaagtatgcaactagcaacaactgtttgagactaatttggcaatataaatctagggtcttaaaatgtaaatttctcaagcccaataattccgctttggtcaatcttaccccaggaaataatctggtcttctggagggaattttaggtaccaagtagttca

SEQ ID NO: 10707 - DNA, 659 bp, Homo sapiens
tgcctgacacataaccatgcctttcacagtattcattcattcattcattcattcatttactcactcatttgacaacactgattgagcacctgttacatgccaggcactgtcctgagagctcaggagatacaccagtgaacacaaaagaagtgactgtttgtagaatatggatgcaggattgtaatgtgcctcaaatgaaattatggttgtgaaagtgatacgctgacctgactcagtgcctcacacctgtaatcccagcactatgggaggccaaggtgggaggatcgcttgagccaggagttcaagaccagcctgggcaacacagtaagacttgtctctataaaaaagtaaaaaaaaaaaaaaaaaaagtgaaacacaaaccaagagaatgtgttcactttacatttgcatggcactttacagtttacatagtgagttcacatactcattcacttattctttcattcattcagtaagcatttctcgaatacctactatatgctgggcacaatgcatatggtttctgcttctgaagacttacttctgaggctagtgaggggacagagacaggtcccccaacagttggaaatgcctgtgggacttccagatgaggatgtagaggtctagagatgatctagcgccactgcttagggcaggcg

SEQ ID NO: 10708 - DNA, 437 bp, Homo sapiens
agttatctgggcactgacttttctcattcataataaaagatgtggggaggacacagagaggggagtttcaactacatgacctatacgatccctccagaatctgattctaaagacctgtgacaatgcaattcattgggaaatacgcatggtatcactacaggtttacctgttgctaatgcatgagtgagacaaggacaatgacaaagtcagtgaacagtccttctgtttagtggtctagtggtgttttctacagggaaagtcacatggggcctttcgtagggagcttctacctagtctattgagacaactccattgaagcaatgggcttcacccatgtaacccgaatttttcaaagctcaattcagcaaatgcttctaccttgatcaaagcctctgtgttcacaaggctgttattttacatcagggttccaaactcaa

SEQ ID NO: 10709 - DNA, 1828 bp, Homo sapiens
tgggtgtgagatcagttagggggctcgttcagttctctaggtgaggactgtcctggtggcttgtcctggatggtggctggggaagtggatgcctgaatgccaggctctggagaagagatgactccctgccccatccccctgcctaccctcctcctcaatggcccctctctcagtggatgtgagtgaggattaggaccttccccacagagccaccttttggccaggcctcgtgggggatagtgggggcagtgctgagttctaggagtgttcctggaagttgggggcagtgagtgctcagcctggcccaggtgggagagttcactgctgcccaggccttagcaggagctgctgtgctgtctttctgtcccatgctgagcattgtgataggaagctgccacacagtgccctggaaactgacttggcatgctttccatggggcttccgagggccagggactgggctgggggtggcctagcagctctagtggagactgtgctgccgcagggctgaaggaagaccaaccaaggggacagccgtttgagcccagcccactcactgcctgctgcacctccagctggagcccagggttgggcagctctcatactcttatctaactgccagacctagagggagggaagcccaaggctgcaggtctgagggacacggctcatgggcaaaagggtatcaagaggattagagtcacttgcataggaaaagagggtcagagaggctgagggctggctgaggccagagaggttccctgaccttggacattctttgtgttgtgtaagacctcggcatctttagagaaaggttcttgtgcccctgtgagcttgctcagctgctatggccacttgaaccccaaaaatggtggcctagaagagaatacaccccttacttcccacttatcctcctctcaacctaggaaagatcagacatattgactcaacagtctaacaggggatgggctggatctgcccgtgaccagaccaatgccccccacccagcaagggagtaaacgctgcctgaagtgggaccagtgatacacagcatctctgtctgccagggctcagcccgcgggggggatttgtgagaggctgagcagctgggtctgcacagacagcaagctgcactttgatttcatttgattcccttacaaaatgacattaaggggaatgtgaggcacaggagactcgcctgtctgggaaggcagcaagctcatctctcctggacctggtgacctacctctgtctaccagacaggtgcagaggacaggagctctggccacaaagaaatggacagtctgaatgcagcacacagccctggggacaggacttttcacccagcctgtcctgacaagctgctgagtcgagcagatgctcacatcagggtcccaggtccggctgttagggaagtggacatcagttcctggtgggccctgggcagtgactgtggtgagccacagcaccattgctgctctgcctctcaaatcgatcgaacaattaatttggctccacaggctcgagaagatgaaacatgacctgatggccactgctgtccagcatcccagtccatcctagctgtccaggatgatgaacaagctatggaaattgcacttgagagctataatcacgggaagcattgccgagcccctccctgctacataaatcatgctaagaagcacacaatggcctctttcctgatgggctaattgtcttggtttggtgtctcaggcccaggagctgggaagatgggagcacaaccatttattgttggaaagaccatctgtgcaacttgaatacaaagtgattcttttagttccccacac

SEQ ID NO: 10710 - DNA, 1404 bp, Homo sapiens
tgggtgtgagatcagttagggggctcgttcagttctctaggtgaggactgtcctggtggcttgtcctggatggtggctggggaagtggatgcctgaatgccaggctctggagaagagatgactccctgccccatccccctgcctaccctcctcctcaatggcccctctctcagtggatgtgagtgaggattaggaccttccccacagagccaccttttggccaggcctcgtgggggatagtgggggcagtgctgagttctaggagtgttcctggaagttgggggcagtgagtgctcagcctggcccaggtgggagagttcactgctgcccaggccttagcaggagctgctgtgctgtctttctgtcccatgctgagcattgtgataggaagctgccacacagtgccctggaaactgacttggcatgctttccatggggcttccgagggccagggactgggctgggggtggcctagcagctctagtggagactgtgctgccgcagggctgaaggaagaccaaccaaggggacagccgtttgagcccagcccactcactgcctgctgcacctccagctggagcccagggttgggcagctctcatactcttatctaactgccagacctagagggagggaagcccaaggctgcaggtctgagggacacggctcatgggcaaaagggtatcaagaggattagagtcacttgcataggaaaagagggtcagagaggctgagggctggctgaggccagagaggttccctgaccttggacattctttgtgttgtgtaagacctcggcatctttagagaaaggttcttgtgcccctgtgagcttgctcagctgctatggccacttgaaccccaaaaatggtggcctagaagagaatacaccccttacttcccacttatcctcctctcaacctaggaaagatcagacatattgactcaacagtctaacaggggatgggctggatctgcccgtgaccagaccaatgccccccacccagcaagggagtaaacgctgcctgaagtgggaccagtgatacacagcatctctgtctgccagggctcagcccgcgggggggatttgtgagaggctgagcagctgggtctgcacagacagcaagctgcactttgatttcatttgattcccttacaaaatgacattaaggggaatgtgaggcacaggagactcgcctgtctgggaaggcagcaagctcatctctcctggacctggtgacctacctctgtctaccagacaggtgcagaggacaggagctctggccacaaagaaatggacagtctgaatgcagcacacagccctggggtctgggatctccaccgtcttctgctcctcagtcaggccggccccccagccctggccggccccccagcccggtccgg

SEQ ID NO: 10711 - DNA, 351 bp, Homo sapiens
cctctgggtctgcacctgcttgctctgtttgtgttgcatgtcttactgttcttttctggctaaccctaaattattcttcagaattcaccacagtgatcgcttcctcctggaaggctttctcctgtcccacactcgattgggttgccctctgggtgccctcacagccgcctctgcttccctctatgggatcacattccacactggtatccagttgtgtgtttattttgctgggtaccccacagctccgtgagcctctgaagcatgggttctatcctgattgtcatggcatccccagcacatagcacccccagcacatggcacataggaggtgtcaataagtatgacataatg

SEQ ID NO: 10712 - DNA, 852 bp, Homo sapiens
ggtttgaaatcggaaagttggcggggctgcgggagctgagcctagagtccggctgttggctagagtgggcgcggatctggtgtggggaaggcggcgggactcaggcctgcctgcgaagcattgtcctacataatggtagaggacgaactggcacttttcgataaaagcataaatgaattttggaataaattcaaaagtacggacacctcctgtcagatggcgggactaagagatacctacaaggattccatcaaagcatttgcagaaaagctgtctgtgaaattaaaggaagaagaacgaatggttgagatgtttctggaatatcaaaatcagatcagcaggcaaaataagctcattcaagaaaaaaaggataacttgttaaaattgattgctgaagtaaaaggcaaaaagcaggaattggaagtactgactgcaaatatccaggatcttaaggaagaatattctaggaagaaggaaactatttctactgctaataaagcgaatgcagagaggttgaaaaggctgcagaaatctgcagacttgtataaagatcgacttggactagaaattcgaaaaatttatggtgagaaattgcagtttattttcactaatattgaccctaagaatcctgagagcccatttatgttttccttacatctcaatgaagcaagggactatgaagtgtcagatagtgcccctcatcttgagggcctagcagaatttcaagagaatgtaaggaagaccaacaatttttcagcttttcttgccaatgttcggaaagcttttactgccacggtttataattaacatacaaatagtgtatataaaaacggtttatttttcttctctatt

SEQ ID NO: 10713 - DNA, 302 bp, Homo sapiens
aaggcctttgtacatcgatctgcctttgaatttcctggcacctgcctacctgcattctgacttcctctgggatccacatgtggacctgtggcgcaacctcttgcttggccagggtgagcagggcatcagcattccaaagctaagagaataagatacacacacacacgcacacacacacacacacacacacatctccaaaactcagacaggaacatttatttttattttgttaagtcaatgcagttttcatctagaaatatagcaagagctctaccatttttttatttgaacaattgcttaaa

SEQ ID NO: 10714 - DNA, 1340 bp, Homo sapiens
ggtttgaaatcggaaagttggcggggctgcgggagctgagcctagagtccggctgttggctagagtgggcgcggatctggtgtggggaaggcggcgggactcaggcctgcctgcgaagcattgtcctacataatggtagaggacgaactggcacttttcgataaaagcataaatgaattttggaataaattcaaaagtacggacacctcctgtcagatggcgggactaagagatacctacaaggattccatcaaagcatttgcagaaaagctgtctgtgaaattaaaggaagaagaacgaatggttgagatgtttctggaatatcaaaatcagatcagcaggcaaaataagctcattcaagaaaaaaaggataacttgttaaaattgattgctgaagtaaaaggcaaaaagcaggaattggaagtactgactgcaaatatccaggatcttaaggaagaatattctaggaagaaggaaactatttctactgctaataaagcgaatgcagagaggttgaaaaggctgcagaaatctgcagacttgtataaagatcgacttggactagaaattcgaaaaatttatggtgagaaattgcagtttattttcactaatattgaccctaagaatcctgagagcccatttatgttttccttacatctcaatgaagcaagggactatgaagtgtcagatagtgcccctcatcttgagggcctagcagaatttcaagagaatgtaaggaagaccaacaatttttcagcttttcttgccaatgttcggaaagcttttactgccacggtttataattaacatacaaatagtgtatataaaaacggtttatttttcttctctattacatatctctttttttcttgtttttattattattatactttaagttttagggtacatgtgcacaatgtgcaggtttgttacatatgtatacatgtgccatattggtgtgctgcacccattaactcgtcatttcattaggtatatctcctaatgctatccctcccccctcccccaacccacaacagtccccgttgtgtgatgttccccttcctgtgtccatgtgttctcattgttcaattcccacctaggagtgagaatatgtggtgtttggttttttgtcctttcgatagtttgctgagaatgatggtttccagcttcatccatgttcctacaaaggacatgaactcatccttttttatggctgcatagtattccatggtgtatatgtgccacattttcttaatccagtctatcattgttggacatttgggttggttccaagtctttgctattgtgaatagtgcgaaataaacatacgtgtgcatgtg

SEQ ID NO: 10715 - DNA, 1128 bp, Homo sapiens
cggggcggggcggggcgggtggaagatagtgcccatcttctattagcagcaggatgtatgagcacagatgacaatccggtccatgctgttcatcagacaaagcctgaatcctggaaaaagccaactctttgaacaggaattagagtgtgatcggctcagttgacgtacaggggtagaaacctttatttgaagccgataaatgacttgtcgtgggcgagcccttcgggtgctattaatactttcgggtcacagcggagactctggctgttgttcagaaaagaactacgaatcccagaatgccctgttcccccattttcccctcgagaatccaaggcattgtcctacataatggtagaggacgaactggcacttttcgataaaagcataaatgaattttggaataaattcaaaagtacggacacctcctgtcagatggcgggactaagagatacctacaaggattccatcaaagcatttgcagaaaagctgtctgtgaaattaaaggaagaagaacgaatggttgagatgtttctggaatatcaaaatcgtactgtgctaaatgccttacattgaccacctccttcagtcctcatgatagttctccaggagatcagcaggcaaaataagctcattcaagaaaaaaaggataacttgttaaaattgattgctgaagtaaaaggcaaaaagcaggaattggaagtactgactgcaaatatccaggatcttaaggaagaatattctaggaagaaggaaactatttctactgctaataaagcgaatgcagagaggttgaaaaggctgcagaaatctgcagacttgtataaagatcgacttggactagaaattcgaaaaatttatggtgagaaattgcagtttattttcactaatattgaccctaagaatcctgagagcccatttatgttttccttacatctcaatgaagcaagggactatgaagtgtcagatagtgcccctcatcttgagggcctagcagaatttcaagagaatgtaaggaagaccaacaatttttcagcttttcttgccaatgttcggaaagcttttactgccacggtttataattaacatacaaatagtgtatataaaaacggtttatttttcttctctatt

SEQ ID NO: 10716 - DNA, 808 bp, Homo sapiens
ggtttgaaatcggaaagttggcggggctgcgggagctgagcctagagtccggctgttggctagagtgggcgcggatctggtgtggggaaggcggcgggactcaggcctgcctgcgaagcattgtcctacataatggtagaggacgaactggcacttttcgataaaagcataaatgaattttggaataaattcaaaagtacggacacctcctgtcagatggcgggactaagagatacctacaaggattccatcaaagcatttgcagaaaagctgtctgtgaaattaaaggaagaagaacgaatggttgagatgtttctggaatatcaaaatcagatcagcaggcaaaataagctcattcaagaaaaaaaggataacttgttaaaattgattgctgaagtaaaaggcaaaaagcaggaattggaagtactgactgcaaatatccaggatcttaaggaagaatattctaggaagaaggaaactatttctactgctaataaagcgaatgcagagaggttgaaaaggctgcagaaatctgcagacttgtataaagatcgacttggactagaaattcgaaaaatttatgcctgagagcccatttatgttttccttacatctcaatgaagcaagggactatgaagtgtcagatagtgcccctcatcttgagggcctagcagaatttcaagagaatgtaaggaagaccaacaatttttcagcttttcttgccaatgttcggaaagcttttactgccacggtttataattaacatacaaatagtgtatataaaaacggtttatttttcttctctatt

SEQ ID NO: 10717 - DNA, 797 bp, Homo sapiens
ggtttgaaatcggaaagttggcggggctgcgggagctgagcctagagtccggctgttggctagagtgggcgcggatctggtgtggggaaggcggcgggactcaggcctgcctgcgaagcattgtcctacataatggtagaggacgaactggcacttttcgataaaagcataaatgaattttggaataaattcaaaagtacggacacctcctgtcagatggcgggactaagagatacctacaaggattccatcaaagcatttgcagaaaagctgtctgtgaaattaaaggaagaagaacgaatggttgagatgtttctggaatatcaaaatcagatcagcaggcaaaataagctcattcaagaaaaaaaggataacttgttaaaattgattgctgaagtaaaaggcaaaaagcaggaattggaactatttctactgctaataaagcgaatgcagagaggttgaaaaggctgcagaaatctgcagacttgtataaagatcgacttggactagaaattcgaaaaatttatggtgagaaattgcagtttattttcactaatattgaccctaagaatcctgagagcccatttatgttttccttacatctcaatgaagcaagggactatgaagtgtcagatagtgcccctcatcttgagggcctagcagaatttcaagagaatgtaaggaagaccaacaatttttcagcttttcttgccaatgttcggaaagcttttactgccacggtttataattaacatacaaatagtgtatataaaaacggtttatttttcttctctatt

SEQ ID NO: 10718 - DNA, 428 bp, Homo sapiens
aaaactcagacaggaacatttatttttattttgttaagtcaatgcagttttcatctagaaatatagcaagagctctaccatttttttatttgaacaattgcttaaaaaaaaaaagaaaggaatgattatgtagaaatgtttttgatgcagaattactgagcctggaggcaagggggcggggcggggcggggcgggtggaagatagtgcccatcttctattagcagcaggatgtatgagcacagatgacaatccggtccatgctgttcatcagacaaagcctgaatcctggaaaaagccaactctttgaacaggaattagagtgtgatcggctcagttgacgtacaggggtaggtgagtgcgagagtaaagaagctcttctttgtcttcggtagtgctgggtttcttttccaggcacacagatggcctg

SEQ ID NO: 10719 - DNA, 420 bp, Homo sapiens
ctctggagtaatgaaagttaccatctggctttgggagcttcctgttgtacatgaagatgtttgggaggttttatcgtttagcttttttgagtgctcacaatgcagatggttctggggtgaatgggccttgcaagtggctggaccggcaatggcaagcctcagctgagcctgattcatagtgacagttcttctgtctgcaatccataggaatttgggggacaaaaggagggcaccactcactgataatttatgcacacttagcatcttcaacttagaagcactttgttcttccaaataatgctttttcaaatgtgggtggtcagcttttcttattatttccctttaccaactagactgtagcctttgtttcaattccatcattctccacacttcccaccatttcagccttgcccatgtgta

SEQ ID NO: 10720 - DNA, 456 bp, Homo sapiens
accattctgctaattcctcagccaaaggaaatcacacattctttctatacctctttctccttacacattctgaggccaccaaggtacctccctcccctcgatcttttattccatggaggaaaaggctgaagactaggtactagttgttacagttgaatgctgataactggtttaagaagataactttcacagcgcaatttttttgttttaacatggtttcgctctgtcactcaggcttgagtgcagcggtgcaattccccgagcctcaaccttcctggtctcaggtgatcctcccacatcagccttccaaagctgggactatgggtatgtgccaccacatctggctaatatttttgtattttttgtagagacggggttttgccatgttgcccagggtggtcttgaactcctggcctcaagcgatcctcctgcctcggccaaagtgctgggattata

SEQ ID NO: 10721 - DNA, 610 bp, Homo sapiens
  misc_feature (44)..(44): n is a, c, g, or t
  misc_feature (604)..(604): n is a, c, g, or t
  misc_feature (606)..(610): n is a, c, g, or t
attgaaagtaatggatggtagtagaggcagagttagcttttaantatacgtgtgaccattccagttccacccgactgggctgcagatctggctgtgtgcctgccacttcaggcgcagttaatggaataatagcttcctagacttattgagggagacggcttgtcaggttcaaagaattacttttaaaatcttcctgttatagccaagattcagtggtccaaagtcacctaagcataaaagctgccatgagatgggaacatgggggcctgtcctctgtggctcaggcatagcagagtcagttttgtatatagaaaacacatcaagataggagggaagaggaaactgaagctagtattttctagatttagggttaagaatgggacagtgacatggatgagccagttttctcttttgtttttctccccatgaggttacaaaatgagcaatggtaaattctcacttcttgttttccctgttatactcaacattagctttgaatccctttttcctgctttctctaaactgtgctgagaatgaatggcaaacaactccagggacagctgaatctaagctatgcctttgtgtatactatacaaaaagaaanannnnn

SEQ ID NO: 10722 - DNA, 398 bp, Homo sapiens
tacccagtaaagaacctatcatcctcttggcttgtttaacaatatgcctctcacatctgtcttgacttttctgctaccactgccctagtttggttcaggcccttatcacttcacctctagagtactgcacatttccttcaactgatctcttggtgtctaggccttccctcggctgttcttttacacaagccgccatcaggttaattttcttaagtggtggtctgttcacatcacattgctcaaaagtccttcactggctctctcctgctctccagagagaatccagactccagggcctgcaattctgaactctacaatctagacccaacacacttctctagccttaaatcccatgacattcctatgtctgtgcctttgcttttgtacctcttgctgac

SEQ ID NO: 10723 - DNA, 305 bp, Homo sapiens
aaacctagagttgatgaataaggcagcgtcaatctgtataggctaggtaatgatacagtaacaaaacacacacacacacacacacacatatacatacacacacactgaaatccaaatcacggtcatgtgacacgatcaagctatttcttccagttcttccatattctccctaatgcctcctttctgtttcctactcctctattcattcttcctagccactacataatgaaccctcttctttgttttctttcttttaggacttcacttatagcaagctctttcttcccagactttgatagtcgacg

SEQ ID NO: 10724 - DNA, 445 bp, Homo sapiens
  misc_feature (414)..(414): n is a, c, g, or t
cgggagctggagctagcagagctggaccagtggccccaggaacgggagtctgaccagcacgtggtgcccacagcacccgacaccgaggctgataactgcatcgtgcacgagctgaccggccagagctccctcctgcggcggcctgtgcggcccaagcgggctgagccgcgggaggcgtctccgctccacagcctgggccacctcatcatggaccagagctatgtgtgcgcgctcattgccatgatggtatggagcatcacctaccacagctggctgaccttcgtactgctgctctgggcctgcctcatctggacggtgcgcagcgccaccaactggccatgctgtgctcgccctgcatcctgctgtatgggatgacgctgtgctgcctacgctacgtgtgggccatggacctgncgccctgagctgcccaccaccctgggccccg

SEQ ID NO: 10725 - DNA, 905 bp, Homo sapiens
taaaaaatagataccaaattaagtattttattctgggtttagggaggcttctcctgtgcaacatactttagaccaaggcagtcaagaaatactaaaggggatgctgcaattcctctgcctcagacagtacatttatgcatctgtattataaaaaatgtgccagctctagcaagctcacagtactgagcaaagtgctatagttacagctggctctgtttactctttttttttctggtctgttcctctattgggggggggccacagtagggtgttttttcaggatggggggaagaaggaaggagtttttgtgagttctattttggattttggtgaataagaaagcagagaatttgctagcctgttactcagttacactgaaacatgatgcaaactgactcaatttggagcacagaaggtgctgaaaaatttttctaaggaggtcttgaaatatctaagtctgccttcaaggaaggacttataaaaaaaaatcaccatgtaaataatagaagtatgttgctacttctcttaaacctgacctcttaagtcactactcacactaatatactctaaaagtagccagcatgatatttcaaaaattactttgtgtcctttatcctcagtagagtattaagaggaagatgcttgagtgtagacacacatgtgggtcttctttacaaagtcacgtctacatatgtacaccgttagaagtatgggctctaaatgattgaacaagctgtatttccatatttgtattgtccaacctattttcttttttcttattttcctgaatatgtctgaatatatgtgttcagtataaacatacaattgtgtggacgtgtctatgtgtgtttctaattctatactatcttgaaaatggctcagcgttctagaaatacagccacata

SEQ ID NO: 10726 - DNA, 982 bp, Homo sapiens
ccaataaacccattgtaagttgaaaacattgtaagtcaaaaatgcatttaatacacccaacttaccaaacatcatagcttagcgtagcctaccttaaacattctcagaacacattctaatgcatcatctattttataaaaaggtgttgaatatctgatgtaattattgaatactgaaggtgaaaaatagtagtgtatggataccattgtaatgttgagaaactgtaagtcacatcctcttaagtcaggaactatctgtataaggaaacaagatttccattttatcatttgaaatgtatttgactttgtttcactagttgcattatccccatggaaaacttcacattgagaacttaccattatatatttccataaaaatgcatgaaccatcccttagctaagtaaggattttgtaatgttctctcaataatgttgcttggcaaagttaatattttttgtatgctgatgaaaattagtttatgttcaaattgttgtatcagtatggtattttgcacctttaccttaaacaatattttctcctttaattattgattttgcaacattttgggaaagttggaattttaaataaatgaataattttctaaaccagaataccagttcaacagccaaataattctgtctttccatgctgtaattttaaagcatttaattttccaactttttgttcatactcaagtgtgtgaacttcctggctgggcacagtggctcatgcctgtaatcccagcactttgggaggctgaggacctcaagtggagacctcaagtggatcacttgaggtcaggagttgaagaccaacatgttcatggccaacatggcaaaaccctgtcttaaattagccgggcatggttgtgcgtgcctgtaatcccagttactcaggaggctgaggcaggagaatcacttgaacctgagaggcagaggttgcagtgagccaagattgtgcagcctgggcgacagagcgagcc

SEQ ID NO: 10727 - DNA, 174 bp, Homo sapiens
ctatgtcacgtgtcctattctggccttcatctttaagtgatgttctccaactcttggaaaattctagaatgccttttgcttagaacattcactaaattatttatacagcatatgggtaatcttggcatgtggtcaaatatcatggatactaagagcacttgaaagaatgttttc

SEQ ID NO: 10728 - DNA, 506 bp, Homo sapiens
actcaaaataattatgccagcatctactgtcaagagtatgattacttaaaggtttattttttattttttgtgtcattctttttgtctataggtatatcccactgggctagataatcaaattactttttgttgttgttgttgttgtttgacctggggtcttgctgtgctggccaggctggagtgcagtgactgttcaccagtgtgatcatagcgcactacagcctcgaactcctaggctgaagtgatcccaacacttcggaaggccaaggcaggaagatcgcttgagcccaagaattcgagactagtctgggcaacatagcaagaccccatctcttaaaaacatattttttaattagctgggcatggtggtgcatgcctgtcatcctagctccttgggacactgaggtgggaggattgcttgagtccaggaggatgtgtttgcagtgagccatgtctgcaccactgctctccagcctgggcgacagagtgacacctcctttcagaaa

SEQ ID NO: 10729 - DNA, 340 bp, Homo sapiens
actcaaaataattatgccagcatctactgtcaagagtatgattacttaaaggtttattttttattttttgtgtcattctttttgtctataggtatatcccactgggctagataatcaaattactttttgttgttgttgttgttgtttgacctggggtcttgctgtgctggccaggctggagtgcagtgactgttcaccagtgtgatcatagcgcactacagcctcgaactcctaggctgaagtgatcccccgagcacttgtgactacaggtacacgccactgtgtccagctacaaattactgggttttaaagttgctttgaatagtttttcctctgtctc

SEQ ID NO: 10730 - DNA, 3716 bp, Homo sapiens
  misc_feature (711)..(711): n is a, c, g, or t
  misc_feature (2069)..(2069): n is a, c, g, or t
  misc_feature (2416)..(2416): n is a, c, g, or t
  misc_feature (2754)..(2754): n is a, c, g, or t
gctctgctgcggaggccgtagccgcgggtagttgggaggaaccgagatttacgcttggtaaggcaagttgcgagctgtccggcgccggtcgagttcctgccgccgtcgtcgtcaggcaggggagaagggggcccaacccctctagtgacagctgtttgctacctaatagggcttttcatcccaccgggccccagggccttcgttaggagcccagcaggctcaacttcttgctgtggttctggaaaagggagtgaccacctggctcaacacctctctctgtgatgtgtttgggagttttgggaaatgagacggctccgagggaagagcttgagggagcggcgtcgcactcgttcgaccttcccgggcctgggctttgtttctaggcattttaggttgaacgctctacatcttaactgagggcaggggaggtggccagagcatcccgctgagcgttttccgattccccagatggccaggcacctggtcctggtggctggacagtgaccccgtggacgcacatttacagctatagccattcagtgccgcggggaggtgaggatagtgatcctgggacctgctcgaggattcacccttgccccaagaacctgttccattcccaggaatgaaggcggtcaggcaggggaggagaagggggcctcaactcttctagtgacagcagtttgccacctaatagagcttttcagattttgnctcctcaggccattttactcagcctcggactatcaaggatggtcacattgaagctgtttttctgcagtcaggagcgaaaagtcccggctgttgaaggagaaactgaatctggttcaggagtcccaggttcctccctctgagaggccaggtggggcctgcgtgagtagcagttgttcaggtggcaggacactgctgttttcatcccacctggccccaggcccctgattaggggcccagagtgcttatgtacttgcctcggtctgagaaagggagtgactgcatagcccaacacctgtgggatgcctcactgcccagatgtttcatctccgggatgcttcattgcccattcagcaccctctatggtgctgactcttccggaagatgtttctgattccttgctaggctggtggttgcaccatagctgagaggactcaagaagagcctggtctcagcttcacctaggagtcccggaggagtaagaaacacgtatctttcctgttctgggcacatatgggtgggtagcagagctgaggctagctgaggatcccgactctcctttgggagcctttgttgtgccgctctcccaggctgatcagatctggagagctaacagcttcctgtggccacatctgtgtccaaggctgggcccatgcctgtagccagattgccaggatctggaaggggccaagagacagctggtgctgggtaggcagcagccctgtgtcaacctgcccccactattaccccatgctgtgatttgcatgtggtctgcccctgcccaaaatggtattgaaatttgagcctcaatgaggcagtgttaggaggtggtgcctagtaggaggagtttgggtaataggggtggatccctcatggataggttagtgtcctttgtggaggggtgagttcccatgagagctggttagagagtcagccttcctgcggttgtctcttgcttcctctctcgccatatggccacgtaatctctttgtgcatgcctctccccttctacttgctgccttgagttgaagtagcatgaggccctcaccaggtgcagctgcccaatcttgaaatttccaccagaattttgagccaaataaacctgttttgctttttttaaaaaataaattcccccaccttggctgggcgcagtggctcacgcctgtaatcccagcactttgggaggccgaggcgggcggatcacgaggtcagatcgagaccatcttggctaacacggtgaaaccccatctctactgaaaaaaaaaaagaaacaaaaaaattagccaggtgtggtggcgggcacctgtagtcccagcccctcactcgggaggctgattgaggcaggagaatggtgtgaaccngggaggcggagcttgcagtgagcccagatcgcaccactgcactccagcctgggcgacagagcgagactccgtctctaaataaataaataaataaataaaacaaacccaacctcaggtatagcagtgtgaaacagactaagacattccacatgccctgtggtcccatctgctaccccagggtgcaaagatgttccctcagccctgaagaatgacattccccccggctcctgggatatctggaggggttgtaagcagcttgggttggtgagataaggagtttggggggcagctgattcatgaccctggcctcctcaactgcaggctcttggtctgaagtactgtaattnaagtatgagagcctcggggccctcacttcaaggagggaagagcatccccatgcctcagcgtttggggattgtagggagatgagagtccttcaggtgggactagttcccgccatgaccccactgctggccagtggcctgaaacgcatctgaccacttctcaggttcatgggtgttgaggaggagccctgtggaatcaaccctgtctgcctcctcttatcctgccactcctcttgctctgtctggatgactgcccttgtttttcaagggaatgttccctgtcttcctcagccaggattttttctgaacttgacatctccgtttgttcagggggcaatcantgggcacttcactgtgctggtccttgcattctcatggagatgcagagattaaaaattagtatcttgtccacatactgcccagagttagcaaggattgcttttctgtggatttgtctcaggtcgggcacagtgggggtagggtccttctcccttttcctagcctaaaggttccagctgaatcttcccaggcagggctgaaacaggaaccattttaggctttgctgcaacccatggtcagttctccaagaaaagtgaagagggttccacctggggcagccctcaagggctcagagggccaaaacacacgtacaacatgttgagacactgagtttgtgcgatcctcacacatctcagcagtgagtatttctgcctcattttaccgatgaggaacctgagcttcaaagggaagaggtgacagctcaggaccacacagctgtaggtaggaggcaggaaaatagggtctgagtgcagggaacataggctgattcacacttcagttatgataggaaataccttctccataggacataggccaagcaaatgactttgtaacttcatcctctccatctgcataacgtgtgccccaagtaaccaatggaatcacctagagggtgtttaaactctcagaagttctgtaacaggctctccatctacataacgtgtgccccaagtaaccaatggaatcacctagagggtatttaaactctcagaagttctgtaacagggcttttgtgctcctatgctcaggctcacccccacactgtggagtgtactttcattttcaataaatcccttcattccttaaaagaaaaaaaaaacaaaaaaaaaaaaaaaaccgcgggcatcttttgcggggcgggaaaagagggtttgaagggccccgggctaaaggttccggacccgttttggcccagggggaaaccgggggccccaaaggagcaaaaaccaaacccggaccgtaa

SEQ ID NO: 10731 - DNA, 3557 bp, Homo sapiens
  misc_feature (711)..(711): n is a, c, g, or t
  misc_feature (2069)..(2069): n is a, c, g, or t
  misc_feature (2416)..(2416): n is a, c, g, or t
  misc_feature (2754)..(2754): n is a, c, g, or t
gctctgctgcggaggccgtagccgcgggtagttgggaggaaccgagatttacgcttggtaaggcaagttgcgagctgtccggcgccggtcgagttcctgccgccgtcgtcgtcaggcaggggagaagggggcccaacccctctagtgacagctgtttgctacctaatagggcttttcatcccaccgggccccagggccttcgttaggagcccagcaggctcaacttcttgctgtggttctggaaaagggagtgaccacctggctcaacacctctctctgtgatgtgtttgggagttttgggaaatgagacggctccgagggaagagcttgagggagcggcgtcgcactcgttcgaccttcccgggcctgggctttgtttctaggcattttaggttgaacgctctacatcttaactgagggcaggggaggtggccagagcatcccgctgagcgttttccgattccccagatggccaggcacctggtcctggtggctggacagtgaccccgtggacgcacatttacagctatagccattcagtgccgcggggaggtgaggatagtgatcctgggacctgctcgaggattcacccttgccccaagaacctgttccattcccaggaatgaaggcggtcaggcaggggaggagaagggggcctcaactcttctagtgacagcagtttgccacctaatagagcttttcagattttgnctcctcaggccattttactcagcctcggactatcaaggatggtcacattgaagctgtttttctgcagtcaggagcgaaaagtcccggctgttgaaggagaaactgaatctggttcaggagtcccaggttcctccctctgagaggccaggtggggcctgcgtgagtagcagttgttcaggtggcaggacactgctgttttcatcccacctggccccaggcccctgattaggggcccagagtgcttatgtacttgcctcggtctgagaaagggagtgactgcatagcccaacacctgtgggatgcctcactgcccagatgtttcatctccgggatgcttcattgcccattcagcaccctctatggtgctgactcttccggaagatgtttctgattccttgctaggctggtggttgcaccatagctgagaggactcaagaagagcctggtctcagcttcacctaggagtcccggaggagtaagaaacacgtatctttcctgttctgggcacatatgggtgggtagcagagctgaggctagctgaggatcccgactctcctttgggagcctttgttgtgccgctctcccaggctgatcagatctggagagctaacagcttcctgtggccacatctgtgtccaaggctgggcccatgcctgtagccagattgccaggatctggaaggggccaagagacagctggtgctgggtaggcagcagccctgtgtcaacctgcccccactattaccccatgctgtgatttgcatgtggtctgcccctgcccaaaatggtattgaaatttgagcctcaatgaggcagtgttaggaggtggtgcctagtaggaggagtttgggtaataggggtggatccctcatggataggttagtgtcctttgtggaggggtgagttcccatgagagctggttagagagtcagccttcctgcggttgtctcttgcttcctctctcgccatatggccacgtaatctctttgtgcatgcctctccccttctacttgctgccttgagttgaagtagcatgaggccctcaccaggtgcagctgcccaatcttgaaatttccaccagaattttgagccaaataaacctgttttgctttttttaaaaaataaattcccccaccttggctgggcgcagtggctcacgcctgtaatcccagcactttgggaggccgaggcgggcggatcacgaggtcagatcgagaccatcttggctaacacggtgaaaccccatctctactgaaaaaaaaaaagaaacaaaaaaattagccaggtgtggtggcgggcacctgtagtcccagcccctcactcgggaggctgattgaggcaggagaatggtgtgaaccngggaggcggagcttgcagtgagcccagatcgcaccactgcactccagcctgggcgacagagcgagactccgtctctaaataaataaataaataaataaaacaaacccaacctcaggtatagcagtgtgaaacagactaagacattccacatgccctgtggtcccatctgctaccccagggtgcaaagatgttccctcagccctgaagaatgacattccccccggctcctgggatatctggaggggttgtaagcagcttgggttggtgagataaggagtttggggggcagctgattcatgaccctggcctcctcaactgcaggctcttggtctgaagtactgtaattnaagtatgagagcctcggggccctcacttcaaggagggaagagcatccccatgcctcagcgtttggggattgtagggagatgagagtccttcaggtgggactagttcccgccatgaccccactgctggccagtggcctgaaacgcatctgaccacttctcaggttcatgggtgttgaggaggagccctgtggaatcaaccctgtctgcctcctcttatcctgccactcctcttgctctgtctggatgactgcccttgtttttcaagggaatgttccctgtcttcctcagccaggattttttctgaacttgacatctccgtttgttcagggggcaatcantgggcacttcactgtgctggtccttgcattctcatggagatgcagagattaaaaattagtatcttgtccacatactgcccagagttagcaaggattgcttttctgtggatttgtctcaggtcgggcacagtgggggtagggtccttctcccttttcctagcctaaaggttccagctgaatcttcccaggcagggctgaaacaggaaccattttaggctttgctgcaacccatggtcagttctccaagaaaagtgaagagggttccacctggggcagccctcaagggctcagagggccaaaacacacgtacaacatgttgagacactgagtttgtgcgatcctcacacatctcagcagtgagtatttctgcctcattttaccgatgaggaacctgagcttcaaagggaagaggtgacagctcaggaccacacagctgtaggtaggaggcaggaaaatagggtctgagtgcagggaacataggctgattcacacttcagttatgataggaaataccttctccataggacataggccaagcaaatgactttgtaacttcatcctctccatctgcataacgtgtgccccaagtaaccaatggaatcacctagagggtgtttaaactctcagaagttctgtaacaggctctccatctacataacgtgtgccccaagtaaccaatggaatcacctagagggtatttaaactctcagaagttctgtaacagggcttttgtgctcctatgctcaggctcacccccacactgtggagtgtactttcattttcaataaatcccttcattcctt

SEQ ID NO: 10732 - DNA, 407 bp, Homo sapiens
ccaaaatctaacccaacataacttagattgggtatacgcagagcaatgtagagtcatataaagatttaattaaacattttaaatgttatttgcctaacacttctttatgtttcagagtcctgcctctgtgatacagtcacataccacataatgatatttcagtcaatgatggactacatattacacattagtcccataaaatgatgatggcactgaaaaattcctatggcctggtggcatcatagccatcaaactgtcatagtgcaaagccttgctcatgggcttggggtgatgctggtgcaaacaaacttcctgtgctgccagttgtataaaagtctagcacacatcaatatgtagagtatacaatatgtgataatgataataaacgactgtgtgatgggttcatg

SEQ ID NO: 10733 - DNA, 295 bp, Homo sapiens
taagatgtagattatatgtaaagcgaaagtatattatatttgaaactgacactccagagaggaggaaggccagagaagatgcaatatttgaagaaataatggtcacaaattttcaaatctgatagaagacatcaagatatagattcaagtggatcagtaaactcttaaacagggtaaatacaaataaaagcataccaggacacatcatagtaacattgctaaaaataaagacaatgagaatttaaaattaacccaaaaaattaaggtctcaaaagcagacagcttatttgataat

SEQ ID NO: 10734 - DNA, 446 bp, Homo sapiens
acactccagggtcatttttcaacttctcattgtctcacacctggaacactcttcatccagggagcctacacgtgttcatcatctatctgctcaaaggcaccttaacaaagagctgttcccaccctacaagcacagtgccaactcctaacacttactgttccaccagctgctttaactttccttatagcaatttttactccaagatatgttatttatatatctgcttattactggttatatggttacttctaagagaacaaaagcattgtgaagaataaggacatggtatgttttttctttcttatttgtactgctgatagcgttggaatatagtaggctatcaaaacacaagttttgggtgtgtggtggaggcaggggggtttgtcatccagcctggagtgcagtggcatgaacttggctcactgcaatgtctgcctccagggttc

SEQ ID NO: 10735 - DNA, 577 bp, Homo sapiens
gatattaagcaaatttgacagtcctaaaatcacaagaagaatgaagatagaacctgaaaacgtttgcgcagacagtggagaataacatcatctgcggggagactcagtgatggatagatggctttactgaacctgggaactcgtacctcctgctggcgtggccatgaacacagtggatcaactaaaagctcctgaattcttattgctatcctatgctgtttctcaccattcctgcatctatatgtgatcgcagagcctgctttataactcatcagctaccatagcagctgactttttctgccacactctcaagagtcaacaaagagaggccaagcattctcccccactccccactgagagagtaggattgaaggagagagtgtgaacaaagggtctcagaaggttgagaaccactgaactaacattctctaaggatcatgatgaccctgagattctatgattctgagtccaagcattctgagtcttggttccacatctgtaagatggacacacccctgttgactcacagcattgttgggaagattggcagaaagttctaaagaataatggtggccgg

SEQ ID NO: 10736 - DNA, 604 bp, Homo sapiens
cccagaagtatggctggtgtctacacacactgaaggggcatctgcctgtgaagtagctggtggttctgaggcctgtctgcatcctctcctctagtttaatccaattgtcagtataccagtgaccaggagctgcaagtcctcctcttgtgaaccattctttcactactctgggatggctttgaggttgagaaagcacagactgatggttctctctattctgatagataatttcctgaaggtcaatgccatcttcttaagtattgcctctagctaaaagtaccatttggcttttgtttgttggcttaattgaatgttctttggagatgtgtgtatttgtacactgaaagtaatggaattaaccctacactttgaagatgatcttcaagttaaaatatctcgcagcatgaggaaagagggaaagggacagagagcaagggtgagaatgagagcaagactgagagagtgatatgtatgtctgagtaaggcaatgagttaggagagagagaagcccaggcagtcttccttctttattgctgagaagtcacatccacagagactggcccacatcctaattctgggccaacagctccattgtgcaatacca

SEQ ID NO: 10737 - DNA, 224 bp, Homo sapiens
gctccttaagcaattgagggtcagcagtgcctggtggccagcaatgtttggctttgcaatgaagtatggcacctcccgttggaagccttcctatagcatcctttgggaagctttgcagcaggttctgagtcacaccaccgctccacggacagctttctcaagcacccagaaactatattatcagcaagtcctgccagcacaacacctcagcaaattcctccacc

SEQ ID NO: 10738 - DNA, 487 bp, Homo sapiens
gaggagttcaggcaccatagctgaaagaagcatttgaataggcagagatgctttaaaatgagacaagatccaccccgtaaaacaggccactgaaacattttttaaaaggtagctccatggcctttctaggagactcatctctgccttcattctcctgtaggtataaccaaggcaaggaaagcccactccagtgttctggccttgtggagagtggacagccatgcagatgggctcaggtccctggagggcaggcacttggaattcctccctggattagtcctatcctgccttctttccttttcagcctcccaagctgcttccccaatgactgccctcccttgcttttttccggccacctgctctcaacaggagctgcagaccctttggacaaagggcctgccagatcctggggcaattcagcctctggttggagcaggtggaggctgggccagctggggccatgaggaaggaaatcaaagcaattgac

SEQ ID NO: 10739 - DNA, 232 bp, Homo sapiens
tccatagggtagcttttaatagcaaaatcaccagaaggcagagagaagagaaaactcaagagccctgaaataatctccaaacttaattaccaattctaaataattaagagttaactatagtatacttcatccatcatgaggaaataattagcaggaattaaaacttgagcactattttgttcttcttacctttttcacttatgcttggaaataatatagatggaatattcag

SEQ ID NO: 10740 - DNA, 315 bp, Homo sapiens
aaattagcagggtgcagtggcacaccccccgtaaccccagttacttgggaggctgaggcaggagaattgcttgaacttgggaggcggaggttgcagtggcgcagccatggctcactgcagcctcagtctcagtctcacaggctcaagcagatcctctcgcctccgcctcccaaagtattacaggcatgagccaccatgcctcttaggcctggtttattttgaaaagtatcattgctactgtgtgtgagcagccctaacttcaccgaagacagaagaaccaacaaaaagaagtataaatttttatttacttaatta

SEQ ID NO: 10741 - DNA, 701 bp, Homo sapiens
aaattagcagggtgcagtggcacaccccccgtaaccccagttacttgggaggctgaggcaggagaattgcttgaacttgggaggcggaggttgcagtgagtcaagatggcaccactgcactctagcctgggcaacagagtgagacactatctcataaaaaagagaaacattctgttttttagtatttcaacagattaagaacagctcagtccattgctgtgtttaagatagattggggttattttgcttagacacattttagaagcttcctaaatttttttaggaagttttttttggatgtttttgtttttgtgattttcctaaagaaaattttgacagtaagcagatgttaacttttgagtccaacagtatttccctatttctttccttttcttaggactgttttattttattttatttattttattttattttatttatatagacagagtcttgctctgctgcccatgctggagtgcaggtggcgcagccatggctcactgcagcctcagtctcagtctcacaggctcaagcagatcctctcgcctccgcctcccaaagtattacaggcatgagccaccatgcctcttaggcctggtttattttgaaaagtatcattgctactgtgtgtgagcagccctaacttcaccgaagacagaagaaccaacaaaaagaagtataaatttttatttacttaatta

SEQ ID NO: 10742 - DNA, 612 bp, Homo sapiens
gtttcaatttgctatcacacacacagtcacacacagtcacacacacacacacacacacactcaaacacacataatcttttgctcacccactctgtctctctgcccgtctatgggataacactctactatttatgtagtcaatataacaaacaagagatagcctttgaaatggcaattgggaaaagcaaaaatgatcattgataacttaatagacttttttatatgtcagagttcaagaaaccaaagtttgcaacttaaatctcagttttcaaacagtaaaagtttgtatagatggcactacagaaaaataaaaatggttattcctaccagctccagaaatgtgttacacaatatacactagaagactttttttttaataatagtattttgtccttaggtagtattgttcctttcaaccaaagactccagaattattgaaaaacaaaaaaggaaaaaaaaaatgagataatgggggaaaaaaaggacgctgcttcacaccaaaggtttaaaaaaatattttccaaatgcactaggaacattgtaaaaaccagaaaggagtgaacagaatgctaatgaagatactgccctaaagaaatctgtacaaaaaaaaaa

SEQ ID NO: 10743 - DNA, 466 bp, Homo sapiens
tagtggcaatcgctaactctgctggggaaagacttgctaattttcttttaattgcataagagcagagccctacagcaaattgaacatgtggtgactacatgaaatatatgatagaatatggtcctactttgattgagttaatcacaggtctgacaaatatacaaaattaaaataagccacattttttagtacttaatctcttgattctgttgctttttactgtttgctggatagtcttacgttgtttttaggaacctatggttcttcagtgctaatttgttggatatagacagcagtttgctattcgtgactctaatgggtgtgtaattccctttcttgtatgcaattgggcatttcagtatagtttacaatatggaacgtggaggggaccccccgagtaggacagcggctgctctttgtcacttgcagctgtgtttgcaagggagcatgctggcaaccagcaagg

SEQ ID NO: 10744 - DNA, 529 bp, Homo sapiens
aggaagataaaggatcatatcattatgttctttgaaacaattatggtaaggaataaaactagttaaagttttttgaaaaggctatcagtagtaaaagcaaacaatttgttagaaagtaagattaaagttggttaataattaaaattttggataataatgctagtctagcaacatgctgaggtaatcataaggaactctagaatctgataaaattaaggcatgttggcaatcctctctctgagatgcccttctccctctattaatccacagctagcaccaccttcaaatcaggctcaagaatcacttctaggctttcccaaattaatctcacctcactctgatcaccctttactgaatctccactctttgtttagccaacatattaagcaactactgtgtaccagatacattgtggaaaagaatattaaaaatctggtccttggccagacgtggtggctcacacctgtaatcccaacactttgggtggccaaggcaggaggatggcttgagaccagtctggcaacatagc

SEQ ID NO: 10745 - DNA, 2707 bp, Homo sapiens
gtcttgaacctttgtcacccctcacgttgcacaccaaagacataccctagtgattaaatgctgattttgtgtacgattgtccacggacgccaaaacaatcacagagctgcttgatttgttttaattaccagcacaaaatgccatcagtctgggacgtgatcgggcagaggtgtactcacagtagtgtaaatactgctgtaaatagttgtctgatggtggctttgacagtgagctagcttctgagttttcccttctttttatactgttttctgtgctggcttttttgaatcttcctaatttttcatctctttaacaaactcctatgaagttgaaaccgggaagtttgctctaacatttccagagaaggtattaagtcatgatgcaggaatctgcgacagagacaataagcaacagttcaatgaatcaaaatggaatgagcactctaagcagccaattagatgctggcagcagagatggaagatcaagtggtgacaccagctctgaagtaagcacagtagaactgctgcatctgcaacaacagcaggctctccaggcagcaagacaacttcttttacagcagcaaacaagtggattgaaatctcctaagagcagtgataaacagagaccactgcaggtgcctgtgtcagtggccatgatgactccccaggtgatcacccctcagcaaatgcagcagatccttcagcaacaagtcctgtctcctcagcagctacaagcccttctccaacaacagcaggctgtcatgctgcagcagcaacaactacaagagttttacaagaaacagcaagagcagttacatcttcagcttttgcagcagcagcagcaacagcagcagcagcaacaacagcagcaacaacagcagcagcaacaacaacaacaacagcagcaacaacagcagcagcagcagcaacagcagcagcagcagcaacagcatcctggaaagcaagcgaaagagcagcagcagcagcagcagcagcaacagcaattggcagcccagcagcttgtcttccagcagcagcttctccagatgcaacaactccagcagcagcagcatctgctcagccttcagcgtcagggactcatctccattccacctggccaggcagcacttcctgtccaatcgctgcctcaagctggcttaagtcctgctgagattcagcagttatggaaagaagtgactggagttcacagtatggaagacaatggcattaaacatggagggctagacctcactactaacaattcctcctcgactacctcctccaacacttccaaagcatcaccaccaataactcatcattccatagtgaatggacagtcttcagttctaagtgcaagacgagacagctcgtcacatgaggagactggggcctctcacactctctatggccatggagtttgcaaatggccaggctgtgaaagcatttgtgaagattttggacagtttttaaagcaccttaacaatgaacacgcattggatgaccgaagcactgctcagtgtcgagtgcaaatgcaggtggtgcaacagttagaaatacagctttctaaagaacgcgaacgtcttcaagcaatgatgacccacttgcacatgcgaccctcagagcccaaaccatctcccaaacctctaaatctggtgtctagtgtcaccatgtcgaagaatatgttggagacatccccacagagcttacctcaaacccctaccacaccaacggccccagtcaccccgattacccagggaccctcagtaatcaccccagccagtgtgcccaatgtgggagccatacgaaggcgacattcagacaaatacaacattcccatgtcatcagaaattgccccaaactatgaattttataaaaatgcagatgtcagacctccatttacttatgcaactctcataaggcaggctatcatggagtcatctgacaggcagttaacacttaatgaaatttacagctggtttacacggacatttgcttacttcaggcgtaatgcagcaacttggaagaatgcagtacgtcataatcttagcctgcacaagtgttttgttcgagtagaaaatgttaaaggagcagtatggactgtggatgaagtagaataccagaagcgaaggtcacaaaagataacaggaagtccaaccttagtaaaaaatatacctaccagtttaggctatggagcagctcttaatgccagtttgcaggtccactagactgccttggcagagagcagtttacctttgctaagtaatcctggactgataaataatgcatccagtggcctactgcaggccgtccacgaagacctcaatggttctctggatcacattgacagcaatggaaacagtagtccgggctgctcacctcagccgcacatacattcaatccacgtcaaggaagagccagtgattgcagaggatgaagactgcccaatgtccttagtgacaacagctaatcacagtccagaattagaagacgacagagagattgaagaagagcctttatctgaagatctggaatgagaactgacttgtgaaacctcagcgtgaagggacatatcactgaccttcataaccactccacaaccatgaatatttgacaaatttttactgtgactatttattaagcatggataaaggagacagccctaaaggaacttactaagccagccctttgggattcagtaccaacaggca

SEQ ID NO: 10746 - DNA, 771 bp, Homo sapiens
gtcttgaacctttgtcacccctcacgttgcacaccaaagacataccctagtgattaaatgctgattttgtgtacgattgtccacggacgccaaaacaatcacagagctgcttgatttgttttaattaccagcacaaaatgccatcagtctgggacgtgatcgggcagaggtgtactcacagtagtgtaaatactgctgtaaatagttgtctgatggtggctttgacagtgagctagcttctgagttttcccttctttttatactgttttctgtgctggcttttttgaatcttcctaatttttcatctctttaacaaactcctatgaagttgaaaccgggaagtttgctctaacatttccagagaaggtattaagtcatgatgcaggaatctgcgacagagacaataagcaacagttcaatgaatcaaaatggaatgagcactctaagcagccaattagatgctggcagcagagatggaagatcaagtggtgacaccagctctgaagtaagcacagtagaactgctgcatctgcaacaacagcaggaggatgttgtctcttacacccaggttatttgttaaagtctttggatctatacttaactgatgacctagaagagcgattctcaaaagtgtgagtcctggaccagcagcaacagcatcaccgggaacttgttagaaatgcacattctcaggccactccctagacctactgaatcagaaaccctggggttggagctcagcaattaccctgcaggtaattctgatgcatg

SEQ ID NO: 10747 - DNA, 1288 bp, Homo sapiens
gtcttgaacctttgtcacccctcacgttgcacaccaaagacataccctagtgattaaatgctgattttgtgtacgattgtccacggacgccaaaacaatcacagagctgcttgatttgttttaattaccagcacaaaatgccatcagtctgggacgtgatcgggcagaggtgtactcacagtagtgtaaatactgctgtaaatagttgtctgatggtggctttgacagtgagctagcttctgagttttcccttctttttatactgttttctgtgctggcttttttgaatcttcctaatttttcatctctttaacaaactcctatgaagttgaaaccgggaagtttgctctaacatttccagagaaggtattaagtcatgatgcaggaatctgcgacagagacaataagcaacagttcaatgaatcaaaatggaatgagcactctaagcagccaattagatgctggcagcagagatggaagatcaagtggtgacaccagctctgaagtaagcacagtagaactgctgcatctgcaacaacagcaggctctccaggcagcaagacaacttcttttacagcagcaaacaagtggattgaaatctcctaagagcagtgataaacagagaccactgcaggtgcctgtgtcagtggccatgatgactccccaggtgatcacccctcagcaaatgcagcagatccttcagcaacaagtcctgtctcctcagcagctacaagcccttctccaacaacagcaggctgtcatgctgcagcagcaacaactacaagagttttacaagaaacagcaagagcagttacatcttcagcttttgcagcagcagcagcaacagcagcagcagcaacaacagcagcaacaacagcagcagcaacaacaacaacaacagcagcaacaacagcagcagcagcagcaacagcagcagcagcagcaacagcatcctggaaagcaagcgaaagagcagcagcagcagcagcagcagcaacagcaattggcagcccagcagcttgtcttccagcagcagcttctccagatgcaacaactccagcagcagcagcatctgctcagccttcagcgtcagggactcatctccattccacctggccaggcagcacttcctgtccaatcgctgcctcaagctggcttaagtcctgctgagattcagcagttatggaaagaagtgactggagttcacagtatggaagacaatggcattaaacatggagggctagaggaattccccgtccaagggcccgctgcagtctgtgcaggtctt

SEQ ID NO: 10748 - DNA, 1095 bp, Homo sapiens
ttttcctgcccttctcttgggcctttgcagctaaatctggtgtctagtgtcaccatgtcgaagaatatgttggagacatccccacagagcttacctcaaacccctaccacaccaacggccccagtcaccccgattacccagggaccctcagtaatcaccccagccagtgtgcccaatgtgggagccatacgaaggcgacattcagacaaatacaacattcccatgtcatcagaaattgccccaaactatgaattttataaaaatgcagatgtcagacctccatttacttatgcaactctcataaggcaggctatcatggagtcatctgacaggcagttaacacttaatgaaatttacagctggtttacacggacatttgcttacttcaggcgtaatgcagcaacttggaagaatgcagtacgtcataatcttagcctgcacaagtgttttgttcgagtagaaaatgttaaaggagcagtatggactgtggatgaagtagaataccagaagcgaaggtcacaaaagataacaggaagtccaaccttagtaaaaaatatacctaccagtttaggctatggagcagctcttaatgccagtttgcaggtccactagactgccttggcagagagcagtttacctttgctaagtaatcctggactgataaataatgcatccagtggcctactgcaggccgtccacgaagacctcaatggttctctggatcacattgacagcaatggaaacagtagtccgggctgctcacctcagccgcacatacattcaatccacgtcaaggaagagccagtgattgcagaggatgaagactgcccaatgtccttagtgacaacagctaatcacagtccagaattagaagacgacagagagattgaagaagagcctttatctgaagatctggaatgagaactgacttgtgaaacctcagcgtgaagggacatatcactgaccttcataaccactccacaaccatgaatatttgacaaatttttactgtgactatttattaagcatggataaaggagacagccctaaaggaacttactaagccagccctttgggattcagtaccaacaggca

SEQ ID NO: 10749 - DNA, 933 bp, Homo sapiens
aaaatagctgtatcagtcatttctaaaacgcttctgatctcactctttcttaacagctttctaaagaacgcgaacgtcttcaagcaatgatgacccacttgcacatgcgaccctcagagcccaaaccatctcccaaacctaaattgccccaaactatgaattttataaaaatgcagatgtcagacctccatttacttatgcaactctcataaggcaggctatcatggagtcatctgacaggcagttaacacttaatgaaatttacagctggtttacacggacatttgcttacttcaggcgtaatgcagcaacttggaagaatgcagtacgtcataatcttagcctgcacaagtgttttgttcgagtagaaaatgttaaaggagcagtatggactgtggatgaagtagaataccagaagcgaaggtcacaaaagataacagggtccactagactgccttggcagagagcagtttacctttgctaagtaatcctggactgataaataatgcatccagtggcctactgcaggccgtccacgaagacctcaatggttctctggatcacattgacagcaatggaaacagtagtccgggctgctcacctcagccgcacatacattcaatccacgtcaaggaagagccagtgattgcagaggatgaagactgcccaatgtccttagtgacaacagctaatcacagtccagaattagaagacgacagagagattgaagaagagcctttatctgaagatctggaatgagaactgacttgtgaaacctcagcgtgaagggacatatcactgaccttcataaccactccacaaccatgaatatttgacaaatttttactgtgactatttattaagcatggataaaggagacagccctaaaggaacttactaagccagccctttgggattcagtaccaacaggca

SEQ ID NO: 10750 - DNA, 1928 bp, Homo sapiens
gactttctatacccttttgtttaggattttttggattctggattggaaaatttcagagctgccttggaaaaaaatgtatgtagagctgtctctttgaatccaatgtatattttttgttgtttttatgggatgaatcttaatggatactctgccatatgccagtctagaagagtttaggagatttataatacgtgaaacttttgcctttatttattaaagtcaaaatggtttcagttacatcttcagcttttgcagcagcagcagcaacagcagcagcagcaacaacagcagcaacaacagcagcagcaacaacaacaacaacagcagcaacaacagcagcagcagcagcaacagcagcagcagcagcaacagcatcctggaaagcaagcgaaagagcagcagcagcagcagcagcagcaacagcaattggcagcccagcagcttgtcttccagcagcagcttctccagatgcaacaactccagcagcagcagcatctgctcagccttcagcgtcagggactcatctccattccacctggccaggcagcacttcctgtccaatcgctgcctcaagctggcttaagtcctgctgagattcagcagttatggaaagaagtgactggagttcacagtatggaagacaatggcattaaacatggagggctagacctcactactaacaattcctcctcgactacctcctccaacacttccaaagcatcaccaccaataactcatcattccatagtgaatggacagtcttcagttctaagtgcaagacgagacagctcgtcacatgaggagactggggcctctcacactctctatggccatggagtttgcaaatggccaggctgtgaaagcatttgtgaagattttggacagtttttaaagcaccttaacaatgaacacgcattggatgaccgaagcactgctcagtgtcgagtgcaaatgcaggtggtgcaacagttagaaatacagctttctaaagaacgcgaacgtcttcaagcaatgatgacccacttgcacatgcgaccctcagagcccaaaccatctcccaaacctaaattgccccaaactatgaattttataaaaatgcagatgtcagacctccatttacttatgcaactctcataaggcaggctatcatggagtcatctgacaggcagttaacacttaatgaaatttacagctggtttacacggacatttgcttacttcaggcgtaatgcagcaacttggaagaatgcagtacgtcataatcttagcctgcacaagtgttttgttcgagtagaaaatgttaaaggagcagtatggactgtggatgaagtagaataccagaagcgaaggtcacaaaagataacaggaagtccaaccttagtaaaaaatatacctaccagtttaggctatggagcagctcttaatgccagtttgcaggtccactagactgccttggcagagagcagtttacctttgctaagtaatcctggactgataaataatgcatccagtggcctactgcaggccgtccacgaagacctcaatggttctctggatcacattgacagcaatggaaacagtagtccgggctgctcacctcagccgcacatacattcaatccacgtcaaggaagagccagtgattgcagaggatgaagactgcccaatgtccttagtgacaacagctaatcacagtccagaattagaagacgacagagagattgaagaagagcctttatctgaagatctggaatgagaactgacttgtgaaacctcagcgtgaagggacatatcactgaccttcataaccactccacaaccatgaatatttgacaaatttttactgtgactatttattaagcatggataaaggagacagccctaaaggaacttactaagccagccctttgggattcagtaccaacaggca

SEQ ID NO: 10751 - DNA, 1071 bp, Homo sapiens
gtcttgaacctttgtcacccctcacgttgcacaccaaagacataccctagtgattaaatgctgattttgtgtacgattgtccacggacgccaaaacaatcacagagctgcttgatttgttttaattaccagcacaaaatgccatcagtctgggacgtgatcgggcagaggtgtactcacagtagtgtaaatactgctgtaaatagttgtctgatggtggctttgacagtgagctagcttctgagttttcccttctttttatactgttttctgtgctggcttttttgaatcttcctaatttttcatctctttaacaaactcctatgaagttgaaaccgggaagtttgctctaacatttccagagaaggtattaagtcatgatgcaggaatctgcgacagagacaataagcaacagttcaatgaatcaaaatggaatgagcactctaagcagccaattagatgctggcagcagagatggaagatcaagtggtgacaccagctctgaagtaagcacagtagaactgctgcatctgcaacaacagcaggctctccaggcagcaagacaacttcttttacagcagcaaacaagtggattgaaatctcctaagagcagtgataaacagagaccactgcaggtgcctgtgtcagtggccatgatgactccccaggtgatcacccctcagcaaatgcagcagatccttcagcaacaagtcctgtctcctcagcagctacaagcccttctccaacaacagcaggctgtcatgctgcagcaggtaatgtgggttacctgctttggtgttctagcatgacttagaaggtgtgcacttattttgaaagtgcagtgggcatatttgacaattcagtctccatttgaaaggacaacctattagcgtgctagaacataaatgtaacattttaattatagaactcgtaagaaaatctagattgcttatttttttaaaaaaattattaaagtctagaataagagcagagagaggtgtaatttgaaaatggaatgagccaatatttaaatattcaaatgcttaggtacattcaatttgttgacttgcca

SEQ ID NO: 10752 - DNA, 1565 bp, Homo sapiens
gtcaatatcatggtacttatcacattgtagttacgtgtttccatttctgtttctcacattagtctaaaaacttgtgaaagacagggagtgtgtctgattcagctttgtgtctctatttcacagctgaaggacctggcccacagtgtgcccagagaagtttgattgaatggttcattcactttactcagtctggcaatgttgggggagatggccatgaattccattgctttccttccctgctaatcttatttaaaggattcattggctttaaggactttgcctcatccaaggcttcatttgtttcagagaaagcccaaagactgtaacctgcagtcatttgtcatttttttgaggtctcaaatgatcagataaacctgggaagctagtgagtagacgtgagttattttaggcaaggcaaatgagcctagctgacctctcgcatccattttcaacaatgccttggttacctccattcacaactgtgtaactcatgtgtactgggaatcctgtgagattgtaggaggaagtcctggggaaaattaatgctatttgagaatttggagaaactgaaaagccttgaaacacatcctttgcagatgtccaggatctagtggagtcagcactggctgtcttcatttgttcacaatcagcttcttgcttgactccctgcatctggcttcctgtcctccatcccctgaaaaccacatgctctgaggttaatgaaagcctctttggggcttaaataatgggacctctgcagcatttcactcccttgttcatgaagttctcttctcccttggcattcatgacatctgtttcctgattctcttgcttctctggttgtgccttctcaatcttctttgcagactctgcttcctgggcctatctcttaaatattgaggttccttgggacttggtgatagaccctcctttctctctttaccctctcagggtaatgtcatccacgcccatggcttcaggaaccatctctgcaccaacatccacattcatgtctccaggccagacctctctcttaggcttcagcgtatctttccaactgccaactggacctctccacttgaattacatcccataggcacctcagattcatcacattaaacagtgaactctagctgggtgctgtggctcatgcctgcaacccccacgctttggcaggccaaggcaggaggattagttgagcccaggagtttgaggctacagtgagctatgatcataacaccacattccagcctggacaacagagtaagaccctgtctcttaaaaaacaaaaacaaaactgaaaaaaccttaaaagataaacaccaaacttatcaccctctcatccaaactgctcttctttgagagtttccaaagaatcatctgttaattccttcttctcccctaactcttcacatgtaaatacccagccaccaagttcagttgatatccccctgcaaaattgatttatcttggcctgtctttgctattctcctaatcaaggcagtttcttaattttccgtccttgccctttaaactattttccacatagcagaccaaaaaaaaac

SEQ ID NO: 10753 - DNA, 462 bp, Homo sapiens
tattagccataatttatcatgttactcagcaaatccactcctagccatagatacataagggaaatgaaaacatgtccatgcaaagacttctatgcaagtgtttatggcagcattattcataataaccccaaacaggaagtagcccatatggcccccagctgggggaatgggtaagcaaatttgtggtatatccatagtatgaattattactcagcaataaaaaggaataaaatattaaatcacacaatgacaagaatcaatttcaaaaacatgctaaagaaaagaagtcaaacacaaaagatcatatattgtatggttctttttaatgaaattctagaaaatgcaaaataaagcactcaatcatcaaaattcatccaacactacaattttattgtatgtaatttatatctcaataaagttattttaaaaaataagtatttttaaaacccaaaaagatgagaa

SEQ ID NO: 10754 - DNA, 347 bp, Homo sapiens
tttcatagttttgattttgggataccataaatgcgagtttcctaactgtacgcaacagcttgcctactataggtatggtaaggtcccatcagccctccagtggctgggtgggcactctgacagcttgaacttctcctggttgcctctggcttccagcagcctcatcagtttactgttagatgccatacaaatatgattttctctgtgtgttgacatgaaaaaggttgggaaggatagactatttgaaacacccagacttgttttttttgttttgttttcagacggagtctggctctgtcactgaggctggagtgcagtggcgccatctaggctcactgcaacctcca

SEQ ID NO: 10755 - DNA, 321 bp, Homo sapiens
gtctgaggagaatctggttcaacagcttcactttagcatactgcttgtgatagggaagcaatggaggagatgctccaccagttgttggctgcaatttagcaagggccacttggcacaaatttaatggctccatacaccctccagaggcgcctttttgtcccagattctattccaaggttcagtctgaagccctaaaagaaaatcagatctgagggatccagaggcagtcaacagtagaaggctagggcacagcccaggtgagcatgactatcccttctgactcggtcttcccacttcatgggtggagaactcgtgcacatc

SEQ ID NO: 10756 - DNA, 334 bp, Homo sapiens
agcactgtgttatgacttagtgatggcattactccgttggaaaagtcttgttccttttctgactcatgatggcgtcccttaacttgaacgaatctgtgatgccctcgcttcttttcattccctgatgtcggtgccttaatgatgtcacatccgtgtatgcagcatctcccgggatgcaagagtttcatgggttttctaagggcctgtgacgggtgctctttctactgggtcgattgtctcatgagaatgtgacatttgtgtgccccagctttaggagctaaatatactctggaattgtttctaaaatccatcacatttcctcactaagcagaaa

SEQ ID NO: 10757 - DNA, 794 bp, Homo sapiens
cactagtattatcccctaaagacataagcaaaggacaaggtcagagcagtcagttgtattccttgttagtggctttgataagaggctttgggggaagaggttgaaactaacggctataatgaagttttgggttctctaaagatttcatttatcggtgctattggtctccccattaaatgcatgcctgttctgtgtacctttgcacacagtttgcataacatataatatttattactgaaaccttgcaaacttcttaaattgtatagaaaaggctgtgaaacttactcttagagaacataaaaatatagagaatgaaggtcataactccaaatattgagtgatacagtgttttgaaaaaaaaaaaaccagaataaaacaaaattagttactagagtagaaaaaatatagttttaatatgtattgatacatgtctttttgccctcccccaatttagtaaagatgcactaggtgttaataatattcttcttatcatacagtgtattttaatctagcattttagaaaactttttacaagttcatagataaaagccctgtcagaatgtgacttttcattttcagatgttgtgaactggatttctgcatgatttttatggaaatgactatacttttaaaatgtaaaacttttaataaaacaaaacaaatttaaagccctcaaaccttttcttggtggacctcatgtccccctgtgattcttaagtatatgttaactagtttcagatgtgttttgttcgctgactcaaaatcagctctttattttaagaaaagaaattgtg

SEQ ID NO: 10758 - DNA, 448 bp, Homo sapiens
gagacggagtctcgctgtcgcccaggctggagcatggtggcgcaatctcggctcactataacctctgcctcccaggttcaagcaattctctgcttcagtctccggagtagccgagattacaggctcctgccaccacgcctggctaatttttatatttttagtggagatgtggtttcactctcttggcctggctggtcttgaactcctgaccaaagtgctgggattacaggcgtgagccaccgtgcccagctgaccttttttttttttaatggcttatgtgctaagaatgggttttacatgtttaaatgattgtagaaaaaaaaacacagctcaacaaccaaaaaaacaactcggttaaaaaatgggcaagccaggagtttgaagttacagtgagctctgatcacgccaccatgctccagcctgggtgacagagtgaaactctgtctgt

SEQ ID NO: 10759 - DNA, 188 bp, Homo sapiens
tgctttaccagctttctgagtatccctcaatctagtcaagttgacaccaaaaattaaccaacataagtccacactttatcaacttctcagccatacacatcttctaaaactatacaatttctatcttaatttgttcatgctgctataacaaaatacctgagactgggtaatttacaaaaatagaattt

SEQ ID NO: 10760 - DNA, 325 bp, Homo sapiens
gctcgacactaattctgagctggtgacaaattctcttagctttggttcatctgatattacatgatttcccctttcatttctaaaaaataatttcactggataaaggattctgggctgacagttctgttcttttcatttcagcaattcaaaaatattgtgccactttcttctggtcttcataatttctgatgactaatccattgtcactcatattgtttttttacttcaggtagtgtcacacctctctctccctttctctctctctctactttaaggaatttttctttatctataattttaaccactatgtatgtcagtatagatt

SEQ ID NO: 10761 - DNA, 379 bp, Homo sapiens
attgcttgttgtcataaatgggccactttgaccacttatgacctccaggagtgaaaaaaattgtaattactaagaaaggaacaaagactacgataaccttaagtgtttaggtcagaggtaaaagccaaaaatattggatcccattgagccagtagttgagcatagctttagtcaagataatctcggctgttttagtggctgccctactacttgtttgggccttcacctagttgcaactgtggcagctcagaatcataatccattttgtttggacaatattttcctcctaccagaactctccagccatggaaaattttttagagtaagggaagaaataacctcttttggaaattagcttggattacactttctaaaacct

SEQ ID NO: 10762 - DNA, 442 bp, Homo sapiens
tgtactctcatcactggaagggcccaagcataaatcaaacaactattgagagtatttttaaagaagatttatagttcagatagggaactatactacgaggaatctaataatacaaagttcctttaaaacacacttaaaatcctataatctcagctcactgcagtctccacctcccgggctcaagtgattcttctgcctcagcctcctaagtagctgggaccacaggcctgcaccatcacacctagctaattttttgtatttttggtagagacagggtttcgccatgttggccaggctggtctcaaactcctgggctcaagtgaacctcctacgtcagcctccccaataactacaggcatgtgccaccatcccccgctaatttttaaaattttttgtagagacaggggcaacatagcgagacaacttctctccaaaaattaaa

SEQ ID NO: 10763 - DNA, 446 bp, Homo sapiens
gagagacacacatagctggtgaaacacaatttctgggcatatctgtgaaggtgtttctggaagacactgagataaccctgacccagtgtggatgggcactgatatggtttgcctgtgtccccacccagatctcatcttgaattgtagttcctataatccgtacatgtcgtgggagggacccagtgggaggtgactgaatcatggtggttgttactgccattctgttttcatggcagtgagtgagttctcatgatccaatggtttcataaggggctgttcccctttggctcagcacttcttcttgttgctgccatgtgaagaaggacgtctttgtttccccttctgccatgattgtgaggcctctgcagccacgtggaactgtcagcccatttaacctctttgttctttataaattgctcagactcaggtatttcttcacagctgta

SEQ ID NO: 10764 - DNA, 463 bp, Homo sapiens
tttttagtactaacaagtttctaatgcaagtgaattctattagcccaagcagggccatgattggcaaggagagaaactatactgcagaataaatgtaggaggtgacatataaagaaaacactgaggtcaaactcatctcaagagaactgaataggatgtaagcaaagacagaggaagaaaatgatgcaggagattcaactgtgttggaatttaggtcattgagagaaaaaggctcatcccaaaatgaaaaaactgcttggaatgtgccagaaaaaaaaaaaaaatcctctctaagaaacaaataaactaagaggaaccaggaagtgttggcagcaagtaaatatgtaagtagaaatatgaggcaaaaaagagctcaaagacagaaaggagaaaatacaaaaaggagtatgctcttagtgaagagtctgagattctgtattttaaagcgtgcctggtgaattag

SEQ ID NO: 10765 - DNA, 321 bp, Homo sapiens
gtgtaaaactgcaagatagaccagcaagacttctgggttatactaaaataattcccccatataagaagtcatataaagctgggtatagtggctcatgcctgtaatcccagccctttggaaggccaaggcgggaggatcgcttaagcccaggagtttgagacaagcctgggcaacatggtgagaccttgtctctacaaaaagttttttaaaaattagcctagcatggtggtgtgcccttggagtcccacctactctggagggtgaaatgcgaggatcacttgaacttaagaagcagaggtttcagtgagccaagattgcacc

SEQ ID NO: 10766 - DNA, 365 bp, Homo sapiens
accttgtctccctaagaggtgatcatgaatttcctatacagggcaaaaaagggaagaatagcctattcatattctgtattcacagtttgaaggacccatcacaaatgaccttcaaagactgacagggggcaggtagaagggaggcaaaaatgcagagaaaaagatgttaccttgaaaaatgaagtaagaaatcctaatattcccgtagttgatcctaaagtttgttcccatgtctacggttatttctaaataacttcactacactttggaaattccttagtggtggtttatcagtaatacttaactgaatttttccgtttctattctttgctgccaatgaatgtaatctccacgacttgccgttc

SEQ ID NO: 10767 - DNA, 786 bp, Homo sapiens
actgacccacctcgaatgaagcctcctccaacaagtctggaatctgtccaaatttaaattaacaggtacttctatgaattccctcagagaacacactgtggatgctttagagacctcttcccatgcatcctgaattatctgggttgcatatggtggccataagtagtccatgggcttctgatgtaaaaacaaacctgccccttttgaccctgctctgtacagcatcagggcagtgattgctgaccatatcctggaccctctggaaacagagggctctgcatccatgtccatgagccttcatgcccatctggccatcaggccttgggaagcagcaccccacagccttggcacagctgcagagacctccttgcgtcaggatggagtcaaacctggaccccctgccattctcatctgcaggaaacactggcctccttcatcctcaggctgtgttgctggaagtcacccatctccgaggccccttgggatcgactgagtgaccagcagtgaagttcatccaccttctgaatggatgccatcatctgacgtgatggagctcagtgggatgttgttgcggtcttccctcccttagctaggatgtccctgataaaggatgacacccaagcctcagcacaactggccaaacttgaggtggtcatctcagcactgatgctgggccaacaattagccccatttgtacatttttacaaatttttggcaattgccaagaattgtccaccttccctccccattgaattaaagaaacttcttgcctcatggatactcaga

SEQ ID NO: 10768 - DNA, 964 bp, Homo sapiens
aacatgtggaccaggaatatgggacccctgaaaacaatatctgcgttggtgttctctaaatattttcaggcatgtctctttcttctgatattttatttctatttaatgtttaagtattttactataattaggtaactttccatttcctggttattgtaccaattaccgtaacgttattaatatattaaattaacatgatgttttccaaaatgtaaattaaactgagagcagaagtgacaaagccctgacataaaacagtgaagcagtgctcttgtttttaccacacaaaggccaattgttttaatctgctgacccacccatgggtgtaaaataagaaacattcactaaatcaagagccacatgcaaactgccaggagctctgctctgctcagggaagataccacatcctagagagcatttgtaagtagtgatttaaatttatggaaatctgcattcattttatagtgtatctggttttggtagaggccagataggttaagtggataggcatataaaaagactaccatcccctgcaactttcaagtgttttgtcatggtagtgatcaattccattccttggagaatgtgattattatttttcaatcattgttgccagtggaggagaatttcacaggcttccccttggttctgctctaataatgtccctgactctacaggtcaggaagaaagtgagagtcctgccagctgccatgtgtgtccattacacattcaagaagaggcaataacggcaaactgattagatccaccttgggatggacatgagtcaaaactctaggtagcatctgaccttcaaaactccctctgcaggctgggtatgatggctcatgcccgcagtccccgcacttttggaggcggaggtgggaatatctcttgaggcccagagttgcagaccaccttgggctacacagtgacagcctgtctgtacaaaaactaaaaaacagaa

SEQ ID NO: 10769 - DNA, 438 bp, Homo sapiens
agtgaaggaagtgggccagtcacttcaaggagaacaattgacagtatttgttgccgatgacaaaatttgaatttactaatgaaaaattggaattttggaaaatctgagtccaccactatggggctaacagtttccgacacttaaaagactttcctgagatgaaatgagcagtgatattaacaaatatggttttttgatgatataaaatgcaatgtcattttcatttttcaaattactagtttaccatttactcaaagtgtaagataacaaatgtaacagggtatgaaagatgactattataggccaggcctggtgactcacacctgcaatcccagcactttgggaggccgtggcaagcggatcgcttgagcccaggagtttgagaccagcctgagcaacatggtgaaaccctgtctctactaaaaatacaaaaattag

SEQ ID NO: 10770 - DNA, 426 bp, Homo sapiens
ggtgcaacgggtacttttatctgacaacttggccaggccaagttgattttcgtcaagcaaacactggtctagatggcgctgtgtaactaacatgtaagcccgtagacttgaagtagaacagtttatccttcataacgtcagtgggcctcatccgatcagatgaggactataagaggaaaaggctgaactcccttgaggaggaggaaattctgcctccagcctgcatccccagctcttccctgggtctccaggatgctggcctgccctcaagatgttagacttgccagcccccaacatcctatgagccagttccttaaaacaaatctctgcatctccctccatcctgttggttctgtttctctagtgaggcctgactagtaactggggggttctagctctggccttatttcctgagagatggggacg

SEQ ID NO: 10771 - DNA, 442 bp, Homo sapiens
gtaacaactataatttattaagagttttctatatgtcagccactattgaaacatttcatatttattatctcatgaacaaacactcattacagcatagtcacacaactggtaattgatggagctaatatttgccccaaatctgggtggttgcagagctggtattcctcatctctgtttatctcctcctgtgccttctgaatatctcctctagcattgaatctgctggactcatgtttaaactgcatgctcaggtaaactgaaaataacatagttatataataactactgtggttaacaagatctgccacccacttattcaacaaatgaaagtgtgtgaatagtataaatatataaatatacatatatgtgtgtaggtaaggccgttatagcagcactctatgtaataactagtttctactgcatttaagaaaccaagacaaag

SEQ ID NO: 10772 - DNA, 373 bp, Homo sapiens
gtggctatccctgccacccaaacagacccttgactctcaagtgtacggggtcccatttacacagggggagagcttacagcctacgttgagtctatacttaccacttagtgagcatggtatccgctcaggggcctctgtgggcatccatctcctctgcagcatctttcctccccaccgctgggcctgcacatgaccccctccttgggttagacctctgatcagtgatgaccttggtatgctggtgatggtcagtcttggcaccaaatgagacagtttatgtcatcagctattcaataaaacactaatctagttgtcaccgtgaaagtattttgtgacattgttatgtacgtgttgttacaaatgtgcatgatgc

SEQ ID NO: 10773 - DNA, 382 bp, Homo sapiens
atagatctatcatatatatatatatcagatatatatatatatgatatacatatatatcagatatatatatatcagaaagggatctgatcagctagtctgtgtccagccctatggcggggtgatttggggtcacattactgcccactcatgagaatcacattgtgagagtagggtagcaatgccggacaggataacatacaggacagcagaataaaaaatctccctctccctgcagaaaattaactacaggctagggttttgctcaccataaccaaaggcattgggggtcaaacacgttactgtgattgctgaattgaatcctttggtcctgtgcatgggtgcactggctcacactcacccatgtgcacatctgtctgtgtag

SEQ ID NO: 10774 - DNA, 536 bp, Homo sapiens
ggtgtctctgtgtctcttcatataaggacaccagtggtattcaattaagggtctgtcctactccagtatgacctcctattaggttaacttattatttccacaatgaccctgtttccaaataaggtcacattctgtggtactgggcattagatctttaacatattttttaaaggaagagggggacatgattcaaaccataacactgcactagggttcttttgatttctttaacctaaagccttagttttaactggacaggtaagtaccttgcccagtcacagatgtaatacatggtagaaataggtgttgactgtatagccacggttcactcttctccaccaggcctctgccagagaaactagtgcaaatgccagcagcaagtgagggtgggaatcttattagaaatttaagataataatgctgtatatatacacatgcctatgtctatatatgaacttacagattatagaacacttattataaggatttagagattatagagcacttttctacccagagcaaaaaaaaaggagaaa

SEQ ID NO: 10775 - DNA, 353 bp, Homo sapiens
ggtgtctctgtgtctcttcatataaggacaccagtggtattcaattaagggtctgtcctactccagtatgacctcctattaggttaacttattatttccacaatgaccctgtttccaaataaggtcacattctgtggtactgggcattagatctttaacatattttttaaaggaagagggggacatgattcaaaccataacactgcactagggttcttttgatttctttaacctaaagccttagttttaactggacaggtaagtaccttgcccagtcacagatgtaatacatggtagagggaagaatttctcaaagacaactgttctaagactcatattagggatcctctagc

SEQ ID NO: 10776 - DNA, 487 bp, Homo sapiens
tcgtcttcattccaagaactctagaatggcacagcacgtttggttttgaaacctgtggaattttagtgctgtccattctcccaagtgtatgcctttagtgaaggtaaaaggaaagactgttttctgtgtcaagggaagattcatatgcaaatcccaagactcagatgttatttcagaagagttggtgtccatagtaaagtagaactggcccaggcttatctgcctgaaagggcaactgtttgaggtagagggaactggcagaataggaggggtggaatcttcctgggagaaagtaaaaagaattctaggtggagaggagatcaagatgtgaaccaaacacatgtcttctaaattactataggaaatgttggaaaggactttagaacaaacaataaatatgtcataggaggaaaacaaagagaagtctttgggccagaaatagaaactgttaaaaacaaaacaacaacaacaaaacataaaaataaaa

SEQ ID NO: 10777 - DNA, 343 bp, Homo sapiens
ccacagaaagagtgtttcgaaactgctgtttcaaaaggaatcttcaactctgtgagttgaatgcaatcatcacaaagaagtttctgacaatgcttctctctcgtctttctgtgaagataaaggaaaaggctttcaggccttttccaccacaggcctgaaagcgctccaaatgtccacttgcagattctgccaaaagaatatttcaaaactgctctatgaaaagcaatgttaaactctgcggctcgaacacaaacatcacaaagcagtttctgagaatgcttcagtttagtttttctgtggaaatattcccgtttccaaagaaatcttcaaagaggtccacgta

SEQ ID NO: 10778 - DNA, 3103 bp, Homo sapiens
ctgtgacagcaggtttgcaaaaccaatgaaaaaaacagttttccccaggcagggaggaattttttttataattaaatactgaaagttggaattcctatgatcatcaaagtcactctcaggaattagaagcaagtttacatgtcatctttattttttgctttagtcctctttgatacgcaacctacggctctctgagtccttgaaaaagaaccaactctggaacgggattataagtataactttgttggaagggaagaatgtctcaggaggaagcatgacagagatgtttgtccagttaaaactgggagatcagaggtataaaagtaaggatgggcattttggacattgaagtgtggggaaaggacaacaaaaagcatgaggaacgtctgggcacgtgtaaagtggatatctcggcactccctctgaagcaagccaactgcctggagctgccactggacagctgtctgggggctctccttatgttggtcacacttacaccctgtgcgggggtctccgtctctgatctgtgtgtctgccccttagcagacctcagcgaaagaaagcagattacccagcgatattgcttacagaactccctgaaagatgtgaaagacgtcggcattctacaagtgaaggttttaaaggcagcagatctcttagcggcagatttctcagggaagagtgacccattttgcttgttggagttaggcaatgaccgacttcagacgcataccgtctacaaaaacctcaaccctgaatggaacaaagtttttacatttcccattaaagatatccatgatgttttggaagtgacagtgtttgatgaagatggagataaacccccagattttcttggaaaagttgccattcccttgctgtccattagagatggacaaccgaattgttatgtactaaagaataaagatttagaacaagcttttaaaggagttatttacttagagatggaccttatatataatccggtgaaagcaagtattaggacttttactccccgggaaaagcgctttgttgaagacagccgcaagctgtccaaaaagatcttatcaagagatgtggaccgtgtgaaaagaatcactatggcaatatggaatacaatgcagttccttaaaagctgcttccagtgggaatccacattaagaagtacaatagcattcgcggtatttttgatcactgtctggaattttgaactatatatgatccccttggcattgttgctgatctttgtctacaatttcatcagacctgtgaaaggcaaggtcagcagcatccaggacagccaggagagcacagacatagatgacgaggaggatgaagatgacaaggaatctgagaaaaaggggttgattgaaagaatctatatggtacaggatattgtttcaactgttcaaaacgtcttggaggaaatagcttcttttggagaaaggattaagaacacatttaactggacggtccccttcctttcatctctggcctgtttgattctggcagcagccaccatcattttgtatttcattccactgcggtacatcattttaatctggggcataaataaatttactaagaagcttcgaaatccctattccatcgacaataatgagctactagacttcctctctagggtaccgtctgatgttcaaaaggtgcagtatgcagaattgaaactctgcagcagccacagccccctgcggaagaagcgcagcgctctctagggcacacaccgactttggacagcagcacccaatattgtgtttggttgagtagaccaatgttatggctgtttcagtggtacccaaggtgtccttctgaaatgcatgccctgtggcaccctctgtatacttcctcctccttcacgtgcacagacatacacacatgtgcacacaccctcatgcatgggtgtcctagttgcgtagagggtcagcccagcgaaaagcaacaaccccaagactgtgaaagactaacatccattctgaaataggagataacaaggctgccatggatctgaacaccaccttccttgagaacagccaggagcccacttggattcaagagtgactttgaacttgttttcacacctccaacagactctcattaagattcagttatttccgctccccagccccacactcctttcagattatcgttcatgggcgtaagtctcttctcagagttaacaagtctttggtagtcatcctctgtccaaatattgtatattattaaaaggcatttttaataattaccagaattagctcaaacctttagggatctttcagccatgattattaaggatatgtatgtgaatttttgggaaacctctcggtgctggatgccagcctacagcagggtccattgctggcaatggatggcccaggaaggtccctagagatcactcacttgaaaaatgagggtcccatgaaagtatttggttgccttctgatgccacttcttctcactttactttttgcttattttcaaaatattataaaatgtcaacatataatttcagaaaggcaggtgggggtaggggagaaatgaatgaataaattctctaggtatttagaaagataagaaactgaagaccgagagactaataaggctgcttacctaattattataatcatttcatttgcctgaatgttttaagcaggaagtagaaatactttggctgcccaaatgtatcttttgttcctcttagaagtaaaataagctacatacaataaaaatttatttcagaaccccatttctagaaaataccaccccagagtcctcatttgatagcatctgtctcctgcagacctcatcattccacagtatttccctgccatgtaaaaatcctgactttgtgcgtatataaaatgtatgcaattaagtctgtttaaatgatatttaagttttaaagactgtattttgttgacacatactttgtgcagtttttatgtatgtatgtattataaaaaaagttaaggttaaaaacatctcatttaatagtgagttcactatttttttttttttgtctctgggttgtaatttaataatcttcaaacaaaatgtttacgaaaaatgccaaagattctaaatcttaaca

SEQ ID NO: 10779 - DNA, 2154 bp, Homo sapiens
gtcactagccctcaaagtggccattccagttggagatggcatgaacacagagagatgcagcaaaagaacattccaggaagatgtacagtatgctagtaagatcctccgtgtatcgccaagggcgctttctaataacacagtgacagtttgccactggggactcccaagtactcatatttatcacagatgttttagtcattacattgcaaatgaaattaatttccacgagaaatctatataaaagtctggggtccagtatcaatttcagcattttttcctctcaggcaaagtaaatgtgtataattttccgagatgttttccccaagattttagatatttttaaacgaataatcctcagtaagttgctgtatcatatactaagataaacattcccaagaggcttattaagcttacttatggttgaaaactggcacacacaaaacgaacatcatctagcagtgcccagcgaaggtagaaacccacgcatctcattagaaaaatctgcttttaatattttggtttcaagaaatgatgcatgacttctcaaatccttcctgcaattaatccctccatgttcctgtgtttagaaaatgattcattacctttgaaccttccttcctttgccttcggttgtccttggggagccattagcacacactgtggcgagctagggttacctaaccgccagcatcacggctatttgttttcacaggtgcagtatgcagaattgaaactctgcagcagccacagccccctgcggaagaagcgcagcgctctctagggcacacaccgactttggacagcagcacccaatattgtgtttggttgagtagaccaatgttatggctgtttcagtggtacccaaggtgtccttctgaaatgcatgccctgtggcaccctctgtatacttcctcctccttcacgtgcacagacatacacacatgtgcacacaccctcatgcatgggtgtcctagttgcgtagagggtcagcccagcgaaaagcaacaaccccaagactgtgaaagactaacatccattctgaaataggagataacaaggctgccatggatctgaacaccaccttccttgagaacagccaggagcccacttggattcaagagtgactttgaacttgttttcacacctccaacagactctcattaagattcagttatttccgctccccagccccacactcctttcagattatcgttcatgggcgtaagtctcttctcagagttaacaagtctttggtagtcatcctctgtccaaatattgtatattattaaaaggcatttttaataattaccagaattagctcaaacctttagggatctttcagccatgattattaaggatatgtatgtgaatttttgggaaacctctcggtgctggatgccagcctacagcagggtccattgctggcaatggatggcccaggaaggtccctagagatcactcacttgaaaaatgagggtcccatgaaagtatttggttgccttctgatgccacttcttctcactttactttttgcttattttcaaaatattataaaatgtcaacatataatttcagaaaggcaggtgggggtaggggagaaatgaatgaataaattctctaggtatttagaaagataagaaactgaagaccgagagactaataaggctgcttacctaattattataatcatttcatttgcctgaatgttttaagcaggaagtagaaatactttggctgcccaaatgtatcttttgttcctcttagaagtaaaataagctacatacaataaaaatttatttcagaaccccatttctagaaaataccaccccagagtcctcatttgatagcatctgtctcctgcagacctcatcattccacagtatttccctgccatgtaaaaatcctgactttgtgcgtatataaaatgtatgcaattaagtctgtttaaatgatatttaagttttaaagactgtattttgttgacacatactttgtgcagtttttatgtatgtatgtattataaaaaaagttaaggttaaaaacatctcatttaatagtgagttcactatttttttttttttgtctctgggttgtaatttaataatcttcaaacaaaatgtttacgaaaaatgccaaagattctaaatcttaaca

SEQ ID NO: 10780 - DNA, 2980 bp, Homo sapiens
ctgtgacagcaggtttgcaaaaccaatgaaaaaaacagttttccccaggcagggaggaattttttttataattaaatactgaaagttggaattcctatgatcatcaaagtcactctcaggaattagaagcaagtttacatgtcatctttattttttgctttagtcctctttgatacgcaacctacggctctctgagtccttgaaaaagaaccaactctggaacgggattataagtataactttgttggaagggaagaatgtctcaggaggaagcatgacagagatgtttgtccagttaaaactgggagatcagaggtataaaagtaaggatgggcattttggacattgaagtgtggggaaaggacaacaaaaagcatgaggaacgtctgggcacgtgtaaagtggatatctcggcactccctctgaagcaagccaactgcctggagctgccactggacagctgtctgggggctctccttatgttggtcacacttacaccctgtgcgggggtctccgtctctgatctgtgtgtctgccccttagcagacctcagcgaaagaaagcagattacccagcgatattgcttacagaactccctgaaagatgtgaaagacgtcggcattctacaagtgaaggttttaaaggcagcagatctcttagcggcagatttctcagggaagagtgacccattttgcttgttggagttaggcaatgaccgacttcagacgcataccgtctacaaaaacctcaaccctgaatggaacaaagtttttacatttcccattaaagatatccatgatgttttggaagtgacagtgtttgatgaagatggagataaacccccagattttcttggaaaagttgccattcccttgctgtccattagagatggacaaccgaattgttatgtactaaagaataaagatttagaacaagcttttaaaggagttatttacttagagatggaccttatatataatccggtgaaagcaagtattaggacttttactccccgggaaaagcgctttgttgaagacagccgcaagctgtccaaaaagatcttatcaagagatgtggaccgtgtgaaaagaatcactatggcaatatggaatacaatgcagttccttaaaagctgcttccagtgggaatccacattaagaagtacaatagcattcgcggagagcacagacatagatgacgaggaggatgaagatgacaaggaatctgagaaaaaggggttgattgaaagaatctatatggtacaggatattgtttcaactgttcaaaacgtcttggaggaaatagcttcttttggagaaaggattaagaacacatttaactggacggtccccttcctttcatctctggcctgtttgattctggcagcagccaccatcattttgtatttcattccactgcggtacatcattttaatctggggcataaataaatttactaagaagcttcgaaatccctattccatcgacaataatgagctactagacttcctctctagggtaccgtctgatgttcaaaaggtgcagtatgcagaattgaaactctgcagcagccacagccccctgcggaagaagcgcagcgctctctagggcacacaccgactttggacagcagcacccaatattgtgtttggttgagtagaccaatgttatggctgtttcagtggtacccaaggtgtccttctgaaatgcatgccctgtggcaccctctgtatacttcctcctccttcacgtgcacagacatacacacatgtgcacacaccctcatgcatgggtgtcctagttgcgtagagggtcagcccagcgaaaagcaacaaccccaagactgtgaaagactaacatccattctgaaataggagataacaaggctgccatggatctgaacaccaccttccttgagaacagccaggagcccacttggattcaagagtgactttgaacttgttttcacacctccaacagactctcattaagattcagttatttccgctccccagccccacactcctttcagattatcgttcatgggcgtaagtctcttctcagagttaacaagtctttggtagtcatcctctgtccaaatattgtatattattaaaaggcatttttaataattaccagaattagctcaaacctttagggatctttcagccatgattattaaggatatgtatgtgaatttttgggaaacctctcggtgctggatgccagcctacagcagggtccattgctggcaatggatggcccaggaaggtccctagagatcactcacttgaaaaatgagggtcccatgaaagtatttggttgccttctgatgccacttcttctcactttactttttgcttattttcaaaatattataaaatgtcaacatataatttcagaaaggcaggtgggggtaggggagaaatgaatgaataaattctctaggtatttagaaagataagaaactgaagaccgagagactaataaggctgcttacctaattattataatcatttcatttgcctgaatgttttaagcaggaagtagaaatactttggctgcccaaatgtatcttttgttcctcttagaagtaaaataagctacatacaataaaaatttatttcagaaccccatttctagaaaataccaccccagagtcctcatttgatagcatctgtctcctgcagacctcatcattccacagtatttccctgccatgtaaaaatcctgactttgtgcgtatataaaatgtatgcaattaagtctgtttaaatgatatttaagttttaaagactgtattttgttgacacatactttgtgcagtttttatgtatgtatgtattataaaaaaagttaaggttaaaaacatctcatttaatagtgagttcactatttttttttttttgtctctgggttgtaatttaataatcttcaaacaaaatgtttacgaaaaatgccaaagattctaaatcttaaca

SEQ ID NO: 10781 - DNA, 3049 bp, Homo sapiens
ctgtgacagcaggtttgcaaaaccaatgaaaaaaacagttttccccaggcagggaggaattttttttataattaaatactgaaagttggaattcctatgatcatcaaagtcactctcaggaattagaagcaagtttacatgtcatctttattttttgctttagtcctctttgatacgcaacctacggctctctgagtccttgaaaaagaaccaactctggaacgggattataagtataactttgttggaagggaagaatgtctcaggaggaagcatgacagagatgtttgtccagttaaaactgggagatcagaggtataaaagtaaggatgggcattttggacattgaagtgtggggaaaggacaacaaaaagcatgaggaacgtctgggcacgtgtaaagtggatatctcggcactccctctgaagcaagccaactgcctggagctgccactggacagctgtctgggggctctccttatgttggtcacacttacaccctgtgcgggggtctccgtctctgatctgtgtgtctgccccttagcagacctcagcgaaagaaagcagattacccagcgatattgcttacagaactccctgaaagatgtgaaagacgtcggcattctacaagtgaaggttttaaaggcagcagatctcttagcggcagatttctcagggaagagtgacccattttgcttgttggagttaggcaatgaccgacttcagacgcataccgtctacaaaaacctcaaccctgaatggaacaaagtttttacatttcccattaaagatatccatgatgttttggaagtgacagtgtttgatgaagatggagataaacccccagattttcttggaaaagttgccattcccttgctgtccattagagatggacaaccgaattgttatgtactaaagaataaagatttagaacaagcttttaaaggagttatttacttagagatggaccttatatataatccggtgaaagcaagtattaggacttttactccccgggaaaagcgctttgttgaagacagccgcaagctgtccaaaaagatcttatcaagagatgtggaccgtgtgaaaagaatcactatggcaatatggaatacaatgcagttccttaaaagctgcttccagtgggaatccacattaagaagtacaatagcattcgcggtatttttgatcactgtctggaattttgaactatatatgatccccttggcattgttgctgatctttgtctacaatttcatcagacctgtgaaaggcaaggtcagcagcatccaggacagccaggagagcacagacatagatgacgaggaggatgaagatgacaaggaatctgagaaaaaggggttgattgaaagaatctatatggtacaggatattgtttcaactgttcaaaacgtcttggaggaaatagcttcttttggagaaaggattaagaacacatttaactggacggtccccttcctttcatctctggcctgtttgattctggcagcagccaccatcattttgtatttcattccactgcggtacatcattttaatctggggcataaataaatttactaagaagcttcgaaatccctattccatcgacaataatgagctactagacttcctctctagggtaccgtctgatgttcaaaaggtgcagtatgcagaattgaaactctgcagcagccacagccccctgcggaagaagcgcagcgctctctagggcacacaccgactttggacagcagcacccaatattgtgtttggttgagtagaccaatgttatggctgtttcagtggtacccaaggtgtccttctgaaatgcatgccctgtggcaccctctgtatacttcctcctccttcacgtgcacagacatacacacatgtgcacacaccctcatgcatgggtgtcctagttgcgtagagggtcagcccagcgtaacaaggctgccatggatctgaacaccaccttccttgagaacagccaggagcccacttggattcaagagtgactttgaacttgttttcacacctccaacagactctcattaagattcagttatttccgctccccagccccacactcctttcagattatcgttcatgggcgtaagtctcttctcagagttaacaagtctttggtagtcatcctctgtccaaatattgtatattattaaaaggcatttttaataattaccagaattagctcaaacctttagggatctttcagccatgattattaaggatatgtatgtgaatttttgggaaacctctcggtgctggatgccagcctacagcagggtccattgctggcaatggatggcccaggaaggtccctagagatcactcacttgaaaaatgagggtcccatgaaagtatttggttgccttctgatgccacttcttctcactttactttttgcttattttcaaaatattataaaatgtcaacatataatttcagaaaggcaggtgggggtaggggagaaatgaatgaataaattctctaggtatttagaaagataagaaactgaagaccgagagactaataaggctgcttacctaattattataatcatttcatttgcctgaatgttttaagcaggaagtagaaatactttggctgcccaaatgtatcttttgttcctcttagaagtaaaataagctacatacaataaaaatttatttcagaaccccatttctagaaaataccaccccagagtcctcatttgatagcatctgtctcctgcagacctcatcattccacagtatttccctgccatgtaaaaatcctgactttgtgcgtatataaaatgtatgcaattaagtctgtttaaatgatatttaagttttaaagactgtattttgttgacacatactttgtgcagtttttatgtatgtatgtattataaaaaaagttaaggttaaaaacatctcatttaatagtgagttcactatttttttttttttgtctctgggttgtaatttaataatcttcaaacaaaatgtttacgaaaaatgccaaagattctaaatcttaaca

SEQ ID NO: 10782 - DNA, 387 bp, Homo sapiens
tgccactggacagctgtctgggggctctccttatgttggtcacacttacaccctgtgcgggggtctccgtctctgatctgtgtgtctgccccttagcagacctcagcgaaagaaagcagattacccagcgatatgtgagtgtttttccttattgtacactccccctcctcccaccttctcttttaaaacaaagtctttattgaaacaaagtctctgaattgaaaaactacatcaaaagagatctttgtcccaagtttccttgtacgtcataaaacaagacatcagacttaggggttaatgcattagtgaaaaggtgacagtagaattaagagttggttttgctattttgaaaggcaaaaagagattctgaatttttagcgtttagca

SEQ ID NO: 10783 - DNA, 422 bp, Homo sapiens
ttggcctatgacaagctgtctcccaaagacaaccgtgattagaaagccagagcaaaggcaaaatatttccacccaagtacttctttaaaaatgaaatgtcatagaccatatcttcaaatgcatttaagaagtttcccagctatatcttgatattttgctacaatggattattgtcatataacccttaatattgggacagtggtgcctgttgtacttatttgtttcaataaattttgtttcctcattgtttgttacaggaagttcaatttgaatttcttcatcagcattataatcaatcttattgtaattaactcaacaagtatgaaagaattggcagattctgttggaattaggaaaaatgcatctgttttcttccttttatgggctgtgatagtaaaataaatggtgattatatccggaaa

SEQ ID NO: 10784 - DNA, 606 bp, Homo sapiens
ataaatttcccaaaataaattatttggtcttaaattacaaaaacaaacaaaccagaaaatgtgttttggctgggcacggtggctcaaacctgtaatcccagcactttgggaggccaaggtggatggatcacctgaggtcaggagttcaagaccagcctggccaacaaggtgaaaccctgtctctactaaaatacaaaaattagccgggcatgatggcgggtgcctgtaatcccagctactcgggaggctgagatgggagaatcacttgaacccaggagatggtggttgtggtgagccaagatcatgccactgcactccagcctgggtggctgagggagactccgtcaaaaaaaaaaaagaaaagaaaagaaaagaaaaaagaaaatgtgttttcacatagaaaatataagggcaaatgcaaattaaaaataagaggttcaatttactctggtgaaaacaggagaagagatttccctcccctcctttttctcaggacatttaccttagaaaacttgtaagtattttctcttttctttgaaatacatatgtatatataggcttttgaagactaggcaggacttttgccaactggccttttctcagctc

SEQ ID NO: 10785 - DNA, 796 bp, Homo sapiens
ggacaagcagtgcatgagcagcagctcagagaatgaaaaccctcctttcattttcatcaggggctgcatggttatccctctcagtgcaatatagctaaaggggcttgaaatgctgggagtagtcttaaacagcccattcttgaaaggttttcattaactcactctaaacatctaaattaaaaatgtttttgttttcactatagtaaacaggagtgtaacattgcaggtttggtacatttctgaatgcctctccacacactgaagcacaagagccactgaaaaaagctatatgataaatattttaaaaattatttatctgtgttgcattacatgaggccttatctcccagacacttaataaaagagctaatgagaagaagagctaaattctaagattttgatgtttggtcattaaacattacagacaccagtgatcagagaaaaaaacagaagaaataatgagaaagtgacataaaaaattttaaatgcagcaagatatatcagaatcacgatatctggccttttatttatctatcggctcactactactactacgcacacaatttatcacttaaaagaaaaatacataatgttgttagaatttatcagcagtaatgctccaagctctatctttctacaaaaatttcatatcagtaggtttgcttgaggattctagatttggtaagattgcagtttgcacagagaaaaagatatcaatatcaataggaaaatattcttttagaatttctccatggagctgacaacatcttagaatgtatcgtcctagacagagacta

SEQ ID NO: 10786 - DNA, 814 bp, Homo sapiens
actccaggcaacaagcaacatctagggaatgtgcttttaggtagggtcagcataatatcccactctgggagacatttttattttaaagttgtagagggtgatgctgctggcggctccctcccaatcagcaccatttgcagcctcttttgaagacagagaactgagggctgtccttcgagtggagcagtgtgattccaaaaaaagagatgctccttgtggtcctgggaccagggataggactccagttgagcctggtggaagaggtcctcatcctagcccaacggagagccatgcagctgagcttgggcgatgtggtccacgtggttgtttctgagtgtgtcctgaggttcctggatggcttgcagttccctatgcagatccaatgcattttttgcttttttgcttctacaacctggaatttatatgttcaagatggagccatctcagccatgacaacagagaatgtaccactctcacgtgaggaagaggggtaggcagtgctcctgtatcaccagctgttaatgagaccctgaggaaaccacatcatggagatcagcccttctctcctgtaaggaactcatcctatgaaagagcaattggtggctgcaagagctgtctctgggacagctgttcatgtctatatctgcagggtaaccctcatagtcatatgcagtcatatccatagtcatatctggagtcagtctccagtttgactgagtgaatggagaaactaaacatttattactgaataataacattaataaaccatcttaatgatagtaataataaacatattgatgagtattaacaggaa

SEQ ID NO: 10787 - DNA, 797 bp, Homo sapiens
agcggctcccgcggcgggccgggtctccagggaggacctgagtttttcttcacccatggtcagggaggcgccatcgccctggctttggggctggggcctccggggaggttccggtaggggcgttggagaggccgctctttttgcaaggcccgagatggcgggccctgcgcaggccgccctattccgcgccctcagggcgtcagtatccgcctgaggccggatacccactctgggctcggatacccgcgctgggcccggagcatcctcggcgctgccctcccagagccccgcagaggctgaggtggcgcgggggcggccccggctccgcgagaagaggcggcagcgagggctggaggacccgggctacggggctccggggcgtctggcctgggtgggactgagcccatccagggactgggactccggggttctggtgtaggtggatccggggcaggctcaggaccaagaccctctccttccaccaaggagcgcccagaggccggcgggagctccaggttcacctcctcctcctccaggggacgacttgagaaggcatcctgaccctatgcagaaatgcagaaacacttccatgagctaaacaacctatgtgaaggcctgaaagccaaagcaagatcctcttattacaaagctgtccaacaaaaagttttccaagtaacactggaggtccatcactcactcttcctggtctggaaatgccagaaatgtcctccttggtccttctgagagtcaagatcttttcaaagtcacctcaggagccacagaaccactccatccta

SEQ ID NO: 10788 - DNA, 452 bp, Homo sapiens
gcctactactactaaattcgcggccgcgtcgacggccagttatccaggcagtgactttctgtacagctacagtcacctctggacacctgcggagactttaaaaatttccagaaggtcaggaatttttggagacctttcttatggctacgttgcctgcaaaggtgaatcaataagcttctgaactgacttagaaaatgttgcagagactcttgtgaacagatagaccctctcctgccactccagatagacgtatccgggtcacacacacctgatttaacaacatctcattatctcaggtgagcaacagacagcaatttaggacctatcccagtgtggatgagagatattgagttggcttagaaaaatgttagatagactagatggggcaagaaagcccattctggggctcaaaagcctgcacatagagttgctggcacataaagggtatgtat

SEQ ID NO: 10789 - DNA, 347 bp, Homo sapiens
aaaatacaactgcttcctgtggtcattatcttttatcacaggccatttccaatccagaggaagaccttctagaagaagtgatgggtgggagagtgctgacatactatgtgaagctactatttggagttggacacgagtgcatgtgaccttgtgccacagcgggaatgtgagctggatgacaaatggagatttggacttgtgataattggcctctgtgtcattgtgtggaagactgactggtccctttatttcctgtagcttgactaccacacaaattaatccactcaaatgttggcaagtggagcagagtcccaggacaggtaaggcactttccctgctttttctta

SEQ ID NO: 10790 - DNA, 1693 bp, Homo sapiens
agcggctcccgcggcgggccgggtctccagggaggacctgagtttttcttcacccatggtcagggaggcgccatcgccctggctttggggctggggcctccggggaggttccggtaggggcgttggagaggccgctctttttgcaaggcccgagatggcgggccctgcgcaggccgccctattccgcgccctcagggcgtcagtatccgcctgaggccggatacccactctgggctcggatacccgcgctgggcccggagcatcctcggcgctgccctcccagagccccgcagaggctgaggtggcgcgggggcggccccggctccgcgagaagaggcggcagcgagggctggaggacccgggctacggggctccggggcgtctggcctgggtgggactgagcccatccagggactgggactccggggttctggtgtaggtggatccggggcaggctcaggaccaagaccctctccttccaccaaggagcgcccagaggccggcgggagctccaggttcacctcctcctcctccaggaaatcccacttccagctggatgtctggatgaactactgaaagctgctgagtgtcctgcagcaggtgagctgtggccagagcccaaggatgaaggggactccctcactctgtgactgtgaacgaggaagcctgaggtgtagcaggcccaggccccagaagtatggaacaaaatgaggccatttccaatccagaggaagaccttctagaagaagtgatgggtgggagagtgctgacatactatgtgaagctactatttggagttggacacgagtgcatgtgaccttgtgccacagcgggaatcttgactaccacacaaattaatccactcaaatgttggcaagtggagcagagtcccaggacaggtacagaaacacccccagttcaaggatcttcacacctggatttaggcctacacctgcaactaccccagttgtagagggtgatgctgctggcggctccctcccaatcagcaccatttgcagcctcttttgaagacagagaactgagggctgtccttcgagtggagcagtgtgattccaaaaaaagagatgctccttgtggtcctgggaccagggataggactccagttgagcctggtggaagaggtcctcatcctagcccaacggagagccatgcagctgagcttgggcgatgtggtccacgtggttgtttctgagtgtgtcctgaggttcctggatggcttgcagttccctatgcagatccaatgcattttttgcttttttgcttctacaacctggaatttatatgttcaagatggagccatctcagccatgacaacagagaatgtaccactctcacgtgaggaagaggggtaggcagtgctcctgtatcaccagctgttaatgagaccctgaggaaaccacatcatggagatcagcccttctctcctgtaaggaactcatcctatgaaagagcaattggtggctgcaagagctgtctctgggacagctgttcatgtctatatctgcagggtaaccctcatagtcatatgcagtcatatccatagtcatatctggagtcagtctccagtttgactgagtgaatggagaaactaaacatttattactgaataataacattaataaaccatcttaatgatagtaataataaacatattgatgagtattaacaggaa

SEQ ID NO: 10791 - DNA, 1570 bp, Homo sapiens
agcggctcccgcggcgggccgggtctccagggaggacctgagtttttcttcacccatggtcagggaggcgccatcgccctggctttggggctggggcctccggggaggttccggtaggggcgttggagaggccgctctttttgcaaggcccgagatggcgggccctgcgcaggccgccctattccgcgccctcagggcgtcagtatccgcctgaggccggatacccactctgggctcggatacccgcgctgggcccggagcatcctcggcgctgccctcccagagccccgcagaggctgaggtggcgcgggggcggccccggctccgcgagaagaggcggcagcgagggctggaggacccgggctacggggctccggggcgtctggcctgggtgggactgagcccatccagggactgggactccggggttctggtgtaggtggatccggggcaggctcaggaccaagaccctctccttccaccaaggagcgcccagaggccggcgggagctccaggttcacctcctcctcctccaggaaatcccacttccagctggatgtctggatgaactactgaaagctgctgagtgtcctgcagcaggtgagctgtggccagagcccaaggatgaaggggactccctcactctgtgactgtgaacgaggaagcctgaggtgtagcaggcccaggccccagaagtatggaacaaaatgaggccatttccaatccagaggaagaccttctagaagaagtgatgggtgggagagtgctgacatactatgtgaagctactatttggagttggacacgagtgcatgtgaccttgtgccacagcgggaatgtgagctggatgacaaatggagatttggacttgtgataattggcctctgtgtcattgtgtggaagactgactggtccctttatttcctgtagcttgactaccacacaaattaatccactcaaatgttggcaagtggagcagagtcccaggacaggtacagaaacacccccagttcaaggatcttcacacctggatttaggcctacacctgcaactaccccaggccagttatccaggcagtgactttctgtacagctacagtcacctctggacacctgcggagactttaaaaatttccagaaggtcaggaatttttggagacctttcttatggctacgttgcctgcaaaggtgaatcaataagcttctgaactgacttagaaaatgttgcagagactcttgtgaacagatagaccctctcctgccactccagatagacgtatccgggtcacacacacctgatttaacaacatctcattatctcagatgctgtaaaggactgtcagtaggccttcagccaggaggtggtgcttccaaaagactgccagctgtggtggtagtggcaccaatttgatcttctactactttgcagacatctcttctgcaaacaccagacaaactgagacaatgaacttccgcaggacccaaagcacctcttactgcaggaaagaagatccagtgagatagttagtccacaaatggaatgtcaatccataaacacacttaagtaacaga

SEQ ID NO: 10792 - DNA, 1441 bp, Homo sapiens
agcggctcccgcggcgggccgggtctccagggaggacctgagtttttcttcacccatggtcagggaggcgccatcgccctggctttggggctggggcctccggggaggttccggtaggggcgttggagaggccgctctttttgcaaggcccgagatggcgggccctgcgcaggccgccctattccgcgccctcagggcgtcagtatccgcctgaggccggatacccactctgggctcggatacccgcgctgggcccggagcatcctcggcgctgccctcccagagccccgcagaggctgaggtggcgcgggggcggccccggctccgcgagaagaggcggcagcgagggctggaggacccgggctacggggctccggggcgtctggcctgggtgggactgagcccatccagggactgggactccggggttctggtgtaggtggatccggggcaggctcaggaccaagaccctctccttccaccaaggagcgcccagaggccggcgggagctccaggttcacctcctcctcctccaggaaatcccacttccagctggatgtctggatgaactactgaaagctgctgagtgtcctgcagcaggtgagctgtggccagagcccaaggatgaaggggactccctcactctgtgactgtgaacgaggaagcctgaggtgtagcaggcccaggccccagaagtatggaacaaaatgaggccatttccaatccagaggaagaccttctagaagaagtgatgggtgggagagtgctgacatactatgtgaagctactatttggagttggacacgagtgcatgtgaccttgtgccacagcgggaatgtgagctggatgacaaatggagatttggacttgtgataattggcctctgtgtcattgtgtggaagactgactggtccctttatttcctgtagcttgactaccacacaaattaatccactcaaatgttggcaagtggagcagagtcccaggacaggtacagaaacacccccagttcaaggatcttcacacctggatttaggcctacacctgcaactaccccagatggagccatctcagccatgacaacagagaatgtaccactctcacgtgaggaagaggggtaggcagtgctcctgtatcaccagctgttaatgagaccctgaggaaaccacatcatggagatcagcccttctctcctgtaaggaactcatcctatgaaagagcaattggtggctgcaagagctgtctctgggacagctgttcatgtctatatctgcagggtaaccctcatagtcatatgcagtcatatccatagtcatatctggagtcagtctccagtttgactgagtgaatggagaaactaaacatttattactgaataataacattaataaaccatcttaatgatagtaataataaacatattgatgagtattaacaggaa

SEQ ID NO: 10793 - DNA, 1458 bp, Homo sapiens
agcggctcccgcggcgggccgggtctccagggaggacctgagtttttcttcacccatggtcagggaggcgccatcgccctggctttggggctggggcctccggggaggttccggtaggggcgttggagaggccgctctttttgcaaggcccgagatggcgggccctgcgcaggccgccctattccgcgccctcagggcgtcagtatccgcctgaggccggatacccactctgggctcggatacccgcgctgggcccggagcatcctcggcgctgccctcccagagccccgcagaggctgaggtggcgcgggggcggccccggctccgcgagaagaggcggcagcgagggctggaggacccgggctacggggctccggggcgtctggcctgggtgggactgagcccatccagggactgggactccggggttctggtgtaggtggatccggggcaggctcaggaccaagaccctctccttccaccaaggagcgcccagaggccggcgggagctccaggttcacctcctcctcctccaggaaatcccacttccagctggatgtctggatgaactactgaaagctgctgagtgtcctgcagcaggccatttccaatccagaggaagaccttctagaagaagtgatgggtgggagagtgctgacatactatgtgaagctactatttggagttggacacgagtgcatgtgaccttgtgccacagcgggaatgtgagctggatgacaaatggagatttggacttgtgataattggcctctgtgtcattgtgtggaagactgactggtccctttatttcctgtagcttgactaccacacaaattaatccactcaaatgttggcaagtggagcagagtcccaggacaggtacagaaacacccccagttcaaggatcttcacacctggatttaggcctacacctgcaactaccccaggccagttatccaggcagtgactttctgtacagctacagtcacctctggacacctgcggagactttaaaaatttccagaaggtcaggaatttttggagacctttcttatggctacgttgcctgcaaaggtgaatcaataagcttctgaactgacttagaaaatgttgcagagactcttgtgaacagatagaccctctcctgccactccagatagacgtatccgggtcacacacacctgatttaacaacatctcattatctcagatgctgtaaaggactgtcagtaggccttcagccaggaggtggtgcttccaaaagactgccagctgtggtggtagtggcaccaatttgatcttctactactttgcagacatctcttctgcaaacaccagacaaactgagacaatgaacttccgcaggacccaaagcacctcttactgcaggaaagaagatccagtgagatagttagtccacaaatggaatgtcaatccataaacacacttaagtaacaga

SEQ ID NO: 10794 - DNA, 790 bp, Homo sapiens
  misc_feature (1)..(1): n is a, c, g, or t
nagggctccatgaatttggcacgttcacacatgctgcccagcagcagagctcatgacaagcagtaaaccccagtgaaaggacctggctgcccttctgccatctgctctcccatggcctctcttgactggtacatctaggcactggagtaaccttcactggctataggagggcataatcctcagtattctcccacctgcaagaaagacaaaaattacctgaataccatggcttctgggtatccttagtgggcttagcgtatttttcatttgctttaacaggccagttatccaggcagtgactttctgtacagctacagtcacctctggacacctgcggagactttaaaaatttccagaaggtcaggaatttttggagacctttcttatggctacgttgcctgcaaaggtgaatcaataagcttctgaactgacttagaaaatgttgcagagactcttgtgaacagatagaccctctcctgccactccagatagacgtatccgggtcacacacacctgatttaacaacatctcattatctcagatgctgtaaaggactgtcagtaggccttcagccaggaggtggtgcttccaaaagactgccagctgtggtggtagtggcaccaatttgatcttctactactttgcagacatctcttctgcaaacaccagacaaactgagacaatgaacttccgcaggacccaaagcacctcttactgcaggaaagaagatccagtgagatagttagtccacaaatggaatgtcaatccataaacacacttaagtaacaga

SEQ ID NO: 10795 - DNA, 607 bp, Homo sapiens
tacctttcccagtctgcaatctctacaggtacagaaacacccccagttcaaggatcttcacacctggatttaggcctacacctgcaactaccccaggccagttatccaggcagtgactttctgtacagctacagtcacctctggacacctgcggagactttaaaaatttccagaaggtcaggaatttttggagacctttcttatggctacgttgcctgcaaaggtgaatcaataagcttctgaactgacttagaaaatgttgcagagactcttgtgaacagatagaccctctcctgccactccagatagacgtatccgggtcacacacacctgatttaacaacatctcattatctcagatgctgtaaaggactgtcagtaggccttcagccaggaggtggtgcttccaaaagactgccagctgtggtggtagtggcaccaatttgatcttctactactttgcagacatctcttctgcaaacaccagacaaactgagacaatgaacttccgcaggacccaaagcacctcttactgcaggaaagaagatccagtgagatagttagtccacaaatggaatgtcaatccataaacacacttaagtaacaga

SEQ ID NO: 10796 - DNA, 844 bp, Homo sapiens
agggaggcgccatcgccctggctttggggctggggcctccggggaggttccggtaggggcgttggagaggccgctctttttgcaaggcccgagatggcgggccctgcgcaggccgccctattccgcgccctcagggcgtcagtatccgcctgaggccggatacccactctgggctcggatacccgcgctgggcccggagcatcctcggcgctgccctcccagagccccgcagaggctgaggtggcgcgggggcggccccggctccgcgagaagaggcggcagcgagggctggaggacccgggctacggggctccggggcgtctggcctgggtgggactgagcccatccagggactgggactccggggttctggtgtaggtggatccggggcaggctcaggaccaagaccctctccttccaccaaggagcgcccagaggccggcgggagctccaggttcacctcctcctcctccagggtgtttacttttcctttatttctgtgaggccagaaattgtcgccatccttcacatcggtgaatcgggaccctaacactcattacctcaggtttattgttattgccattaacagtgttggtggcattatcactaagatcatcattgttgttattattgtcatttatgattattagcaggtgtgttcattttgtctcactatgcattttttttttttttgggggggattggttttgtatgacgttgaattgagcttctttaatcttgaccagtgctgtcagatttctgaagagcattccggaggacaactcctgtctttcagcacagccacagaatttcgtgggcacaggagagcacttagaatattccc

SEQ ID NO: 10797 - DNA, 638 bp, Homo sapiens
aaatccaacagacgaccaacaatagctggggacatgctcaagacccacagagcaagtgcatgaagccagggcaaggggcagcagtgaggacaaatctctccatgagtactgtgggtcttagcctcaactcactaaaaggcctctagagacaataattaaaataaccagtggctcctcgaggaatggaggctaaggagcaaactgccaaacttattctggctggaattggtggctgttttctatggaacacacaagactcaagaatggccaatgaccactctcactggggggttgcagttggcaactggagggatgctcatatttaactgacttagaattggcttgtgtttagcttggcatgatggtattcccattgtttagtatttcaatttcaacatcaaaataaaggctggataagggtgaatgaggaggtagctgcctcacccaagacaagtcttcatttgaaagggtggctaattacattttccttaatttacaaattgtatttgacccactgtgtatttctttaaagttcgcacagagtttggggtattcattttcagaagagaaacgttatggatctgccttcaccctaaatccctaaatcagccagagttcctgagatgaccagggcaggc

SEQ ID NO: 10798 - DNA, 226 bp, Homo sapiens
aaatccaacagacgaccaacaatagctggggacatgctcaagacccacagagcaagtgcatgaagccagggcaaggggcagcagtgaggacaaatctctccatgagtactgtgggtctggtggaacccctcgctgtgcactggttgcctcacctcattggtattagtggagcttgcattttcccctgctctggaatcaccttcccagctctgatacactcctcata

SEQ ID NO: 10799 - DNA, 428 bp, Homo sapiens
  misc_feature (6)..(6): n is a, c, g, or t
  misc_feature (37)..(37): n is a, c, g, or t
  misc_feature (44)..(44): n is a, c, g, or t
ccccgnttttccaacattaaggcccccacccgtaacnagcggcnagggaaccccaattccggggcccaaaatccacctttaaatttattattttttttccaaccctcagccttttaacctttgcccctgattttccccttcccattttattttcacttccattttaagctggctcaaagccttttaggaacaataagttactgaattatatgaacctatttgaggtaatgatgatgccctgggaaggagcagtattgctggatcagaattcactttttccaagttacagattttaataaaccactgtgcaaagcattaggataaatttttattgaaaattgagtgaatgactgaacaaatcgctgggtaatgctgtttaggttgttctattttccacggattaaattaaattctatgtaaaaaaaaaa

SEQ ID NO: 10800 - DNA, 362 bp, Homo sapiens
gtccctccaagctgtagggacaccccagctgggccaggtttctcccagtagaaaatggtctgggaaccagggcctgggtgtggtggctcacacctgtaatcccagagctttgggaggctgagctggaaggactgcttgaggccaggagctcaagaccagtgtgggcaacacagggagaccctatctctacaaaaaacacaaaaattagccaggcgtggtggcgtactcctgtagtctgggaggctgaggattgcttgatcccatgtatttgagactgcagttagccatgactggaccacagcactccagcctgggtgatagagcaagaccctgtctcttaataaaaaaaaaaaaaaatagag

SEQ ID NO: 10801 - DNA, 236 bp, Homo sapiens
ggtcgacctctaaccagggacagtccctctgttaagaagactcactctctttttcccttccattttctcaaaattagttttgcttatagtagttaagaaattatcaaattactttatcaatttgaaatcaatacatataaaaacagttaattgattcatttgattgttgagttcaatactacatgctaaaatatatgaataaagaaaagttgagttttctaatttggtcagatgga

SEQ ID NO: 10802 - DNA, 336 bp, Homo sapiens
tgggatggccagtttgatgtgtcagcttacctatgtgacagttccagttattcaatcaaacactaatcagtgtgttgatgtgagggtatttcgtagatgtgattaaagtccataatcagttgactttgaggaagggagattgttctagacagtttgggtgggcctgactctatcagctgaaaggccttaggagcagagatgaggcttctctgaggaagaaaaaaactgcacctatggacagctgcttcagcccatgcctgagattccagcttgctctttctgacctgcctagccaggccacataagccaattctttgcaataaatcttatattata

SEQ ID NO: 10803 - DNA, 653 bp, Homo sapiens
agcacttaccaattattaaatcatttaaacagtcaggaaatggatactactgtgttctagaaatgggtaccaactctcaaaatgtttcacatactcatggaaataacatggctttaatggaagggcttagggagttctgcttcaagctggctgatcagaaaaaggagaagcctcagaaaggaagtgggatctgtacatgcacccaggaagcacagctttagtgtcaatggagaagtttcgaatagcaaaattctccactgaacttgctgaaagcacgagaggagaaagaagcatttgcaggcccagatgatacctaagagaggactgtgcattgcttttcaacctccacatgtcagtactcaagggataagctgaattttaaaaatttacttttttttttttttcattgtatattactacctgttcactatagctaattgggaaacttacaaaaattagaaataataagattcctctttccccaaagtcaccactatcctgaattttaaaactagagcttacttttgcaatcttgacactttatttcactaccgtcatatagtatccttctgtgtctcagtcctttttctttttttgacattgttatgaagttcatccatgttgttgcatgggctaaggctcataacaatgtc

SEQ ID NO: 10804 - DNA, 380 bp, Homo sapiens
gaaccaggctggtcttgaactgctgacctcgtgatctgcccatctcagcctcccaaagtgctgggattacaggtgtgagccaccacgtccggccagaattcttaacattctttaaaattaggttgtttgaggctttgccctttaaaagtttattatttcccaaaccaaggacatggagaattataaagtctttgaagaccttagtggaaagtactgtataaccaccattttatttagtagatgttattagcaaatatgtgcatgcagcttctctttaggcagatcctttacagagaaacactacattagccaatcaagtgtcattttgtcacagagtacatttaaatacttacagcgtgaacaggtaatcagatgaaaat

SEQ ID NO: 10805 - DNA, 349 bp, Homo sapiens
caagctccgcctcccgggtttacttacgccattctcctgcctcagcctcccaagtagctgggactacaggcgcccccgccaccacacctggctaatttttttttttttgtatttttagtagagatggggtttcactgtgttagccaggatggtctcgaactcctgacctcgtgatccacccaaatcagcctcccaaagtggtgggattacaggcgtgagccaccgtgcctggccggaagggagactttttgatatgctgagtgtaaggctgaggttttgtaaagggacaggggacatagcctggcctcgtccttgtggttgatctccccgactctcacagccagtggag

SEQ ID NO: 10806 - DNA, 628 bp, Homo sapiens
gcaattcgggacctgattttgcagctggactacccctatactcagggatcccaggattcagcacttttgcaactactagagatcagagaccgtgtaaataaactctccccacctggtcagcgtcgtctagatcttttctcttgcttgcttcgtcatagactcaagctgtctactagtgaggtggtgaggatccaatctgctctgcaggcgtttaatgccaaattgccaaacacaatggattatgacacgaccaaattatgtagttaaccataaatgtcaagcacaacccaaaatcttgaaggagtttttacagtgcttttgtggaacagtttatgtttggaagagtaaatttaaattgtcttttcaatatctgtcttatatcagtcaataacattggatggcaatttacacacatgaacttgctgacaatgaatatattatacagcagttttggtttatgaatgacataaatactgacaccagtctagaagacattctactttttacaataaatttcatttgtaattttatatgttccgtggcaatgcttttgtgcattacatcctctagagggaacataaaaagataccaataaaattttgtagctgaacagttattaaaaagaaat

SEQ ID NO: 10807 - DNA, 460 bp, Homo sapiens
aagccagaagtcataaaggaaaaggttgataaattagaatagataaaaatgtaaaacttttgtataatataagacacaaagaatgaatttaaagacatacaatgaaggttaggaagatgaagatgttttggcgatgagtggtggttacacatcagtattaatgtacttaatgttactgaactgtacacttaaaatgatgaaaatggtaatttttatgttatgtgtatttcatcacataaaaaaagacatgaaatgaatcggggaaaatatttgctacataactaagaatgaaggcccttaataaaatctgtaaaactatacacacttttaggaatgaatcaacaaataatttctatgaattagaaaaaagtgacaatccaactaaaaaatgaataagggatataagcaatgtgtttcacagaaaaaataaaaattgacaatgaagttatgaaaaaatgtt

SEQ ID NO: 10808 - DNA, 729 bp, Homo sapiens
atgcctctttggtttcatcctgggataccatttgatgtgcaattaataacagtgtgtttctatgacctaaagtcaactacattttgaaagtcttcaatttgagttttaaaacatggatgagtataaggtcattacttaatttaatgaaagctgctgtaacaaacaaaccaaaatgtgtacattgactcaaccatctctcacatgaagtctaagtgatggtgctgctccttttgattcagtggcccgtattccttccaccttcttgcgctgctgtcttctccatatggtttccaaggccactttgctcaattttattccttttccctgtagggtaaaaagcagggagaatcacatgcaatagattcctatgggtcagatctggatgtgttgcacatcattgccttttgcattccactggctagaactcagacaacggacaatcatgacaggggaggctgaaaaattgaatataacttggtcttaggacgaggaggaatgggtgggcacctgtactctctttcacaatgatgaccctctaaaataattttgatgattcttcagttggcactgtaaggggtgttttgcttatgttctgtgaaaggaagagttgataatcaggcagtgtttcgaggaactttaattcctacattcaagtacaaaggaataaatatatcatccctacaattcattctatgtactgactgttctctgtacctgactagctttgca

SEQ ID NO: 10809 - DNA, 408 bp, Homo sapiens
gttatttactgaagaaaaatgaaagcatgtgtccatacaaacactattatctggatgcctatagcatctttactggtaaaagctaaacgctaaaaaacaacctaaatgtccatcaacaagatgaacggattaaaaaattgtggtatacccaatcaatggggtaatacttagcaataaaaaggaatgaactattgatacacataacatgcatgaatcttagaacaattatgctgaatgaaagatgccaaaaagagtatatagtaaatgatttcatttatatgaaattctagaactgtgtggtgcaatgtagaaggtaccagtcacgtggctgctgactacttgataggtgggctagtgcaaaagaactttcaaattttacttaatttaaaattaaaaatgaaagcaaaa

SEQ ID NO: 10810 - DNA, 330 bp, Homo sapiens
ttttattctcatagtccctttaagatgtcatatttatttttttttttatatagagatgtggtctcactatgttgaccaggctggtctcaacttcctggcctcaagtgatcctcctatcttggccccccaaaatgctaggattaatagcgtgagccatcatgcccagcctaagatgtcacgcttttatcttgtgaattgttacatgttggctgtgctgtttttattggtcattcgtaagtgggtaatctaacttttcctctcaggctgacttatgaatttctatttgcctttggtgatctctgacttctagatgtatccaatctctagata

SEQ ID NO: 10811 - DNA, 3983 bp, Homo sapiens
atgaaataaactaaccactggtctagacagccggtggttatcgtgccgagggagagaggagtcggagctggacgaggacccagctgctgagccggctgaggctggtgtggggaccaccgtggcacctctgccgccagctccagcacccagcagtcagcccgtgccggctgggatgactgttcctcctcctccagctgcagccccaccactgcccagggccctggctaagcccgccgtcttcatccccgtgaaccgctccccggaaatgcaggaggaacggctgaagctcccaattctctccgaagaacaagtaatcatggaggctgtggccgagcaccccatcgtcatcgtgtgtggtgagaccggcagcgggaagaccacacaggtgcctcagtttctctatgaagcaggcttcagcagtgaagacagcatcatcggtgtcacggagccccgccgagtggccgccgtggccatgtcccagcgagtggccaaggagatgaatctgtcccagcgggtcgtctcctaccagatccggtatgaaggaaacgtgacagaggagaccagaatcaagttcatgacggatggtgtgctgcttaaagaaatccagaaggacttcctgctgctgcggtacaaggtggtgatcatcgacgaggcccacgagaggagcgtgtacacggacatcctcatcggcctcctgtcccgcattgtgactctccgggctaagaggaacctgccactcaagctgctcatcatgtcggccacgctgcgggtggaggacttcacccagaacccacggctcttcgccaagccgccgccggtcatcaaggtggaatccaggcagttcccagtgactgtgcatttcaacaagcggacaccgctggaagactacagtggcgagtgcttccggaaggtctgcaagatccaccggatgctgcccgcaggtggcatcctggtgttcctgacggggcaggctgaggtgcatgcgctgtgccgcaggctcaggaaggctttcccaccctccagagcccggccacaagaaaaggacgacgatcagaaagactcggtggaggaaatgcggaagtttaagaagtcaagggccagggccaagaaggcgcgggctgaggtgctgccccagatcaacttggatcattactcggtgttaccggcaggcgaaggcgatgaggacagggaggcagaagtggatgaggaagagggggccctggactccgacctcgatctggacctgggggatggcgggcaagatggaggtgagcagccggatgcctccctcccgctccacgtgctcccgctgtactctctgctggccccagagaagcaagcacaggtctttaagcctccaccggaggggactcggttgtgtgttgtggccaccaatgtggccgagacgtcgcttaccatccctggcatcaagtacgtggtggactgtgggaaggtcaagaaacgctactacgaccgcgtcactggcgtatcctccttccgtgtcacctgggtctcccaggcatcagctgaccagcgagcgggcagagcaggacggacggagcccggccactgctacaggctgtattcatctgcggtttttggtgacttcgagcagtttcctcctccagaaatcacccggaggcctgttgaagacttaatccttcaaatgaaggcgctcaacgttgaaaaggtcatcaacttccccttcccgacgcccccctccgtggaagcccttcttgccgccgaggagctgttgatcgcactgggtgccctgcaaccgccccagaaagcagaaagggtgaagcaactgcaggagaaccggctgagctgccccatcactgcgctgggccggacaatggccacattccccgtggcaccccgctacgctaagatgctggcactgagccgacaacacggctgcctgccctatgccatcaccatcgtggccagcatgacggtgcgggagctgtttgaggagctggacagaccagcggccagtgacgaggagctcaccaggctgaagagcaagcgggcccgggtggcccagatgaagaggacctgggcagggcagggggcttctctgaagctcggcgacctcatggtgctgctgggcgccgtgggagcctgtgagtatgccagctgcacaccccagttttgcgaagccaacgggctgcggtacaaagccatgatggagatccggcgcctgcggggccagctgaccaccgcagtcaatgccgtgtgccccgaggctgagctcttcgtggatcccaagatgcagccgcccaccgagagccaggtgacctacctgcgacagatcgtgacggcaggcctgggggaccacttggcccgcagggtccagagcgaggagatgctggaggacaagtggaggaacgcctacaagacccctctcctcgacgaccctgtcttcatccaccccagctccgtccttttcaaagagctccccgagtttgtggtctaccaggaaatcgtggagaccactaagatgtacatgaaaggcgtctctagcgtggaggtccagtggatcccggccctgctgccctcttactgccagtttgacaagcccctggaggaaccagcccctacatactgccccgagcgggggcgggtgctgtgtcaccgggccagcgtgttctatcgcgtgggctggccgctccccgccatcgaggtggattttccagaggggattgaccgctacaagcactttgcccggttcctgctggaagggcaggtcttccgcaagctggcctcataccggagctgtctgctgtccagccccggcaccatgctgaagacgtgggccaggctgcagccccgtacggagagccttctgcgagccctggttgcagagaaggctgactgccatgaagccttgctggctgcttggaagaaaaaccccaaatacctgctggctgagtactgtgagtggcttccacaggccatgcaccccgatatcgagaaagcctggccccccaccactgtccactgaccagaaacctggctgcagggccgaggactggtttggggactggagggctggcagcagcctgtcaccgtgcgaccgtgaccacctggcatgggcttcgtggcctgctctcaggaagtgggtcaagccctgggaaccctcatccatgagagctcgatcccgtatgaagggtgctgccgcccgtgccatctggcccgggggtgactttttgaactgtttattatatggtggatgatgatttcatctcacgtgctggacgctgttctgttcagtgtgctctttggactacattagtcccctgtggagcagcagggctggagatctctgcagtcccttccccgcccgccctgccagaaggccgaggaggcacgtggagggcctccttcctgcaattcttccctctccagagtcagggagggctgcccagccctggcctcacagccgtcccagatgttaggtgagccactgagctctgtgttgaccttgaggggcctggctgggggcccccaggctccatgccttcttgggagggtggccgccaacgcctttcctgtgttatggcaacagggagtgggcatctcatctgcctgtggtcagctctcagacggcagggagcggagctgacgttggctgtgcttggtcaccgctgccatgccgcagaggatgcgcctagctgggctggggccacacgactattatgttggccttgaacggggactgcagagccctcagtttgtctcccttgttcctctgtggctgaggtgggagggggagggtggggtaggtcccccagcaagaaagagggacaggagcaccccaggcaggaccaaggagtcgggaggcccctgccttctgtcctccatggtgagggcacagatgtctccccagagcccagcgctggcagaatggattctgctcctggctttgcttctgcggcttcggtggagacagttatggaataaaatgttccttgcaccca

SEQ ID NO: 10812 - DNA, 3382 bp, Homo sapiens
tagccccccttccacgagcctctgtcggtgaccgggtcctctcatggagaggcccacgagaggagcgtgtacacggacatcctcatcggcctcctgtcccgcattgtgactctccgggctaagaggaacctgccactcaagctgctcatcatgtcggccacgctgcgggtggaggacttcacccagaacccacggctcttcgccaagccgccgccggtcatcaaggtggaatccaggcagttcccagtgactgtgcatttcaacaagcggacaccgctggaagactacagtggcgagtgcttccggaaggtctgcaagatccaccggatgctgcccgcaggtggcatcctggtgttcctgacggggcaggctgaggtgcatgcgctgtgccgcaggctcaggaaggctttcccaccctccagagcccggccacaagaaaaggacgacgatcagaaagactcggtggaggaaatgcggaagtttaagaagtcaagggccagggccaagaaggcgcgggctgaggtgctgccccagatcaacttggatcattactcggtgttaccggcaggcgaaggcgatgaggacagggaggcagaagtggatgaggaagagggggccctggactccgacctcgatctggacctgggggatggcgggcaagatggaggtgagcagccggatgcctccctcccgctccacgtgctcccgctgtactctctgctggccccagagaagcaagcacaggtctttaagcctccaccggaggggactcggttgtgtgttgtggccaccaatgtggccgagacgtcgcttaccatccctggcatcaagtacgtggtggactgtgggaaggtcaagaaacgctactacgaccgcgtcactggcgtatcctccttccgtgtcacctgggtctcccaggcatcagctgaccagcgagcgggcagagcaggacggacggagcccggccactgctacaggctgtattcatctgcggtttttggtgacttcgagcagtttcctcctccagaaatcacccggaggcctgttgaagacttaatccttcaaatgaaggcgctcaacgttgaaaaggtcatcaacttccccttcccgacgcccccctccgtggaagcccttcttgccgccgaggagctgttgatcgcactgggtgccctgcaaccgccccagaaagcagaaagggtgaagcaactgcaggagaaccggctgagctgccccatcactgcgctgggccggacaatggccacattccccgtggcaccccgctacgctaagatgctggcactgagccgacaacacggctgcctgccctatgccatcaccatcgtggccagcatgacggtgcgggagctgtttgaggagctggacagaccagcggccagtgacgaggagctcaccaggctgaagagcaagcgggcccgggtggcccagatgaagaggacctgggcagggcagggggcttctctgaagctcggcgacctcatggtgctgctgggcgccgtgggagcctgtgagtatgccagctgcacaccccagttttgcgaagccaacgggctgcggtacaaagccatgatggagatccggcgcctgcggggccagctgaccaccgcagtcaatgccgtgtgccccgaggctgagctcttcgtggatcccaagatgcagccgcccaccgagagccaggtgacctacctgcgacagatcgtgacggcaggcctgggggaccacttggcccgcagggtccagagcgaggagatgctggaggacaagtggaggaacgcctacaagacccctctcctcgacgaccctgtcttcatccaccccagctccgtccttttcaaagagctccccgagtttgtggtctaccaggaaatcgtggagaccactaagatgtacatgaaaggcgtctctagcgtggaggtccagtggatcccggccctgctgccctcttactgccagtttgacaagcccctggaggaaccagcccctacatactgccccgagcgggggcgggtgctgtgtcaccgggccagcgtgttctatcgcgtgggctggccgctccccgccatcgaggtggattttccagaggggattgaccgctacaagcactttgcccggttcctgctggaagggcaggtcttccgcaagctggcctcataccggagctgtctgctgtccagccccggcaccatgctgaagacgtgggccaggctgcagccccgtacggagagccttctgcgagccctggttgcagagaaggctgactgccatgaagccttgctggctgcttggaagaaaaaccccaaatacctgctggctgagtactgtgagtggcttccacaggccatgcaccccgatatcgagaaagcctggccccccaccactgtccactgaccagaaacctggctgcagggccgaggactggtttggggactggagggctggcagcagcctgtcaccgtgcgaccgtgaccacctggcatgggcttcgtggcctgctctcaggaagtgggtcaagccctgggaaccctcatccatgagagctcgatcccgtatgaagggtgctgccgcccgtgccatctggcccgggggtgactttttgaactgtttattatatggtggatgatgatttcatctcacgtgctggacgctgttctgttcagtgtgctctttggactacattagtcccctgtggagcagcagggctggagatctctgcagtcccttccccgcccgccctgccagaaggccgaggaggcacgtggagggcctccttcctgcaattcttccctctccagagtcagggagggctgcccagccctggcctcacagccgtcccagatgttaggtgagccactgagctctgtgttgaccttgaggggcctggctgggggcccccaggctccatgccttcttgggagggtggccgccaacgcctttcctgtgttatggcaacagggagtgggcatctcatctgcctgtggtcagctctcagacggcagggagcggagctgacgttggctgtgcttggtcaccgctgccatgccgcagaggatgcgcctagctgggctggggccacacgactattatgttggccttgaacggggactgcagagccctcagtttgtctcccttgttcctctgtggctgaggtgggagggggagggtggggtaggtcccccagcaagaaagagggacaggagcaccccaggcaggaccaaggagtcgggaggcccctgccttctgtcctccatggtgagggcacagatgtctccccagagcccagcgctggcagaatggattctgctcctggctttgcttctgcggcttcggtggagacagttatggaataaaatgttccttgcaccca

SEQ ID NO: 10813 - DNA, 4445 bp, Homo sapiens
atgaaataaactaaccactggtctagacagccggtggttatcgtgccgagggagagaggagtcggagctggacgaggacccagctgctgagccggctgaggctggtgtggggaccaccgtggcacctctgccgccagctccagcacccagcagtcagcccgtgccggctgggatgactgttcctcctcctccagctgcagccccaccactgcccagggccctggctaagcccgccgtcttcatccccgtgaaccgctccccggaaatgcaggaggaacggctgaagctcccaattctctccgaagaacaagtaatcatggaggctgtggccgagcaccccatcgtcatcgtgtgtggtgagaccggcagcgggaagaccacacaggtgcctcagtttctctatgaagcaggcttcagcagtgaagacagcatcatcggtgtcacggagccccgccgagtggccgccgtggccatgtcccagcgagtggccaaggagatgaatctgtcccagcgggtcgtctcctaccagatccggtatgaaggaaacgtgacagaggagaccagaatcaagttcatgacggatggtgtgctgcttaaagaaatccagaaggacttcctgctgctgcggtacaaggtggtgatcatcgacgaggcccacgagaggagcgtgtacacggacatcctcatcggcctcctgtcccgcattgtgactctccgggctaagaggaacctgccactcaagctgctcatcatgtcggccacgctgcgggtggaggacttcacccagaacccacggctcttcgccaagccgccgccggtcatcaaggtggaatccaggcagttcccagtgactgtgcatttcaacaagcggacaccgctggaagactacagtggcgagtgcttccggaaggtctgcaagatccaccggatgctgcccgcaggtggcatcctggtgttcctgacggggcaggctgaggtgcatgcgctgtgccgcaggctcaggaaggctttcccaccctccagagcccggccacaagaaaaggacgacgatcagaaagactcggtggaggaaatgcggaagtttaagaagtcaagggccagggccaagaaggcgcgggctgaggtgctgccccagatcaacttggatcattactcggtgttaccggcaggcgaaggcgatgaggacagggaggcagaagtggatgaggaagagggggccctggactccgacctcgatctggacctgggggatggcgggcaagatggaggtgagcagccggatgcctccctcccgctccacgtgctcccgctgtactctctgctggccccagagaagcaagcacaggtctttaagcctccaccggaggggactcggttgtgtgttgtggccaccaatgtggccgagacgtcgcttaccatccctggcatcaagtacgtggtggactgtgggaaggtcaagaaacgctactacgaccgcgtcactggcgtatcctccttccgtgtcacctgggtctcccaggcatcagctgaccagcgagcgggcagagcaggacggacggagcccggccactgctacaggctgtattcatctgcggtttttggtgacttcgagcagtttcctcctccagaaatcacccggaggcctgttgaagacttaatccttcaaatgaaggcgctcaacgttgaaaaggtcatcaacttccccttcccgacgcccccctccgtggaagcccttcttgccgccgaggagctgttgatcgcactgggtgccctgcaaccgccccagaaagcagaaagggtgaagcaactgcaggagaaccggctgagctgccccatcactgcgctgggccggacaatggccacattccccgtggcaccccgctacgctaagatgctggcactgagccgacaacacggctgcctgccctatgccatcaccatcgtggccagcatgacggtgcgggagctgtttgaggagctggacagaccagcggccagtgacgaggagctcaccaggctgaagagcaagcgggcccgggtggcccagatgaagaggacctgggcagggcagggggcttctctgaagctcggcgacctcatggtgctgctgggcgccgtgggagcctgtgagtatgccagctgcacaccccagttttgcgaagccaacgggctgcggtacaaagccatgatggagatccggcgcctgcggggccagctgaccaccgcagtcaatgccgtgtgccccgaggctgagctcttcgtggatcccaagatgcagccgcccaccgagagccaggtgacctacctgcgacagatcgtgacggcaggcctgggggaccacttggcccgcagggtccagagcgaggagatgctggaggacaagtggaggaacgcctacaagacccctctcctcgacgaccctgtcttcatccaccccagctccgtccttttcaaagagctccccgagtttgtggtctaccaggaaatcgtggagaccactaagatgtacatgaaaggcgtctctagcgtggaggtccagtggatcccggccctgctgccctcttactgccagtttgacaagcccctggaggaaccagcccctacatactgccccgagcgggggcgggtgctgtgtcaccgggccagcgtgttctatcgcgtgggctggccgctccccgccatcgaggtggattttccagaggggattgaccgctacaagcactttgcccggttcctgctggaagggcaggtcttccgcaagctggcctcataccggagctgtctgctgtccagccccggcaccatgctgaagacgtgggccaggctgcagccccgtacggagagccttctgcgagccctggttgcagagaaggctgactgccatgaagccttgctggctgcttggaagaaaaaccccaaatacctgctggctgagtactgtgagtggcttccacaggccatgcaccccgatatcgagaaagcctggccccccaccactgtccactgaccagaaacctggctgcagggccgaggactggtttggggactggagggctggcagcagcctgtcaccgtgcgaccgtgaccacctggcatgggcttcgtggcctgctctcaggaagtgggtcaagccctgggaaccctcatccatgagagctcgatcccgtatgaagggtgctgccgcccgtgccatctggcccgggggtgactttttgaactgtttattatatggtggatgatgatttcatctcacgtgctggacgctgttctgttcagtgtgctctttggactacattagtcccctgtggagcagcagggctggagatctctgcagtcccttccccgcccgccctgccagaaggccgaggaggcacgtggagggcctccttcctgcaattcttccctctccagagtcagggagggctgcccagccctggcctcacagccgtcccagatgttaggtgagccactgagctctgtgttgaccttgaggggcctggctgggggcccccaggctccatgccttcttgggagggtggccgccaacgcctttcctgtgttatggcaacagggagtgggcatctcatctgcctgtggtcagctctcagacggcagggagcggagctgacgttggctgtgcttggtcaccgctgccatgccgcagaggatgcgcctagctgggctggggccacacgactattatgttggccttgaacggggactgcagagccctcagtttgtctcccttgttcctctgtggctgaggtgggagggggagggtggggtaggtcccccagcaagaaagagggacaggagcaccccaggcaggaccaaggagtcgggaggcccctgccttctgtcctccatggtgagggcacagatgtctccccagagcccagcgctggcagaatggattctgctcctggctttgcttctgcggcttcggtggagacagttatggaataaaatgttccttgcacccaaaaaaaaaaaaaaaaaaaaaaaaaaaaaaaaaagggggggggggtaaaaaaataatctcccggggggggcccaatttatgggtaccacgtttttttgaaaaggggggccccaataagggggggggaattaaaaaaaagggagggggggcgggttttaacaaacgacggtgtggagcgtgtggaaaacacccgcgccaacgctggggcacctctggtcgaagaggcaaacccttaaaccgtcggggcgcggcgggcacaactactgcggggcacaactatcccctaacaagaagaattataaacgagccaaggggacaactataaaaacactttgcgacgggcgtgctacaacgggcgttcacacacaagcgcggcaaataatatgcttggcccgcatgaagaaaattattggcctacacaggaagtacatactctcgctagcaacacttttttttcgacgac

SEQ ID NO: 10814 - DNA, 3996 bp, Homo sapiens
  misc_feature (3778)..(3778): n is a, c, g, or t
  misc_feature (3780)..(3781): n is a, c, g, or t
  misc_feature (3787)..(3787): n is a, c, g, or t
atgaaataaactaaccactggtctagacagccggtggttatcgtgccgagggagagaggagtcggagctggacgaggacccagctgctgagccggctgaggctggtgtggggaccaccgtggcacctctgccgccagctccagcacccagcagtcagcccgtgccggctgggatgactgttcctcctcctccagctgcagccccaccactgcccagggccctggctaagcccgccgtcttcatccccgtgaaccgctccccggaaatgcaggaggaacggctgaagctcccaattctctccgaagaacaagtaatcatggaggctgtggccgagcaccccatcgtcatcgtgtgtggtgagaccggcagcgggaagaccacacaggtgcctcagtttctctatgaagcaggcttcagcagtgaagacagcatcatcggtgtcacggagccccgccgagtggccgccgtggccatgtcccagcgagtggccaaggagatgaatctgtcccagcgggtcgtctcctaccagatccggtatgaaggaaacgtgacagaggagaccagaatcaagttcatgacggatggtgtgctgcttaaagaaatccagaaggacttcctgctgctgcggtacaaggtggtgatcatcgacgaggcccacgagaggagcgtgtacacggacatcctcatcggcctcctgtcccgcattgtgactctccgggctaagaggaacctgccactcaagctgctcatcatgtcggccacgctgcgggtggaggacttcacccagaacccacggctcttcgccaagccgccgccggtcatcaaggtggaatccaggcagttcccagtgactgtgcatttcaacaagcggacaccgctggaagactacagtggcgagtgcttccggaaggtctgcaagatccaccggatgctgcccgcaggtggcatcctggtgttcctgacggggcaggctgaggtgcatgcgctgtgccgcaggctcaggaaggctttcccaccctccagagcccggccacaagaaaaggacgacgatcagaaagactcggtggaggaaatgcggaagtttaagaagtcaagggccagggccaagaaggcgcgggctgaggtgctgccccagatcaacttggatcattactcggtgttaccggcaggcgaaggcgatgaggacagggaggcagaagtggatgaggaagagggggccctggactccgacctcgatctggacctgggggatggcgggcaagatggaggtgagcagccggatgcctccctcccgctccacgtgctcccgctgtactctctgctggccccagagaagcaagcacaggtctttaagcctccaccggaggggactcggttgtgtgttgtggccaccaatgtggccgagacgtcgcttaccatccctggcatcaagtacgtggtggactgtgggaaggtcaagaaacgctactacgaccgcgtcactggcgtatcctccttccgtgtcacctgggtctcccaggcatcagctgaccagcgagcgggcagagcaggacggacggagcccggccactgctacaggctgtattcatctgcggtttttggtgacttcgagcagtttcctcctccagaaatcacccggaggcctgttgaagacttaatccttcaaatgaaggcgctcaacgttgaaaaggtcatcaacttccccttcccgacgcccccctccgtggaagcccttcttgccgccgaggagctgttgatcgcactgggtgccctgcaaccgccccagaaagcagaaagggtgaagcaactgcaggagaaccggctgagctgccccatcactgcgctgggccggacaatggccacattccccgtggcaccccgctacgctaagatgctggcactgagccgacaacacggctgcctgccctatgccatcaccatcgtggccagcatgacggtgcgggagctgtttgaggagctggacagaccagcggccagtgacgaggagctcaccaggctgaagagcaagcgggcccgggtggcccagatgaagaggacctgggcagggcagggggcttctctgaagctcggcgacctcatggtgctgctgggcgccgtgggagcctgtgagtatgccagctgcacaccccagttttgcgaagccaacgggctgcggtacaaagccatgatggagatccggcgcctgcggggccagctgaccaccgcagtcaatgccgtgtgccccgaggctgagctcttcgtggatcccaagatgcagccgcccaccgagagccaggtgacctacctgcgacagatcgtgacggcaggcctgggggaccacttggcccgcagggtccagagcgaggagatgctggaggacaagtggaggaacgcctacaagacccctctcctcgacgaccctgtcttcatccaccccagctccgtccttttcaaagagctccccgagtttgtggtctaccaggaaatcgtggagaccactaagatgtacatgaaaggcgtctctagcgtggaggtccagtggatcccggccctgctgccctcttactgccagtttgacaagcccctggaggaaccagcccctacatactgccccgagcgggggcgggtgctgtgtcaccgggccagcgtgttctatcgcgtgggctggccgctccccgccatcgaggtggattttccagaggggattgaccgctacaagcactttgcccggttcctgctggaagggcaggtcttccgcaagctggcctcataccggagctgtctgctgtccagccccggcaccatgctgaagacgtgggccaggctgcagccccgtacggagagccttctgcgagccctggttgcagagaaggctgactgccatgaagccttgctggctgcttggaagaaaaaccccaaatacctgctggctgagtactgtgagtggcttccacaggccatgcaccccgatatcgagaaagcctggccccccaccactgtccactgaccagaaacctggctgcagggccgaggactggtttggggactggagggctggcagcagcctgtcaccgtgcgaccgtgaccacctggcatgggcttcgtggcctgctctcaggaagtgggtcaagccctgggaaccctcatccatgagagctcgatcccgtatgaagggtgctgccgcccgtgccatctggcccgggggtgactttttgaactgtttattatatggtggatgatgatttcatctcacgtgctggacgctgttctgttcagtgtgctctttggactacattagtcccctgtggagcagcagggctggagatctctgcagtcccttccccgcccgccctgccagaaggccgaggaggcacgtggagggcctccttcctgcaattcttccctctccagagtcagggagggctgcccagccctggcctcacagccgtcccagatgttaggtgagccactgagctctgtgttgaccttgaggggcctggctgggggcccccaggctccatgccttcttgggagggtggccgccaacgcctttcctgtgttatggcaacagggagtgggcatctcatctgcctgtggtcagctctcagacggcagggagcggagctgacgttggctgtgcttggtcaccgctgccatgccgcagaggatgcgcctagctgggctggggccacacgactattatgttggccttgaacggggactgcagagccctcagtttgtctcccttgttcctctgtggctgaggtgggaggtcccntnngaccangggaccgctcaaacaaaaacagccaagcttttgtgccaaacagattactgatatgactgttaaagcaaaaagctctgttcctgtctcagatgatgcctatccagaaatagaaaaattctttccctttaatcctttagactttgatagctttgacctgcctgaatagcacccgattgcgcaccttcccttgagtggagtgcctctaatga

SEQ ID NO: 10815 - DNA, 2975 bp, Homo sapiens
  misc_feature (4)..(4): n is a, c, g, or t
  misc_feature (68)..(68): n is a, c, g, or t
  misc_feature (128)..(128): n is a, c, g, or t
gganttgctctgctggtccggccgctggaggcccaccctggcctagtcgccatggggaagctgcgccngcctacaacatcaaggggcgccacaggcggccccggaccctcgaaggcccccccgagccnccccccgtgcagctggaactggaggacaaggacacgttgaagggagttgatgcaagcaacgcgctcgttctaccggggaagaagaaaaagaagaccaaagcccctcccctgtcgaagaaggagaagaagcctctgaccaagaaggagaagaaagtgctgcagaaaatcttagaacagaaggagaaaaagagccagcgagcagagatgctacagaagctgagtgaagtccaggcttccgaagctgagatgagactcttttataccacttccaagctaggcactgggaaccgcatgtatcacaccaaagagaaggctgacgaggtggtagccccgggccaggagaagatcagtagcctcagcggtgcccaccggaagcgtcgccgctggccctcagctgaggaggaggaggaggaggaggaggagtcggaatcggagctggaggaggagtcggagctggacgaggacccagctgctgagccggctgaggctggtgtggggaccaccgtggcacctctgccgccagctccagcacccagcagtcagcccgtgccggctgggatgactgttcctcctcctccagctgcagccccaccactgcccagggccctggctaagcccgccgtcttcatccccgtgaaccgctccccggaaatgcaggaggaacggctgaagctcccaattctctccgaagaacaagtaatcatggaggctgtggccgagcaccccatcgtcatcgtgtgtggtgagaccggcagcgggaagaccacacaggtgcctcagtttctctatgaagcaggcttcagcagtgaagacagcatcatcggtgtcacggagccccgccgagtggccgccgtggccatgtcccagcgagtggccaaggagatgaatctgtcccagcgggtcgtctcctaccagatccggtatgaaggaaacgtgacagaggagaccagaatcaagttcatgacggatggtgtgctgcttaaagaaatccagaaggacttcctgctgctgcggtacaaggtggtgatcatcgacgaggcccacgagaggagcgtgtacacggacatcctcatcggcctcctgtcccgcattgtgactctccgggctaagaggaacctgccactcaagctgctcatcatgtcggccacgctgcgggtggaggacttcacccagaacccacggctcttcgccaagccgccgccggtcatcaaggtggaatccaggcagttcccagtgactgtgcatttcaacaagcggacaccgctggaagactacagtggcgagtgcttccggaaggtctgcaagatccaccggatgctgcccgcaggtggcatcctggtgttcctgacggggcaggctgaggtgcatgcgctgtgccgcaggctcaggaaggctttcccaccctccagagcccggccacaagaaaaggacgacgatcagaaagactcggtggaggaaatgcggaagtttaagaagtcaagggccagggccaagaaggcgcgggctgaggtgctgccccagatcaacttggatcattactcggtgttaccggcaggcgaaggcgatgaggacagggaggcagaagtggatgaggaagagggggccctggactccgacctcgatctggacctgggggatggcgggcaagatggaggtgagcagccggatgcctccctcccgctccacgtgctcccgctgtactctctgctggccccagagaagcaagcacaggtctttaagcctccaccggaggggactcggttgtgtgttgtggccaccaatgtggccgagacgtcgcttaccatccctggcatcaagtacgtggtggactgtgggaaggtcaagaaacgctactacgaccgcgtcactggcgtatcctccttccgtgtcacctgggtctcccaggcatcagctgaccagcgagcgggcagagcaggacggacggagcccggccactgctacagttcgtggcctgctctcaggaagtgggtcaagccctgggaaccctcatccatgagagctcgatcccgtatgaagggtgctgccgcccgtgccatctggcccgggggtgactttttgaactgtttattatatggtggatgatgatttcatctcacgtgctggacgctgttctgttcagtgtgctctttggactacattagtcccctgtggagcagcagggctggagatctctgcagtcccttccccgcccgccctgccagaaggccgaggaggcacgtggagggcctccttcctgcaattcttccctctccagagtcagggagggctgcccagccctggcctcacagccgtcccagatgttaggtgagccactgagctctgtgttgaccttgaggggcctggctgggggcccccaggctccatgccttcttgggagggtggccgccaacgcctttcctgtgttatggcaacagggagtgggcatctcatctgcctgtggtcagctctcagacggcagggagcggagctgacgttggctgtgcttggtcaccgctgccatgccgcagaggatgcgcctagctgggctggggccacacgactattatgttggccttgaacggggactgcagagccctcagtttgtctcccttgttcctctgtggctgaggtgggagggggagggtggggtaggtcccccagcaagaaagagggacaggagcaccccaggcaggaccaaggagtcgggaggcccctgccttctgtcctccatggtgagggcacagatgtctccccagagcccagcgctggcagaatggattctgctcctggctttgcttctgcggcttcggtggagacagttatggaataaaatgttccttgcaccca

SEQ ID NO: 10816 - DNA, 789 bp, Homo sapiens
gcaggtagcgaggctgggtggcggaaaaggacgacgatcagaaagactcggtggaggaaatgcggaagtttaagaagtcaagggccagggccaagaaggcgcgggctgaggtgctgccccagatcaacttggatcattactcggtgttaccggcaggcgaaggcgatgaggacagggaggcagaagtggatgaggaagagggggccctggactccgacctcgatctggacctgggggatggcgggcaagatggaggtgagcagccggatgcctccctcccgctccacgtgctcccgctgtactctctgctggccccagagaagcaagcacaggtctttaagcctccaccggaggggactcggttgtgtgttgtggccaccaatgtggccgagacgtcgcttaccatccctggcatcaagtacgtggtggactgtgggaaggtcaagaaacgctactacgaccgcgtcactggcgtatcctccttccgtgtcacctgggtctcccaggcatcagctgaccagcgagcgggcagagcaggacggacggagcccggccactgctacaggctgtattcatctgcggtttttggtgacttcgagcagtttcctcctccagaaatcacccggaggcctgttgaagacttaatccttcaaatgaaggcgctcaacgttgaaaagtcatcaattccccttcccgacgccccctcggggaagccttctggcgcgaggagtgttgacgcctggtggcctgaacggccagaagggaaggtggcctgggggacgtggtgcc

SEQ ID NO: 10817 - DNA, 4693 bp, Homo sapiens
  misc_feature (4)..(4): n is a, c, g, or t
  misc_feature (68)..(68): n is a, c, g, or t
  misc_feature (128)..(128): n is a, c, g, or t
gganttgctctgctggtccggccgctggaggcccaccctggcctagtcgccatggggaagctgcgccngcctacaacatcaaggggcgccacaggcggccccggaccctcgaaggcccccccgagccnccccccgtgcagctggaactggaggacaaggacacgttgaagggagttgatgcaagcaacgcgctcgttctaccggggaagaagaaaaagaagaccaaagcccctcccctgtcgaagaaggagaagaagcctctgaccaagaaggagaagaaagtgctgcagaaaatcttagaacagaaggagaaaaagagccagcgagcagagatgctacagaagctgagtgaagtccaggcttccgaagctgagatgagactcttttataccacttccaagctaggcactgggaaccgcatgtatcacaccaaagagaaggctgacgaggtggtagccccgggccaggagaagatcagtagcctcagcggtgcccaccggaagcgtcgccgctggccctcagctgaggaggaggaggaggaggaggaggagtcggaatcggagctggaggaggagtcggagctggacgaggacccagctgctgagccggctgaggctggtgtggggaccaccgtggcacctctgccgccagctccagcacccagcagtcagcccgtgccggctgggatgactgttcctcctcctccagctgcagccccaccactgcccagggccctggctaagcccgccgtcttcatccccgtgaaccgctccccggaaatgcaggaggaacggctgaagctcccaattctctccgaagaacaagtaatcatggaggctgtggccgagcaccccatcgtcatcgtgtgtggtgagaccggcagcgggaagaccacacaggtgcctcagtttctctatgaagcaggcttcagcagtgaagacagcatcatcggtgtcacggagccccgccgagtggccgccgtggccatgtcccagcgagtggccaaggagatgaatctgtcccagcgggtcgtctcctaccagatccggtatgaaggaaacgtgacagaggagaccagaatcaagttcatgacggatggtgtgctgcttaaagaaatccagaaggacttcctgctgctgcggtacaaggtggtgatcatcgacgaggcccacgagaggagcgtgtacacggacatcctcatcggcctcctgtcccgcattgtgactctccgggctaagaggaacctgccactcaagctgctcatcatgtcggccacgctgcgggtggaggacttcacccagaacccacggctcttcgccaagccgccgccggtcatcaaggtggaatccaggcagttcccagtgactgtgcatttcaacaagcggacaccgctggaagactacagtggcgagtgcttccggaaggtctgcaagatccaccggatgctgcccgcaggtggcatcctggtgttcctgacggggcaggctgaggtgcatgcgctgtgccgcaggctcaggaaggctttcccaccctccagagcccggccacaagaaaaggacgacgatcagaaagactcggtggaggaaatgcggaagtttaagaagtcaagggccagggccaagaaggcgcgggctgaggtgctgccccagatcaacttggatcattactcggtgttaccggcaggcgaaggcgatgaggacagggaggcagaagtggatgaggaagagggggccctggactccgacctcgatctggacctgggggatggcgggcaagatggaggtgagcagccggatgcctccctcccgctccacgtgctcccgctgtactctctgctggccccagagaagcaagcacaggtctttaagcctccaccggaggggactcggttgtgtgttgtggccaccaatgtggccgagacgtcgcttaccatccctggcatcaagtacgtggtggactgtgggaaggtcaagaaacgctactacgaccgcgtcactggcgtatcctccttccgtgtcacctgggtctcccaggcatcagctgaccagcgagcgggcagagcaggacggacggagcccggccactgctacaggctgtattcatctgcggtttttggtgacttcgagcagtttcctcctccagaaatcacccggaggcctgttgaagacttaatccttcaaatgaaggcgctcaacgttgaaaaggtcatcaacttccccttcccgacgcccccctccgtggaagcccttcttgccgccgaggagctgttgatcgcactgggtgccctgcaaccgccccagaaagcagaaagggtgaagcaactgcaggagaaccggctgagctgccccatcactgcgctgggccggacaatggccacattccccgtggcaccccgctacgctaagatgctggcactgagccgacaacacggctgcctgccctatgccatcaccatcgtggccagcatgacggtgcgggagctgtttgaggagctggacagaccagcggccagtgacgaggagctcaccaggctgaagagcaagcgggcccgggtggcccagatgaagaggacctgggcagggcagggggcttctctgaagctcggcgacctcatggtgctgctgggcgccgtgggagcctgtgagtatgccagctgcacaccccagttttgcgaagccaacgggctgcggtacaaagccatgatggagatccggcgcctgcggggccagctgaccaccgcagtcaatgccgtgtgccccgaggctgagctcttcgtggatcccaagatgcagccgcccaccgagagccaggtgacctacctgcgacagatcgtgacggcaggcctgggggaccacttggcccgcagggtccagagcgaggagatgctggaggacaagtggaggaacgcctacaagacccctctcctcgacgaccctgtcttcatccaccccagctccgtccttttcaaagagctccccgagtttgtggtctaccaggaaatcgtggagaccactaagatgtacatgaaaggcgtctctagcgtggaggtccagtggatcccggccctgctgccctcttactgccagtttgacaagcccctggaggaaccagcccctacatactgccccgagcgggggcgggtgctgtgtcaccgggccagcgtgttctatcgcgtgggctggccgctccccgccatcgaggtggattttccagaggggattgaccgctacaagcactttgcccggttcctgctggaagggcaggtcttccgcaagctggcctcataccggagctgtctgctgtccagccccggcaccatgctgaagacgtgggccaggctgcagccccgtacggagagccttctgcgagccctggttgcagagaaggctgactgccatgaagccttgctggctgcttggaagaaaaaccccaaatgtgagtttgaccagggccagggggtgggagtagacaggatggggtcactgaggcaggggctttgtgctttgtgcacggtcagccctggcttggcagaaggatctggccccacggctgctggccagctttttgccacctgaggagagtccctgggcccagggtcaccctgacactgtcctccttccctcccctgcagacctgctggctgagtactgtgagtggcttccacaggccatgcaccccgatatcgagaaagcctggccccccaccactgtccactgaccagaaacctggctgcagggccgaggactggtttggggactggagggctggcagcagcctgtcaccgtgcgaccgtgaccacctggcatgggcttcgtggcctgctctcaggaagtgggtcaagccctgggaaccctcatccatgagagctcgatcccgtatgaagggtgctgccgcccgtgccatctggcccgggggtgactttttgaactgtttattatatggtggatgatgatttcatctcacgtgctggacgctgttctgttcagtgtgctctttggactacattagtcccctgtggagcagcagggctggagatctctgcagtcccttccccgcccgccctgccagaaggccgaggaggcacgtggagggcctccttcctgcaattcttccctctccagagtcagggagggctgcccagccctggcctcacagccgtcccagatgttaggtgagccactgagctctgtgttgaccttgaggggcctggctgggggcccccaggctccatgccttcttgggagggtggccgccaacgcctttcctgtgttatggcaacagggagtgggcatctcatctgcctgtggtcagctctcagacggcagggagcggagctgacgttggctgtgcttggtcaccgctgccatgccgcagaggatgcgcctagctgggctggggccacacgactattatgttggccttgaacggggactgcagagccctcagtttgtctcccttgttcctctgtggctgaggtgggagggggagggtggggtaggtcccccagcaagaaagagggacaggagcaccccaggcaggaccaaggagtcgggaggcccctgccttctgtcctccatggtgagggcacagatgtctccccagagcccagcgctggcagaatggattctgctcctggctttgcttctgcggcttcggtggagacagttatggaataaaatgttccttgcaccca

SEQ ID NO: 10818 - DNA, 2988 bp, Homo sapiens
ttagtactataacgggcgtatgtagcgaggcctgggtggcggaaaaggacgacgatcagaaagactcggtggaggaaatgcggaagtttaagaagtcaagggccagggccaagaaggcgcgggctgaggtgctgccccagatcaacttggatcattactcggtgttaccggcaggcgaaggcgatgaggacagggaggcagaagtggatgaggaagagggggccctggactccgacctcgatctggacctgggggatggcgggcaagatggaggtgagcagccggatgcctccctcccgctccacgtgctcccgctgtactctctgctggccccagagaagcaagcacaggtctttaagcctccaccggaggggactcggttgtgtgttgtggccaccaatgtggccgagacgtcgcttaccatccctggcatcaagtacgtggtggactgtgggaaggtcaagaaacgctactacgaccgcgtcactggcgtatcctccttccgtgtcacctgggtctcccaggcatcagctgaccagcgagcgggcagagcaggacggacggagcccggccactgctacaggctgtattcatctgcggtttttggtgacttcgagcagtttcctcctccagaaatcacccggaggcctgttgaagacttaatccttcaaatgaaggcgctcaacgttgaaaaggtcatcaacttccccttcccgacgcccccctccgtggaagcccttcttgccgccgaggagctgttgatcgcactgggtgccctgcaaccgccccagaaagcagaaagggtgaagcaactgcaggagaaccggctgagctgccccatcactgcgctgggccggacaatggccacattccccgtggcaccccgctacgctaagatgctggcactgagccgacaacacggctgcctgccctatgccatcaccatcgtggccagcatgacggtgcgggagctgtttgaggagctggacagaccagcggccagtgacgaggagctcaccaggctgaagagcaagcgggcccgggtggcccagatgaagaggacctgggcagggcagggggcttctctgaagctcggcgacctcatggtgctgctgggcgccgtgggagcctgtgagtatgccagctgcacaccccagttttgcgaagccaacgggctgcggtacaaagccatgatggagatccggcgcctgcggggccagctgaccaccgcagtcaatgccgtgtgccccgaggctgagctcttcgtggatcccaagatgcagccgcccaccgagagccaggtgacctacctgcgacagatcgtgacggcaggcctgggggaccacttggcccgcagggtccagagcgaggagatgctggaggacaagtggaggaacgcctacaagacccctctcctcgacgaccctgtcttcatccaccccagctccgtccttttcaaagagctccccgagtttgtggtctaccaggaaatcgtggagaccactaagatgtacatgaaaggcgtctctagcgtggaggtccagtggatcccggccctgctgccctcttactgccagtttgacaagcccctggaggaaccagcccctacatactgccccgagcgggggcgggtgctgtgtcaccgggccagcgtgttctatcgcgtgggctggccgctccccgccatcgaggtggattttccagaggggattgaccgctacaagcactttgcccggttcctgctggaagggcaggtcttccgcaagctggcctcataccggagctgtctgctgtccagccccggcaccatgctgaagacgtgggccaggctgcagccccgtacggagagccttctgcgagccctggttgcagagaaggctgactgccatgaagccttgctggctgcttggaagaaaaaccccaaatacctgctggctgagtactgtgagtggcttccacaggccatgcaccccgatatcgagaaagcctggccccccaccactgtccactgaccagaaacctggctgcagggccgaggactggtttggggactggagggctggcagcagcctgtcaccgtgcgaccgtgaccacctggcatgggcttcgtggcctgctctcaggaagtgggtcaagccctgggaaccctcatccatgagagctcgatcccgtatgaagggtgctgccgcccgtgccatctggcccgggggtgactttttgaactgtttattatatggtggatgatgatttcatctcacgtgctggacgctgttctgttcagtgtgctctttggactacattagtcccctgtggagcagcagggctggagatctctgcagtcccttccccgcccgccctgccagaaggccgaggaggcacgtggagggcctccttcctgcaattcttccctctccagagtcagggagggctgcccagccctggcctcacagccgtcccagatgttaggtgagccactgagctctgtgttgaccttgaggggcctggctgggggcccccaggctccatgccttcttgggagggtggccgccaacgcctttcctgtgttatggcaacagggagtgggcatctcatctgcctgtggtcagctctcagacggcagggagcggagctgacgttggctgtgcttggtcaccgctgccatgccgcagaggatgcgcctagctgggctggggccacacgactattatgttggccttgaacggggactgcagagccctcagtttgtctcccttgttcctctgtggctgaggtgggagggggagggtggggtaggtcccccagcaagaaagagggacaggagcaccccaggcaggaccaaggagtcgggaggcccctgccttctgtcctccatggtgagggcacagatgtctccccagagcccagcgctggcagaatggattctgctcctggctttgcttctgcggcttcggtggagacagttatggaataaaatgttccttgcaccca

SEQ ID NO: 10819 - DNA, 1593 bp, Homo sapiens
accatgcccggcaaatatttttggatttttagtagagctagggtttcaccatgttagccaggctggtctcgaactcctggcctcaggtgatccacctgcctcagcttcccaaagtgctgggattacaggcgtgagccaccacgctcagccagtttgtttgtttttgagacaagttcttgccctgttgcccaggctggagtgcagtggtgcagtcatggttcactgcagcctccaactcccaggctcaagggatcctcctacttcagccccctgagtaactggggctacaggtgcatgtcaccatgcccagccagctcttcaccctcctgggtggggctggtggggtggtgatgcctgccctgctttcgggcccccagcagcagccggtctgtgccctggctgcctgccaccaacgtgcattcctgccccacaggctgcagccccgtacggagagccttctgcgagccctggttgcagagaaggctgactgccatgaagccttgctggctgcttggaagaaaaaccccaaatacctgctggctgagtactgtgagtggcttccacaggccatgcaccccgatatcgagaaagcctggccccccaccactgtccactgaccagaaacctggctgcagggccgaggactggtttggggactggagggctggcagcagcctgtcaccgtgcgaccgtgaccacctggcatgggcttcgtggcctgctctcaggaagtgggtcaagccctgggaaccctcatccatgagagctcgatcccgtatgaagggtgctgccgcccgtgccatctggcccgggggtgactttttgaactgtttattatatggtggatgatgatttcatctcacgtgctggacgctgttctgttcagtgtgctctttggactacattagtcccctgtggagcagcagggctggagatctctgcagtcccttccccgcccgccctgccagaaggccgaggaggcacgtggagggcctccttcctgcaattcttccctctccagagtcagggagggctgcccagccctggcctcacagccgtcccagatgttaggtgagccactgagctctgtgttgaccttgaggggcctggctgggggcccccaggctccatgccttcttgggagggtggccgccaacgcctttcctgtgttatggcaacagggagtgggcatctcatctgcctgtggtcagctctcagacggcagggagcggagctgacgttggctgtgcttggtcaccgctgccatgccgcagaggatgcgcctagctgggctggggccacacgactattatgttggccttgaacggggactgcagagccctcagtttgtctcccttgttcctctgtggctgaggtgggagggggagggtggggtaggtcccccagcaagaaagagggacaggagcaccccaggcaggaccaaggagtcgggaggcccctgccttctgtcctccatggtgagggcacagatgtctccccagagcccagcgctggcagaatggattctgctcctggctttgcttctgcggcttcggtggagacagttatggaataaaatgttccttgcaccca

SEQ ID NO: 10820 - DNA, 804 bp, Homo sapiens
gggctgcaggaattcggcacgaggaaagaaagaattcacctaaaagattccatttccagttttataatgtatttcaggttctgaataacaatatttttccaaattgaaagtaaatattcaagaagttgatagcctggttaaaagttagatcctctattaccattctaagcacattcacttctatattgaagttttggtaaaaattcttttttcttttttaataaaaaattaggttattactttttttataaccagatttttaaagcactaggttttaaatcagtgggtatcataaaagccatatataaaagatcctttcttatagtaagacttgtgcttgttagcaggtttttctgttagtttttcccccataacatttaattattactaaaattgtatttacaatagtggtgccaaatcaaatggtaatttaaataaaatctattctgtgtttatgtagggtggtataaaaaagaggtcttcatttagacatgtgatttctaaaattccagaaagcaaaattgataagatgttagaaatttggaccattatttataatcagggtagcattaaaatggagaaaagaaagttttctgaaaaaatgcagtaaatataagccacatttctaaagtttatttttatgaaagcttcttttaagattttgaaatctattctgcattcccaagagtttatgtttattgtattttatatgatctacaacatataaaattgtgtatttttctttggttgtccctattaacaaaaaagtattttaataaaaaataaaattgaaatgagtgagtc

SEQ ID NO: 10821 - DNA, 2154 bp, Homo sapiens
ctctttaaggtgcccgaggctcgcgggcgctgcgctgaggggacggcgggaggcgcggcctggcctcgcactcaaagccgccgcagcgcgccccgggctcggccgacccggcggggatctaggggtgggcgacttcgcgggaccgtggcgcatgtttcctgggagttactgatcatcttctttgaagaaacatgaagttacactatgttgctgtgcttactctagccatcctgatgttcctgacatggcttccagaatcactgagctgtaacaaagcactctgtgctagtgatgtgagcaaatgcctcattcaggagctctgccagtgccggccgggagaaggcaattgctcctgctgtaaggagtgcatgctgtgtcttggggccctttgggacgagtgctgtgactgtgttggtatgtgtaatcctcgaaattatagtgacacacctccaacttcaaagagcacagtggaggagctgcatgaaccgatcccttctctcttccgggcactcacagaaggagatactcagttgaattggaacatcgtttctttccctgttgcagaagaactttcacatcatgagaatctggtttcatttttagaaactgtgaaccagccacaccaccagaatgtgtctgtccccagcaataatgttcacgcgccttattccagtgacaaagaacacatgtgtactgtggtttattttgatgactgcatgtccatacatcagtgtaaaatatcctgtgagtccatgggagcatccaaatatcgctggtttcataatgcctgctgcgagtgcattggtccagaatgtattgactatggtagtaaaactgtcaaatgtatgaactgcatgttttaaagaagacaaatgcaaaccaaagcaacttagtaaaataataggtataaaaagttattctgtaagtctgttggttgtatcttgtatcagaatcccagtaagttaagttgtaaagactttggaataagtttcttttaaaaatatgacatagccagtgatgtgtttaattatataactgttcttactgattttattgccccctagcaataagccctttcctttgaatacatgtacaactttggtcatatgagaagcaggtgcgcagagaattccttgaaagatctgaggtttttaacatgaagtctgatgtggttttcctctagcattccaaaaggtttttgctttgaaagtgttagcagaagcatgttgatgtgaattatgatttcttcatgtgctactgttagcacactgagtttttatagttgcacatcattcctcattgtgccttgttttatccattttataaatagagtagatatttgatataccactctgataactcatataaaaatatcatcataaaaagcttaatttcatcccttttatgttggttttaaaaggtaaatgcttaccatattttataattgagaactcttacatagtagaatccattctataatacatgtgttgacaaagctttagagaaagtttcctattctcttccatttcccctgcccaaagtgctgacataggcagtgatgaagaatctttaccaagattttcagggtgtacctatgaaattgctttaaatgcactgctggtgtaaataattagcaagcaaaagcgtttctgtgacttcaggtaccagcttaaagagcactagggatggggaacgaatgccaaatcagactccacctagagcaccaggaaacagcttgtaccctggtagggaaatggtgttgctgaaaggggaggctgagccagtgcgagactgaacttgtgcagccttagccaagacaaagcagtgtttttcagcagacggctgatgggacaggaattgaagaagagaattgactcgtatgaacaggacagggtgaaaatgctgggaattataatgggaaacaaaactatctatgttcatattttgtaatatttcatttgttaagtttatatctggatataatgttctttttaaacaagtataatcatatcgtcggaggttaagattatgaaattttagaatctctattcaagatgatgttcactccaaatacactacagaatttagtcaacattttatataatgtttcaataaatgtttctttcaataaagatactatgtgcccttcatagt

SEQ ID NO: 10822 - DNA, 342 bp, Homo sapiens
aattcaagcttctaacgatgtacggggacatgtgatttctaaaattccagaaagcaaaattgataagatgttagaaatttggaccattatttataatcagggtagcattaaaatggagaaaagaaagttttctgaaaaaatgcagtaaatataagccacatttctaaagtttatttttatgaaagcttcttttaagattttgaaatctattctgcattcccaagagtttatgtttattgtattttatatgatctacaacatataaaattgtgtatttttctttggttgtccctattaacaaaaaagtattttaataaaaaataaaattgaaatgagtgagtc

SEQ ID NO: 10823 - DNA, 3768 bp, Homo sapiens
ctctttaaggtgcccgaggctcgcgggcgctgcgctgaggggacggcgggaggcgcggcctggcctcgcactcaaagccgccgcagcgcgccccgggctcggccgacccggcggggatctaggggtgggcgacttcgcgggaccgtggcgcatgtttcctgggagttactgatcatcttctttgaagaaacatgaagttacactatgttgctgtgcttactctagccatcctgatgttcctgacatggcttccagaatcactgagctgtaacaaagcactctgtgctagtgatgtgagcaaatgcctcattcaggagctctgccagtgccggccgggagaaggcaattgctcctgctgtaaggagtgcatgctgtgtcttggggccctttgggacgagtgctgtgactgtgttggtatgtgtaatcctcgaaattatagtgacacacctccaacttcaaagagcacagtggaggagctgcatgaaccgatcccttctctcttccgggcactcacagaaggagatactcagttgaattggaacatcgtttctttccctgttgcagaagaactttcacatcatgagaatctggtttcatttttagaaactgtgaaccagccacaccaccagaatgtgtctgtccccagcaataatgttcacgcgccttattccagtgacaaagaacacatgtgtactgtggtttattttgatgactgcatgtccatacatcagtgtaaaatatcctgtgagtccatgggagcatccaaatatcgctggtttcataatgcctgctgcgagtgcattggtccagaatgtattgactatggtagtaaaactgtcaaatgtatgaactgcatgttttaaagaagacaaatgcaaaccaaagcaacttagtaaaataataggtataaaaagttattctgtaagtctgttggttgtatcttgtatcagaatcccagtaagttaagttgtaaagactttggaataagtttcttttaaaaatatgacatagccagtgatgtgtttaattatataactgttcttactgattttattgccccctagcaataagccctttcctttgaatacatgtacaactttggtcatatgagaagcaggtgcgcagagaattccttgaaagatctgaggtttttaacatgaagtctgatgtggttttcctctagcattccaaaaggtttttgctttgaaagtgttagcagaagcatgttgatgtgaattatgatttcttcatgtgctactgttagcacactgagtttttatagttgcacatcattcctcattgtgccttgttttatccattttataaatagagtagatatttgatataccactctgataactcatataaaaatatcatcataaaaagcttaatttcatcccttttatgttggttttaaaaggtaaatgcttaccatattttataattgagaactcttacatagtagaatccattctataatacatgtgttgacaaagctttagagaaagtttcctattctcttccatttcccctgcccaaagtgctgacataggcagtgatgaagaatctttaccaagattttcagggtgtacctatgaaattgctttaaatgcactgctggtgtaaataattagcaagcaaaagcgtttctgtgacttcaggtaccagcttaaagagcactagggatggggaacgaatgccaaatcagactccacctagagcaccaggaaacagcttgtaccctggtagggaaatggtgttgctgaaaggggaggctgagccagtgcgagactgaacttgtgcagccttagccaagacaaagcagtgtttttcagcagacggctgatgggacaggaattgaagaagagaattgactcgtatgaacaggacagggtgaaaatgctgggaattataatgggaaacaaaactatctatgttcatattttgtaatatttcatttgttaagtttatatctggatataatgttctttttaaacaagtataatcatatcgtcggaggttaagattatgaaattttagaatctctattcaagatgatgttcactccaaatacactacagaatttagtcaacattttatataatgtttcaataaatgtttctttcaataaagatactatgtgcccttcatagtaataaaatctcaatcttaaagcatgaatctaaaacataaatatttatattacagactcaattttacaaaattactaattgctctagtgcatatttgaactacaagcaactttttaggaatacctctttatacgtctacatattttagtatataaaaatagataatgctcttggacacattttgtattattcatgatctgaatagtagttagttaaaagatcatttgtaatattatgatcaactgttataaattaaggtcttaataccttttctgctctttcaaataactctaatgaatattcaagatattttagccttttaaaaagttgagatttagctcatggatatattttttggtagggaaacattagggtctccttttcttccttttacctagaatgcctcatttaaaagtgccttgaaaacatttagctccccttcttcatgagcatctgtagagctgaaagtattctggaactttagacagaaagctgaaaggaatctgcagtctcctgctgcagttcaactctgctgtttttcagtcatttcctactgtgagtggagtgatgttgtgtgtgtgttggcaacatgcctaatgttttcttaatgatgacaacaaatattttaaaactgcatttatcattttttaggtcttcattaaattttaaaatgtaatatctgtttcccaccccctacattaggaggataatttcttaaaccacattgttttaattgatttttcttatcttgatttctttcattagaaactatccctaaatgtaaagatcttttgccttcaaatttggcttattttttctgatttatgagggtttgaaagaaagaattcacctaaaagattccatttccagttttataatgtatttcaggttctgaataacaatatttttccaaattgaaagtaaatattcaagaagttgatagcctggttaaaagttagatcctctattaccattctaagcacattcacttctatattgaagttttggtaaaaattcttttttcttttttaataaaaaattaggttattactttttttataaccagatttttaaagcactaggttttaaatcagtgggtatcataaaagccatatataaaagatcctttcttatagtaagacttgtgcttgttagcaggtttttctgttagtttttcccccataacatttaattattactaaaattgtatttacaatagtggtgccaaatcaaatggtaatttaaataaaatctattctgtgtttatgtagggtggtataaaaaagaggtcttcatttagacatgtgatttctaaaattccagaaagcaaaattgataagatgttagaaatttggaccattatttataatcagggtagcattaaaatggagaaaagaaagttttctgaaaaaatgcagtaaatataagccacatttctaaagtttatttttatgaaagcttcttttaagattttgaaatctattctgcattcccaagagtttatgtttattgtattttatatgatctacaacatataaaattgtgtatttttctttggttgtccctattaacaaaaaagtattttaataaaaaataaaattgaaatgagtgagtc

SEQ ID NO: 10824 - DNA, 3704 bp, Homo sapiens
ctctttaaggtgcccgaggctcgcgggcgctgcgctgaggggacggcgggaggcgcggcctggcctcgcactcaaagccgccgcagcgcgccccgggctcggccgacccggcggggatctaggggtgggcgacttcgcgggaccgtggcgcatgtttcctgggagttactgatcatcttctttgaagaaacatgaagttacactatgttgctgtgcttactctagccatcctgatgttcctgacatggcttccagaatcactgagctgtaacaaagcactctgtgctagtgatgtgagcaaatgcctcattcaggagctctgccagtgccggccgggagaaggcaattgctcctgctgtaaggagtgcatgctgtgtcttggggccctttgggacgagtgctgtgactgtgttggtatgtgtaatcctcgaaattatagtgacacacctccaacttcaaagagcacagtggaggagctgcatgaaccgatcccttctctcttccgggcactcacagaaggagatactcagttgaattggaacatcgtttctttccctgttgcagaagaactttcacatcatgagaatctggtttcatttttagaaactgtgaaccagccacaccaccagaatgtgtctgtccccagcaataatgttcacgcgccttattccagtgacaaagaacacatgtgtactgtggtttattttgatgactgcatgtccatacatcagtgtaaaatatcctgtgagtccatgggagcatccaaatatcgctggtttcataatgcctgctgcgagtgcattggtccagaatgtattgactatggtagtaaaactgtcaaatgtatgaactgcatgttttaaagaagacaaatgcaaaccaaagcaacttagtaaaataataggtataaaaagttattctgtaagtctgttggttgtatcttgtatcagaatcccagtaagttaagttgtaaagactttggaataagtttcttttaaaaatatgacatagccagtgatgtgtttaattatataactgttcttactgattttattgccccctagcaataagccctttcctttgaatacatgtacaactttggtcatatgagaagcaggtgcgcagagaattccttgaaagatctgaggtttttaacatgaagtctgatgtggttttcctctagcattccaaaaggtttttgctttgaaagtgttagcagaagcatgttgatgtgaattatgatttcttcatgtgctactgttagcacactgagtttttatagttgcacatcattcctcattgtgccttgttttatccattttataaatagagtagatatttgatataccactctgataactcatataaaaatatcatcataaaaagcttaatttcatcccttttatgttggttttaaaaggtaaatgcttaccatattttataattgagaactcttacatagtagaatccattctataatacatgtgttgacaaagctttagagaaagtttcctattctcttccatttcccctgcccaaagtgctgacataggcagtgatgaagaatctttaccaagattttcagggtgtacttcaggtaccagcttaaagagcactagggatggggaacgaatgccaaatcagactccacctagagcaccaggaaacagcttgtaccctggtagggaaatggtgttgctgaaaggggaggctgagccagtgcgagactgaacttgtgcagccttagccaagacaaagcagtgtttttcagcagacggctgatgggacaggaattgaagaagagaattgactcgtatgaacaggacagggtgaaaatgctgggaattataatgggaaacaaaactatctatgttcatattttgtaatatttcatttgttaagtttatatctggatataatgttctttttaaacaagtataatcatatcgtcggaggttaagattatgaaattttagaatctctattcaagatgatgttcactccaaatacactacagaatttagtcaacattttatataatgtttcaataaatgtttctttcaataaagatactatgtgcccttcatagtaataaaatctcaatcttaaagcatgaatctaaaacataaatatttatattacagactcaattttacaaaattactaattgctctagtgcatatttgaactacaagcaactttttaggaatacctctttatacgtctacatattttagtatataaaaatagataatgctcttggacacattttgtattattcatgatctgaatagtagttagttaaaagatcatttgtaatattatgatcaactgttataaattaaggtcttaataccttttctgctctttcaaataactctaatgaatattcaagatattttagccttttaaaaagttgagatttagctcatggatatattttttggtagggaaacattagggtctccttttcttccttttacctagaatgcctcatttaaaagtgccttgaaaacatttagctccccttcttcatgagcatctgtagagctgaaagtattctggaactttagacagaaagctgaaaggaatctgcagtctcctgctgcagttcaactctgctgtttttcagtcatttcctactgtgagtggagtgatgttgtgtgtgtgttggcaacatgcctaatgttttcttaatgatgacaacaaatattttaaaactgcatttatcattttttaggtcttcattaaattttaaaatgtaatatctgtttcccaccccctacattaggaggataatttcttaaaccacattgttttaattgatttttcttatcttgatttctttcattagaaactatccctaaatgtaaagatcttttgccttcaaatttggcttattttttctgatttatgagggtttgaaagaaagaattcacctaaaagattccatttccagttttataatgtatttcaggttctgaataacaatatttttccaaattgaaagtaaatattcaagaagttgatagcctggttaaaagttagatcctctattaccattctaagcacattcacttctatattgaagttttggtaaaaattcttttttcttttttaataaaaaattaggttattactttttttataaccagatttttaaagcactaggttttaaatcagtgggtatcataaaagccatatataaaagatcctttcttatagtaagacttgtgcttgttagcaggtttttctgttagtttttcccccataacatttaattattactaaaattgtatttacaatagtggtgccaaatcaaatggtaatttaaataaaatctattctgtgtttatgtagggtggtataaaaaagaggtcttcatttagacatgtgatttctaaaattccagaaagcaaaattgataagatgttagaaatttggaccattatttataatcagggtagcattaaaatggagaaaagaaagttttctgaaaaaatgcagtaaatataagccacatttctaaagtttatttttatgaaagcttcttttaagattttgaaatctattctgcattcccaagagtttatgtttattgtattttatatgatctacaacatataaaattgtgtatttttctttggttgtccctattaacaaaaaagtattttaataaaaaataaaattgaaatgagtgagtc

SEQ ID NO: 10825 - DNA, 1222 bp, Homo sapiens
cgccattctcctgcctcagcctcccaagtagctgggactacaggcgcccgcacgtacgcccggctaatttttttgtatttttagtagagacggggtttcaccgttttagccgggatgcctcgatctcctgacctcgtgatccgcccgcctcggcctcccaaagtgctgggattacaggcgtgacaccgcgcccggcatgcctaatgttttcttaatgatgacaacaaatattttaaaactgcatttatcattttttaggtcttcattaaattttaaaatgtaatatctgtttcccaccccctacattaggaggataatttcttaaaccacattgttttaattgatttttcttatcttgatttctttcattagaaactatccctaaatgtaaagatcttttgccttcaaatttggcttattttttctgatttatgagggtttgaaagaaagaattcacctaaaagattccatttccagttttataatgtatttcaggttctgaataacaatatttttccaaattgaaagtaaatattcaagaagttgatagcctggttaaaagttagatcctctattaccattctaagcacattcacttctatattgaagttttggtaaaaattcttttttcttttttaataaaaaattaggttattactttttttataaccagatttttaaagcactaggttttaaatcagtgggtatcataaaagccatatataaaagatcctttcttatagtaagacttgtgcttgttagcaggtttttctgttagtttttcccccataacatttaattattactaaaattgtatttacaatagtggtgccaaatcaaatggtaatttaaataaaatctattctgtgtttatgtagggtggtataaaaaagaggtcttcatttagacatgtgatttctaaaattccagaaagcaaaattgataagatgttagaaatttggaccattatttataatcagggtagcattaaaatggagaaaagaaagttttctgaaaaaatgcagtaaatataagccacatttctaaagtttatttttatgaaagcttcttttaagattttgaaatctattctgcattcccaagagtttatgtttattgtattttatatgatctacaacatataaaattgtgtatttttctttggttgtccctattaacaaaaaagtattttaataaaaaataaaattgaaatgagtgagtc

SEQ ID NO: 10826 - DNA, 1897 bp, Homo sapiens
ctctttaaggtgcccgaggctcgcgggcgctgcgctgaggggacggcgggaggcgcggcctggcctcgcactcaaagccgccgcagcgcgccccgggctcggccgacccggcggggatctaggggtgggcgacttcgcgggaccgtggcgcatgtttcctgggagttactgatcatcttctttgaagaaacatgaagttacactatgttgctgtgcttactctagccatcctgatgttcctgacatggcttccagaatcactgagctgtaacaaagcactctgtgctagtgatgtgagcaaatgcctcattcaggagctctgccagtgccggccgggagaaggcaattgctcctgctgtaaggagtgcatgctgtgtcttggggccctttgggacgagtgctgtgactgtgttggtatgtgtaatcctcgaaattatagtgacacacctccaacttcaaagagcacagtggaggagctgcatgaaccgatcccttctctcttccgggcactcacagaaggagatactcagttgaattggaacatcgtttctttccctgttgcagaagaactttcacatcatgagaatctggtttcatttttagaaactgtgaaccagccacaccaccagaatgtgtctgtccccagcaataatgttcacgcgccttattccagtgacaaagaacacatgtgtactgtggtttattttgatgactgcatgtccatacatcagtgtaaaatatcctgtgagtccatgggagcatccaaatatcgctggtttcataatgcctgctgcgagtgcattggtccagaatgtattgactatggtagtaaaactgtcaaatgtatgaactgcatgttttaaagaagacaaatgcaaaccaaagcaacttagtaaaataataggtataaaaagttattctgtaagtctgttggttgtatcttgtatcagaatcccagtaagttaagttgtaaagactttggaataagtttcttttaaaaatatgacatagccagtgatgtgtttaattatataactgttcttactgattttattgccccctagcaataagccctttcctttgaatacatgtacaactttggtcatatgagaagcaggtgcgcagagaattccttgaaagatctgaggtttttaacatgaagtctgatgtggttttcctctagcattccaaaaggtttttgctttgaaagtgttagcagaagcatgttgatgtgaattatgatttcttcatgtgctactgttagcacactgagtttttatagttgcacatcattcctcattgtgccttgttttatccattttataaatagagtagatatttgatataccactctgataactcatataaaaatatcatcataaaaagcttaatttcatcccttttatgttggttttaaaaggtaaatgcttaccatattttataattgagaactcttacatagtagaatccattctataatacatgtgttgacaaagctttagagaaagtttcctattctcttccatttcccctgcccaaagtgctgacataggcagtgatgaagaatctttaccaagattttcagggtgtacctatgaaattgctttaaatgcactgctggtgtaaataattagcaagcaaaagcgtttctgtgacttcaggtaccagcttaaagagcactagggatggggaacgaatgccaaatcagactccacctagagcaccaggaaacagcttgtaccctggtagggaaatggtgttgctgaaaggggaggctgagccagtgcgagactgaacttgtgcagccttagccaaggcctccagcaccagacatctaccccccctcctaataactgttactaaactatctaggccaactctcatcaacatactcaag

SEQ ID NO: 10827 - DNA, 824 bp, Homo sapiens
ctctttaaggtgcccgaggctcgcgggcgctgcgctgaggggacggcgggaggcgcggcctggcctcgcactcaaagccgccgcagcgcgccccgggctcggccgacccggcggggatctaggggtgggcgacttcgcgggaccgtggcgcatgtttcctgggagttactgatcatcttctttgaagaaacatgaagttacactatgttgctgtgcttactctagccatcctgatgttcctgacatggcttccagaatcactgagctgtaacaaagcactctgtgctagtgatgtgagcaaatgcctcattcaggagctctgccagtgccggccgggagaaggcaattgctcctgctgtaaggagtgcatgctgtgtcttggggccctttgggacgagtgctgtgactgtgttggttcatccatgttgtaaatcagggtccccaacccctgagccatggaccagtagcagtccgccgcctcttaggaaccgggccacatagaaggaggtgaacaccaggcaagcgagcgtcaccgcctgagctccgtctcctgtcaggtcagcggcagtattggattcttacaggagctcgaaccctattgtgaactgcacatacgaggggtctcagttgcatgctccttatgagaatctaatgcctgatgatctgaggtggaacagtttcatcccaaaaccagtcctggtgccaaaaaggctgggggctactgataggatttccttctttttttaaggctgaatagtattccattgtatataaagtggaattgtattttatattgtataaatataccacattgtacatatcca

SEQ ID NO: 10828 - DNA, 2081 bp, Homo sapiens
ctctttaaggtgcccgaggctcgcgggcgctgcgctgaggggacggcgggaggcgcggcctggcctcgcactcaaagccgccgcagcgcgccccgggctcggccgacccggcggggatctaggggtgggcgacttcgcgggaccgtggcgcatgtttcctgggagttactgatcatcttctttgaagaaacatgaagttacactatgttgctgtgcttactctagccatcctgatgttcctgacatggcttccagaatcactgagctgtaacaaagcactctgtgctagtgatgtgagcaaatgcctcattcaggagctctgccagtgccggccgggagaaggcaattgctcctgctgtaaggagtgcatgctgtgtcttggggccctttgggacgagtgctgtgactgtgttggtatgtgtaatcctcgaaattatagtgacacacctccaacttcaaagagcacagtggaggagctgcatgaaccgatcccttctctcttccgggcactcacagaaggagatactcagttgaattggaacatcgtttctttccctgttgcagaagaactttcacatcatgagaatctggtttcatttttagaaactgtgaaccagccacaccaccagaatgtgtctgtccccagcaataatgttcacgcgccttattccagtgacaaaggtaactgccaacagttgactttttccattccgccccctcatgtggtctgtccatgtaatctataaaacctatataagaccatcttttggagcagccttttggttttgaatttgtatcatctcacataaattctagactcaataaccctgatcccatcatatctagaggcacatgccagaaggataagagaaaaaaaaatatctccaatccttgagtagataaaaaggcatgtcggctgggcgtggtggctcatgcctgtaatcccagcactttgggaggccgaggcaggtggatcacgaggtcaagagttcgagaccagcctgaccaacatggtgaaaccccatctctactaagaatacaaaaattagccgggtgtggtggcgggcgcctgtagtccagctacgagggaggctgaggcaggagaattgcttgaacctgagagtcggaggttgctgtgaaccgagatcacaccactgcactccagcctgggtggcagagcaagactccgtctcaccaaaaaaaaaaaagataaagaggcatgtcagcatattgtcagaattcctccatactcctggcagcagaggctgtactgtattggaaaatagataattgttcctaattctggtatttatttgtgctaggctttattctgttcataagatagcaacaatgctgcttctctaataaaatattgctcattgtcaggtgacattcagagtatcccatgaagtcagatttttataatagcacccgtaccaaaatgatgccaaagtcattagctaaatttctttataagcaagttggtattccagacatctcatttccaggcataaactaaccccagccagttctctgcaaatgggtgctgttggtcagaaaaggaattaagtgagaaaataacttatacaaattacagaagcatatttaagagcatttattagtgaagataggtcatatcataattttggaatgtaaagagcatgtgacttttataaaatctttgatattttttgacaaaaggcaccatataattttactgtggaagcataaagcacttatgaaaattgcaattatttcttaaaacatgaggtgaattatgtataaatagtataatttgtactcttacttgactattagttgtgccctccattacattcctacctatataaaacagtgcgggctgggtgcggtggctcacgcctgtaatcccagcactttgagaggctgaggcgggcacatcacctgaggtcgggagtttgagaccagcctgaccaacatgagagacctcgtctctactagaaatacaaaattagctgggcgtggtagcacatgcctgtaatcccagctacttgggaggctgaagcaggagaactgcttgagcctgggaggtggaggttgcg

SEQ ID NO: 10829 - DNA, 2312 bp, Homo sapiens
ctctttaaggtgcccgaggctcgcgggcgctgcgctgaggggacggcgggaggcgcggcctggcctcgcactcaaagccgccgcagcgcgccccgggctcggccgacccggcggggatctaggggtgggcgacttcgcgggaccgtggcgcatgtttcctgggagttactgatcatcttctttgaagaaacatgaagttacactatgttgctgtgcttactctagccatcctgatgttcctgacatggcttccagaatcactgagctgtaacaaagcactctgtgctagtgatgtgagcaaatgcctcattcaggagctctgccagtgccggccgggagaaggcaattgctcctgctgtaaggagtgcatgctgtgtcttggggccctttgggacgagtgctgtgactgtgttgattgaccctcctttcatttctgtcatgccacttgacaatgaaggaactgtatcagttgacctatagaatagcccacattccggatttgactgcttcctgtggaagtcctaccatactgactgttctgtcataaacaattttcataggattatgttaaggtatgtgtaatcctcgaaattatagtgacacacctccaacttcaaagagcacagtggaggagctgcatgaaccgatcccttctctcttccgggcactcacagaaggagatactcagttgaattggaacatcgtttctttccctgttgcagaagaactttcacatcatgagaatctggtttcatttttagaaactgtgaaccagccacaccaccagaatgtgtctgtccccagcaataatgttcacgcgccttattccagtgacaaagaacacatgtgtactgtggtttattttgatgactgcatgtccatacatcagtgtaaaatatcctgtgagtccatgggagcatccaaatatcgctggtttcataatgcctgctgcgagtgcattggtccagaatgtattgactatggtagtaaaactgtcaaatgtatgaactgcatgttttaaagaagacaaatgcaaaccaaagcaacttagtaaaataataggtataaaaagttattctgtaagtctgttggttgtatcttgtatcagaatcccagtaagttaagttgtaaagactttggaataagtttcttttaaaaatatgacatagccagtgatgtgtttaattatataactgttcttactgattttattgccccctagcaataagccctttcctttgaatacatgtacaactttggtcatatgagaagcaggtgcgcagagaattccttgaaagatctgaggtttttaacatgaagtctgatgtggttttcctctagcattccaaaaggtttttgctttgaaagtgttagcagaagcatgttgatgtgaattatgatttcttcatgtgctactgttagcacactgagtttttatagttgcacatcattcctcattgtgccttgttttatccattttataaatagagtagatatttgatataccactctgataactcatataaaaatatcatcataaaaagcttaatttcatcccttttatgttggttttaaaaggtaaatgcttaccatattttataattgagaactcttacatagtagaatccattctataatacatgtgttgacaaagctttagagaaagtttcctattctcttccatttcccctgcccaaagtgctgacataggcagtgatgaagaatctttaccaagattttcagggtgtacctatgaaattgctttaaatgcactgctggtgtaaataattagcaagcaaaagcgtttctgtgacttcaggtaccagcttaaagagcactagggatggggaacgaatgccaaatcagactccacctagagcaccaggaaacagcttgtaccctggtagggaaatggtgttgctgaaaggggaggctgagccagtgcgagactgaacttgtgcagccttagccaagacaaagcagtgtttttcagcagacggctgatgggacaggaattgaagaagagaattgactcgtatgaacaggacagggtgaaaatgctgggaattataatgggaaacaaaactatctatgttcatattttgtaatatttcatttgttaagtttatatctggatataatgttctttttaaacaagtataatcatatcgtcggaggttaagattatgaaattttagaatctctattcaagatgatgttcactccaaatacactacagaatttagtcaacattttatataatgtttcaataaatgtttctttcaataaagatactatgtgcccttcatagt

SEQ ID NO: 10830 - DNA, 3748 bp, Homo sapiens
ctctttaaggtgcccgaggctcgcgggcgctgcgctgaggggacggcgggaggcgcggcctggcctcgcactcaaagccgccgcagcgcgccccgggctcggccgacccggcggggatctaggggtgggcgacttcgcgggaccgtggcgcatgtttcctgggagttactgatcatcttctttgaagaaacatgaagttacactatgttgctgtgcttactctagccatcctgatgttcctgacatggcttccagaatcactgagctgtaacaaagcactctgtgctagtgatgtgagcaaatgcctcattcaggagctctgccagtgccggccgggagaaggcaattgctcctgctgtaaggagtgcatgctgtgtcttggggccctttgggacgagtgctgtgactgtgttggtatgtgtaatcctcgaaattatagtgacacacctccaacttcaaagagcacagtggaggagctgcatgaaccgatcccttctctcttccgggcactcacagaaggagatactcagttgaattggaacatcgtttctttccctgttgcagaagaactttcacatcatgagaatctggtttcatttttagaaactgtgaaccagccacaccaccagaatgtgtctgtccccagcaataatgttcacgcgccttattccagtgacaaagaacacatgtgtactgtggtttattttgatgactgcatgtccatacatcagtgtaaaatatcctgtgagtccatgggagcatccaaatatcgctggtttcataatgcctgctgcgagtgcattggtccagaatgtattgactatggtagtaaaactgtcaaatgtatgaactgcatgttttaaagaagacaaatgcaaaccaaagcaacttagtaaaataataggtataaaaagttattctgtaagtctgttggttgtatcttgtatcagaatcccagtaagttaagttgtaaagactttggaataagtttcttttaaaaatatgacatagccagtgatgtgtttaattatataactgttcttactgattttattgccccctagcaataagccctttcctttgaatacatgtacaactttggtcatatgagaagcaggtgcgcagagaattccttgaaagatctgaggtttttaacatgaagtctgatgtggttttcctctagcattccaaaaggtttttgctttgaaagtgttagcagaagcatgttgatgtgaattatgatttcttcatgtgctactgttagcacactgagtttttatagttgcacatcattcctcattgtgccttgttttatccattttataaatagagtagatatttgatataccactctgataactcatataaaaatatcatcataaaaagcttaatttcatcccttttatgttggttttaaaaggtaaatgcttaccatattttataattgagaactcttacatagtagaatccattctataatacatgtgttgacaaagctttagagaaagtttcctattctcttccatttcccctgcccaaagtgctgacataggcagtgatgaagaatctttaccaagattttcagggtgtacctatgaaattgctttaaatgcactgctggtgtaaataattagcaagcaaaagcgtttctgtgacttcaggtaccagcttaaagagcactagggatggggaacgaatgccaaatcagactccacctagagcaccaggaaacagcttgtaccctggtagggaaatggtgttgctgaaaggggaggctgagccagtgcgagactgaacttgtgcagccttagccaagacaaagcagtgtttttcagcagacggctgatgggacaggaattgaagaagagaattgactcgtatgaacaggacagggtgaaaatgctgggaattataatgggaaacaaaactatctatgttcatattttgtaatatttcatttgttaagtttatatctggatataatgttctttttaaacaagtataatcatatcgtcggaggttaagattatgaaattttagaatctctattcaagatgatgttcactccaaatacactacagaatttagtcaacattttatataatgtttcaataaatgtttctttcaataaagatactatgtgcccttcatagtaataaaatctcaatcttaaagcatgaatctaaaacataaatatttatattacagactcaattttacaaaattactaattgctctagtgcatatttgaactacaagcaactttttaggaatacctctttatacgtctacatattttagtatataaaaatagataatgctcttggacacattttgtattattcatgatctgaatagtagttagttaaaagatcatttgtaatattatgatcaactgttataaattaaggtcttaataccttttctgctctttcaaataactctaatgaatattcaagatattttagccttttaaaaagttattttttggtagggaaacattagggtctccttttcttccttttacctagaatgcctcatttaaaagtgccttgaaaacatttagctccccttcttcatgagcatctgtagagctgaaagtattctggaactttagacagaaagctgaaaggaatctgcagtctcctgctgcagttcaactctgctgtttttcagtcatttcctactgtgagtggagtgatgttgtgtgtgtgttggcaacatgcctaatgttttcttaatgatgacaacaaatattttaaaactgcatttatcattttttaggtcttcattaaattttaaaatgtaatatctgtttcccaccccctacattaggaggataatttcttaaaccacattgttttaattgatttttcttatcttgatttctttcattagaaactatccctaaatgtaaagatcttttgccttcaaatttggcttattttttctgatttatgagggtttgaaagaaagaattcacctaaaagattccatttccagttttataatgtatttcaggttctgaataacaatatttttccaaattgaaagtaaatattcaagaagttgatagcctggttaaaagttagatcctctattaccattctaagcacattcacttctatattgaagttttggtaaaaattcttttttcttttttaataaaaaattaggttattactttttttataaccagatttttaaagcactaggttttaaatcagtgggtatcataaaagccatatataaaagatcctttcttatagtaagacttgtgcttgttagcaggtttttctgttagtttttcccccataacatttaattattactaaaattgtatttacaatagtggtgccaaatcaaatggtaatttaaataaaatctattctgtgtttatgtagggtggtataaaaaagaggtcttcatttagacatgtgatttctaaaattccagaaagcaaaattgataagatgttagaaatttggaccattatttataatcagggtagcattaaaatggagaaaagaaagttttctgaaaaaatgcagtaaatataagccacatttctaaagtttatttttatgaaagcttcttttaagattttgaaatctattctgcattcccaagagtttatgtttattgtattttatatgatctacaacatataaaattgtgtatttttctttggttgtccctattaacaaaaaagtattttaataaaaaataaaattgaaatgagtgagtc

SEQ ID NO: 10831 - DNA, 1207 bp, Homo sapiens
ctctttaaggtgcccgaggctcgcgggcgctgcgctgaggggacggcgggaggcgcggcctggcctcgcactcaaagccgccgcagcgcgccccgggctcggccgacccggcggggatctaggggtgggcgacttcgcgggaccgtggcgcatgtttcctgggagttactgatcatcttctttgaagaaacatgaagttacactatgttgctgtgcttactctagccatcctgatgttcctgacatggcttccagaatcactgagctgtaacaaagcactctgtgctagtgatgtgagcaaatgcctcattcaggagctctgccagtgccggccgggagaaggcaattgctcctgctgtaaggagtgcatgctgtgtcttggggccctttgggacgagtgctgtgactgtgttggtatgtgtaatcctcgaaattatagtgacacacctccaacttcaaagagcacagtggaggagctgcatgaaccgatcccttctctcttccgggcactcacagaaggagatactcagttgaattggaacatcgtttctttccctgttgcagaagaactttcacatcatgagaatctggtttcatttttagaaactgtgaaccagccacaccaccagaatgtgtctgtccccagcaataatgttcacgcgccttattccagtgacaaaggtaactgccaacagttgactttttccattccgccccctcatgtggtctgtccatgtaatctataaaacctatataagaccatcttttggagcagccttttggttttgaatttgtatcatctcacataaattctagactcaataaccctgatcccatcatatctagaggcacatgccagaaggataagagaaaaaaaaatatctccaatccttgagtagataaaaaggcatgtcggctgggcgtggtggctcatgcctgtaatcccagcactttgggaggccgaggcaggtggatcacgaggtcaagagttcgagaccagcctgaccaacatggtgaaaccccatctctactaagaatacaaaaattagccgggtgtggtggcgggcgcctgtagtccagctacgagggaggctgaggcaggagaattgcttgaacctgagagtcggaggttgctgtgaaccgagatcacaccacttaaacggcgctggtgcaagcatcagcaccaggggaccgcgggcgggcgggg

SEQ ID NO: 10832 - DNA, 2430 bp, Homo sapiens
agctgtcccaggtggcccagctcagcaatggcaatgggggtccccagagtcattctgctctgcctctttggggctgcgctctgcctgacagggtcccaagccctgcagtgctacagctttgagcacacctactttggcccctttgacctcagggccatgaagctgcccagcatctcctgtcctcatgagtgctttgaggctatcctgtctctggacaccgggtatcgcgcgccggtgaccctggtgcggaagggctgctggaccgggcctcctgcgggccagacgcaatcgaacccggacgcgctgccgccagactactcggtggtgcgcggctgcacaactgacaaatgcaacgcccacctcatgactcatgacgccctccccaacctgagccaagcacccgacccgccgacgctcagcggcgccgagtgctacgcctgtatcggggtccaccaggatgactgcgctatcggcaggtcccgacgagtccagtgtcaccaggaccagaccgcctgcttccagggcaatggcagaatgacagttggcaatttctcagtccctgtgtacatcagaacctgccaccggccctcctgcaccaccgagggcaccaccagcccctggacagccatcgacctccagggctcctgctgtgaggggtacctctgcaacaggaaatccatgacccagcccttcaccagtgcttcagccaccacccctccccgagcactacaggtcctggccctgctcctcccagtcctcctgctggtggggctctcagcatagaccgcccctccaggatgctggggacagggctcacacacctcattcttgctgcttcagcccctatcacatagctcactggaaaatgatgttaaagtaagaattgcactcctgtccctctggccttccatctctcccgcccttgtgccccacaacctggccaacagtactggaagaaactggacacagtcaccagcatcccaggggagggcaaaacagccatgtcgtgccctgatgaagagcaattctgatcacagctgttactcactgagcaccagccaggcaccaggcaccccataaccacggcttcctgtgctcttcctccagagcctgtcgcagctctaggagggagctatacaatgatgtctttattagtgtcatcatgagaagcccaataagcagtatgccctaacagttagtaggccaggctctggagctaagctgcatgggttcaaatcccagctccaccattcagcctgcagagaccatgagcgagttacttaagccaggctctggagctaagctgcatgggttcaaatcccagctccagcattcagcctacagagaccatgggtgagttacttaagccaggctctggagctaagctgcatgggttcaaatcccagctccaccattcagcctgcagagactgtgggtgagttacttgagctctctgtgccaatattttctcacctataaggtggaggtgaaaataaactctataacatgacaagaactacttcacagtagttgcagtgaggattcaacgagatgaacatttagtacttgggacacagcagtggcccagtgtaaatgggctacttgtcataagccctaagtcacaggtcaacaaactgagaggcaaaagcacttggttgagcttgtgtatctagtgagtatggattcagggaccagattcccagccccacgaactgctaagcaaccccacctcctaaacacatgagtgccgattaacttcacagaaaaacacacaaggcaaagttcagcgaggtgaaattctccaagctataaagatcagggaagacttcctggaggaattcacccttgagcaaaatcctaaaggatcaatagtagctggcaaaaagaagcaggaggaagcgcattctaggtagaggagacagcctggacaaaggtctgagggaggaaggaacacaaggagtgcaggacactttcataactgcatgaacttcatagagatgggatcctttagcatgttctctgtgcacatgcttgaccatgttctttcacatgctttttgccacttgatctttccagcaactcagtgagagaagcaaaaaagtaagttgcatcctgctattgtctgaatgtttgtgtctccccaaaattcatcttttgaaacctaattaccaaagtgatattactgggaggtggggcctttgggaggtggtgagatcatgagggtggagcccccatgaataggattagtgcccttataaaagaggccctggagagctgccttgccccttccaccacatgagaacacagccagcaggtgcctataagcaagaaagtgggttctcaccagccatcgaatctgctggtgcattgattgcagacttcccagactccagagctatgagacataaatttctgttgtgtataagccat

SEQ ID NO: 10833 - DNA, 2408 bp, Homo sapiens
ggaaggagacatcgaagcagggcgaggcgcagagggcgttgcggactcatgccccagtcggcagtgcggggtcccaagccctgcagtgctacagctttgagcacacctactttggcccctttgacctcagggccatgaagctgcccagcatctcctgtcctcatgagtgctttgaggctatcctgtctctggacaccgggtatcgcgcgccggtgaccctggtgcggaagggctgctggaccgggcctcctgcgggccagacgcaatcgaacccggacgcgctgccgccagactactcggtggtgcgcggctgcacaactgacaaatgcaacgcccacctcatgactcatgacgccctccccaacctgagccaagcacccgacccgccgacgctcagcggcgccgagtgctacgcctgtatcggggtccaccaggatgactgcgctatcggcaggtcccgacgagtccagtgtcaccaggaccagaccgcctgcttccagggcaatggcagaatgacagttggcaatttctcagtccctgtgtacatcagaacctgccaccggccctcctgcaccaccgagggcaccaccagcccctggacagccatcgacctccagggctcctgctgtgaggggtacctctgcaacaggaaatccatgacccagcccttcaccagtgcttcagccaccacccctccccgagcactacaggtcctggccctgctcctcccagtcctcctgctggtggggctctcagcatagaccgcccctccaggatgctggggacagggctcacacacctcattcttgctgcttcagcccctatcacatagctcactggaaaatgatgttaaagtaagaattgcactcctgtccctctggccttccatctctcccgcccttgtgccccacaacctggccaacagtactggaagaaactggacacagtcaccagcatcccaggggagggcaaaacagccatgtcgtgccctgatgaagagcaattctgatcacagctgttactcactgagcaccagccaggcaccaggcaccccataaccacggcttcctgtgctcttcctccagagcctgtcgcagctctaggagggagctatacaatgatgtctttattagtgtcatcatgagaagcccaataagcagtatgccctaacagttagtaggccaggctctggagctaagctgcatgggttcaaatcccagctccaccattcagcctgcagagaccatgagcgagttacttaagccaggctctggagctaagctgcatgggttcaaatcccagctccagcattcagcctacagagaccatgggtgagttacttaagccaggctctggagctaagctgcatgggttcaaatcccagctccaccattcagcctgcagagactgtgggtgagttacttgagctctctgtgccaatattttctcacctataaggtggaggtgaaaataaactctataacatgacaagaactacttcacagtagttgcagtgaggattcaacgagatgaacatttagtacttgggacacagcagtggcccagtgtaaatgggctacttgtcataagccctaagtcacaggtcaacaaactgagaggcaaaagcacttggttgagcttgtgtatctagtgagtatggattcagggaccagattcccagccccacgaactgctaagcaaccccacctcctaaacacatgagtgccgattaacttcacagaaaaacacacaaggcaaagttcagcgaggtgaaattctccaagctataaagatcagggaagacttcctggaggaattcacccttgagcaaaatcctaaaggatcaatagtagctggcaaaaagaagcaggaggaagcgcattctaggtagaggagacagcctggacaaaggtctgagggaggaaggaacacaaggagtgcaggacactttcataactgcatgaacttcatagagatgggatcctttagcatgttctctgtgcacatgcttgaccatgttctttcacatgctttttgccacttgatctttccagcaactcagtgagagaagcaaaaaagtaagttgcatcctgctattgtctgaatgtttgtgtctccccaaaattcatcttttgaaacctaattaccaaagtgatattactgggaggtggggcctttgggaggtggtgagatcatgagggtggagcccccatgaataggattagtgcccttataaaagaggccctggagagctgccttgccccttccaccacatgagaacacagccagcaggtgcctataagcaagaaagtgggttctcaccagccatcgaatctgctggtgcattgattgcagacttcccagactccagagctatgagacataaatttctgttgtgtataagccat

SEQ ID NO: 10834 - DNA, 2448 bp, Homo sapiens
agctgtcccaggtggcccagctcagcaatggcaatgggggtccccagagtcattctgctctgcctctttggggctgcgctctgcctgacagggtcccaagccctgcagtgctacagctttgagcacacctactttggcccctttgacctcagggccatgaagctgcccagcatctcctgtcctcatgagtgctttgaggctatcctgtctctggacaccgggtatcgcgcgccggtgaccctggtgcggaagggctgctggaccgggcctcctgcgggccagacgcaatcgaacccggacgcgctgccgccagactactcggtggtgcgcggctgcacaactgacaaatgcaacgcccacctcatgactcatgacgccctccccaacctgagccaagcacccgacccgccgacgctcagcggcgccgagtgctacgcctgtatcggggtccaccaggatgactgcgctatcggcaggtcccgacgagtccagtgtcaccaggaccagaccgcctgcttccagggcaatggcagaatgacagttggcaatttctcagtccctgtgtacatcagaacctgccaccggccctcctgcaccaccgagggcaccaccagcccctggacagccatcgacctccagggctcctgctgtgaggggtacctctgcaacaggaaatccatgacccagcccttcaccagtgcttcagccaccacccctccccgagcactacaggtcctggccctgctcctcccagtcctcctgctggtggggctctcagcatagaccgcccctccaggatgctggggacagggctcacacacctcattcttgctgcttcagcccctatcacatagctcactggaaaatgatgttaaagtaagaattgcactcctgtccctctggccttccatctctcccgcccttgtgccccacaacctggccaacagtactggaagaaactggacacagtcaccagcatcccaggggagggcaaaacagccatgtcgtgccctgatgaagagcaattctgatcacagctgttactcactgagcaccagccaggcaccaggcaccccataaccacggcttcctgtgctcttcctccagagcctgtcgcagctctaggagggagctatacaatgatgtctttattagtgtcatcatgagaagcccaataagcagtatgccctaacagttagtaggccaggctctggagctaagctgcatgggttcaaatcccagctccaccattcagcctgcagagaccatgagcgagttacttaagccaggctctggagctaagctgcatgggttcaaatcccagctccagcattcagcctacagagaccatgggtgagttacttaagccaggctctggagctaagctgcatgggttcaaatcccagctccaccattcagcctgcagagactgtgggtgagttacttgagctctctgtgccaatattttctcacctataaggtggaggtgaaaataaactctataacatgacaagaactacttcacagtagttgcagtgaggattcaacgagatgaacatttagtacttgggacacagcagtggcccagtgtaaatgggctacttgtcataagccctaagtcacaggtcaacaaactgagaggcaaaagcacttggttgagcttgtgtatctagtgagtatggattcagggaccagattcccagccccacgaactgctaagcaaccccacctcctaaacacatgagtgccgattaacttcacagaaaaacacacaaggcaaagttcagcgaggtgaaattctccaagctataaagatcagggaagacttcctggaggaattcacccttgagcaaaatcctaaaggatcaatagtagctggcaaaaagaagcaggaggaagcgcattctaggtagaggagacagcctggacaaaggtctgagggaggaaggaacacaaggagtgcaggacctttcatgagtgcaggacactttcataactgcatgaacttcatagagatgggatcctttagcatgttctctgtgcacatgcttgaccatgttctttcacatgctttttgccacttgatctttccagcaactcagtgagagaagcaaaaaagtaagttgcatcctgctattgtctgaatgtttgtgtctccccaaaattcatcttttgaaacctaattaccaaagtgatattactgggaggtggggcctttgggaggtggtgagatcatgagggtggagcccccatgaataggattagtgcccttataaaagaggccctggagagctgccttgccccttccaccacatgagaacacagccagcaggtgcctataagcaagaaagtgggttctcaccagccatcgaatctgctggtgcattgattgcagacttcccagactccagagctatgagacataaatttctgttgtgtataagccat

SEQ ID NO: 10835 - DNA, 694 bp, Homo sapiens
aaagcgagtgccgggagagtgtgctatttagtgagctcagtccagcctcggtcttgagcattgactgtgggtcctctgctgttggggttctcgacttgcccaccagctgccttatctcaggttgagaaaggtagtgggaaccccattttgcaaatggggaaactcttggtgacttgaagtcacctggttaaaatggcacacaactttgaagctgcctgccattttaaccaagtgtgccagacataagtttctggagtgtgtatctcgtctatgtgacactccagtaccaggttcttcccacctcagggatcagtttatggaaacacctcagaattgagaccagggcttctcaatctgtgatttggggctggataaatattagttgtgaggggcgtgttgtgcattgtaggttggttagcagcgttctcggcctctacaccctctcagttgtgaaaaccaaaaatgtgtattgagatcagccctggttgagaatcaccaagctagacctctttgggttttgttgggcaatttaacggaactctggctatgccttttttgaggcagttgtagctagcttggttcattgaagctaggtttgaaatcattcataactaagttatgatgttaggaattcgacagtccatgcattgtttcatctgaaaaacaactactctaccttgcacgacaacacata

SEQ ID NO: 10836 - DNA, 191 bp, Homo sapiens
ataaagtttaacatgttaaccataaccattttctttcaacttcagacaggtaaatgagaccaagttgtgctgcatcatctttcttgcataaaccatacctataataatgtgcaattatttaaagcagaactcttgcaaagcaatgtaggtacagaattttgctgaagtttttgaaataaacttttttcaat

SEQ ID NO: 10837 - DNA, 556 bp, Homo sapiens
cctcaagtgatccgcctgctgcagcctcccaaagtgctgggattacagatgtgagccaccatgcccagcccttaagaccttctttgaatactcctttgtatttatcttgtggccttaattttgcttttggttaaggaaattagtgaatggggtttagcttcattcttcatttagaggaaaactgtaggtaatttattctgaaagtgtggtcagacggaatctaagagaacctgtttcccttggcgacgaaaaataatcagttgaatgtctgaataacaggaatccttttctgctccctatgggaaaaaagaaaccttgagttaatattttatgtaatcagtgcaatgtgctactaggtaatgagtgggaagtagatggagaatataggaaataatgcttggtctctgttctttagaagattacaaccacaggctgggcgcggtggctcacgcctataatcccaacactttgggaggctgaggcggatggaacacgaggtcaggagttcaagaccagcctggccaagatggtgaaaccccatctctactaaaaaaaa

SEQ ID NO: 10838 - DNA, 329 bp, Homo sapiens
tttttttttttgagacagggtctcactatgttgcccaagttggtctcaaactcctggcttcaagaaatcctcccaccttggcctcccaaagtgctggaattacaggtgtgaaccaccatgcctggccccagatgtcttaatttgttctgcaatctggaacccaactttcaacttcttatggaatatcatcacttggatgttccctgggtacatcaaaatccacatttacaaaattctgagcatatcatttttcttatcctccaatcaacttttttttttttttttttgagatggagtcttgctctgtcccccaggctggagtgcagtgg

SEQ ID NO: 10839 - DNA, 630 bp, Homo sapiens
ctgttcccccgcccactgcatgtatgatatagaacgagcaccattctagatgtattagagggaagtcagttcattatatatagcatatgtcttacagaaatcagggttagagagactagataatgcagaactataaaatatatggcaaagataaaatttcactgtttgctgagaagggtgtcttcctcctttcctccctttctctctccttcttttaatagcacaagcacaattgactatcatatgggataaaatgaatttgaatccttaggttactccatgtatgaaattcccccaaaattcaaggcttaggtgtaaaaatgaaaacaaaagtcttaaaagaaaatctgggctactatatataaaaaatgtatggattggcaggagcttcttaagcaaatctagagacccagaaatttaaatttttttttaaaaagacattatatcaaatgtagagtcttttgtccagtaaaaaaaaaaaaaaaaaaaaaaacccttaagtacataataacgtaatatcaatattcaaaatagacttggaagaaaatacctgaaatatatgcaacaaatatttgtcaataatagacaaagtactcttttaaacaagaaaaaaattgaaatgacaatagg

SEQ ID NO: 10840 - DNA, 466 bp, Homo sapiens
gctcgaccttgtgagaaatactcagaggtgtggaggggcaggccccttcaaagtgatctgcccgcctgagcctcccaaagtgctgggattacaggcgtgagtcaccgcgcccagccactatttggttttaatgtaaatttttaaagtactttagatctcacactcaatcagtatcctaaaaatgacatgcagctgcttgtgtgagtatatgtctggctgtaactaaaaggaaaaaaactccctaaagcaaatggttacaatgagtaattaactctatatgacaacctaaatatattttagacaaagccattaatctcttttggagaataattaattccaataatgctagaaaagatcttggaattgaggctcaggcaggtgacgtgacttgtcccaagtcatacagttaattaatactacacttggtctactgtgccattctcctgccacccccaaactcaaccac

SEQ ID NO: 10841 - DNA, 612 bp, Homo sapiens
  misc_feature (9)..(9): n is a, c, g, or t
tgggcgggnccacggcggaatggcagcaagccagagataatcattcaggtcttcgtgagctaaggccaaacaaacaaaaaacacttgctttgatggactgaatactgttattagaagtaaatatggaaaatgaaccagaccatgaaaatgtggaacagagcctctgtgccaagacgagcgaagaagagctgaataagtctttcaatctagaagcttcactttcaaaattctcttacatagatatggacaaggaactggagttcaaaaatgatctgattgatgacaaggagtttgatattcctcaagttgatactcctccaacactggaaagcatactaaatgagactgatgatgaagatgagtcttttattcttgaggatcctacattgttaaacattgatactattgattctcactcctatgatacttcatctgtggcaagctcagatagtggtgacaggaccaacttaaaaaggaagaagaaattacctgattctttttcacttcatggatcagttatgcgccattcacttttgaagggaatttctgcccagatagtgtctgcagctgaccaagtagatgctggttgcctacagacattgtacagtatag

SEQ ID NO: 10842 - DNA, 896 bp, Homo sapiens
  misc_feature (9)..(9): n is a, c, g, or t
tgggcgggnccacggcggaatggcagcaagccagagataatcattcaggtcttcgtgagctaaggccaaacaaacaaaaaacacttgctttgatggactgaatactgttattagaagtaaatatggaaaatgaaccagaccatgaaaatgtggaacagagcctctgtgccaagacgagcgaagaagagctgaataagtctttcaatctagaagcttcactttcaaaattctcttacatagatatggacaaggaactggagttcaaaaatgatctgggtctcactctgttgtccaggttggagtacagtggtgcaaacatggctcactgaagcttcaacctcctgggctcaagtgatcctcctacctcagcctcccaagtagctgggaccacagattgatgacaaggagtttgatattcctcaagttgatactcctccaacactggaaagcatactaaatgagactgatgatgaagatgagtcttttattcttgaggatcctacattgttaaacattgatactattgattctcactcctatgatacttcatctgtggcaagctcagatagtggtgacaggaccaacttaaaaaggaagaagaaattacctgattctttttcacttcatggatcagttatgcgccattcacttttgaagggaatttctgcccagatagtgtctgcagctgtaagtattttgttcttttccctcaactttgtaacctgcaatggcataatgaagtaggaatgagcatagaacaaaatacagcacttctcttggcccgaggcttaagaaaaatagaatctggctttcatggtttttgtgtgatgatttttgacttatgagacatggctacacgtcttgacagaaattagtgcagccatgaaaataaagtt

SEQ ID NO: 10843 - DNA, 516 bp, Homo sapiens
cagagactaacaggggacaacaagttgcccaggggactggcaatgtagacatctctgaaaaggtcaacttgacacaggctctgacagtcgacccacagctctgtcttctttgataaaaatcagataaacttaagactgctaattgatctgcagcctgtttaaatgttggccatgcatatcttcattgcatatgattaacacagaaagcaaatgaattgggtaagaaatgccagagtccagtgacagcagcttaaaaattggaaaaggacactagtggcctaaaaggctaggaaggatgttccccttatccatttccacttggcacatatccccaagtactaattatgaatgagactggaaaaataattgcacacactctgtacaaaatcacatgatacggacaacttttcttgcttgttgttatttccaaatagcaggagataaaccatatctgtagtgcaagcatgaggttagttttgataaaccagcaattattttacacggaaagaagagaaa

SEQ ID NO: 10844 - DNA, 273 bp, Homo sapiens
accattccaaaagatagagaaagaggtaatgctccctaagtcattctgtgaaaccagtatcgccctaattcgcaaaccaggaaaggacataagaaaaaagaaaactacagaccaatttccctgatgaatatagatgcaaaaatccttaacaaaatactagataaccaaatccaacagcccatcagaaagattatgcatcatgaacaagtgggtttcatcccagggatgcagggatggtttaacatatgcaagtcaataaatatggtacatcac

SEQ ID NO: 10845 - DNA, 555 bp, Homo sapiens
ctactgaccaaagtaagggtttgtattttttatttttatctccaggactgtccgctagtaatgtagttgctccaatgacaggcactacctaaaatgataaccacatggcagaacacctcattcaggatggccaagtcatgaacgtacgggttttgtggctgaatttttctcacttattagatatatataacgttctttcttatatatgttgaaagagtaccctgttatcttgacaagatctctataaagcaagaagttagaagagagaggggaggctgggcacagtggctcacacctgtaatcccagcactttgggaggccgaggtgggtggatgacttgaggtcagaagttcgagaccagcctggccaacatggtgaaaccccatgtctactaaaattacaaaaagtaaccagatgtggtagctcacatctgtaatgccagctactcaggaagctgaggcaccagaatcacttgaactcaggaggcggagattacagtgagctgagatcgtgccactgcatgccagcctaagcaacagagtgaaactccatctt

SEQ ID NO: 10846 - DNA, 301 bp, Homo sapiens
agtgcctgtgtttgcaaacactgggcgacactggcctttcaatgtgtgggactgctgatggaggcagaggtgagacagcaaagtcacctggtccacccccttcctcaagatgatctcagcacagcctgcagtgactgcctcggatgggaatgacagccaaatgctgtagagggcgtatttcagggagtggatatggtggtaaaggtatgctaaaaactcacattgtggacggagggaaacgaggcttggggtctatattgcagtggtctccaaacattttttattgtgtatctctctttcc

SEQ ID NO: 10847 - DNA, 459 bp, Homo sapiens
gcgagatacccaaggctcagagagctaaagtgacttttgcaaggttacaaagacaattagtggctgagcttgccttgaaacccaggtgccctacctcctgccttaaggtttttctagtctctttgcactgcctccctgccatgccacaccccactgcctagtgctacatcacaaagacctgtgaaaagtgaaacccagagcgttctcaagaaatggaggcacaaatgcacagttattgtttttcttgcaactgtgtacgtggggggcattaacattcacccaggagctgctgaaatccgctcaaccagaacaaggctggtgaggagagaactgaccaaatttgtttacagggggctaatctggctctgtctctcactccacacagcctgggagaaagtctaattacagcctgacagcccagagtgtctcatgggaagacgaatcttgaataaaagtatg

SEQ ID NO: 10848 - DNA, 424 bp, Homo sapiens
ttttttttttgagatggagttttgctcttattgcccaggctggagtgcaatgacacgatctcaactgactgcaacctctgcctcctgggttcaagcaattctcctgcctcagcctcccggatagctgggattacaggcatgcaccaccatgcccggctagttttgttttgttagtagagatggggtttctccatgttggtcaggctggtctcaaactcccgaccccaggagatccacccgtctcagcctctcaaagtactgggattacaggcgtgagccaccactcccggcctacaagcaattttagaatatttttatcacctcaaaaagaaatcccatagtcacttagcttccaatactcccatcctcttcattccaaggcaatcactaatcaatctactttctacctctagagatttgtctg

SEQ ID NO: 10849 - DNA, 270 bp, Homo sapiens
agtagaagaaaagaaataataaaataataaataaaataaaaatcagagcagaaataaataaatcaaactgaaatgaaggaaagaatacagtcatcaaaatgaaaacttggtgttttgaaaagacaaataaaattgaccaacttttagccagactaaaaaaaaaaaagagaagacccaaataaaatcagagatgaaaaggtagacattacagccaataccactgaaattcaaaggatcattaagtgactactgtgagcaactaactatatg

SEQ ID NO: 10850 - DNA, 413 bp, Homo sapiens
aagcacctttttttccattctcccatcaatggaggcagtttcatgtcctcagttgtaagagctgtcccaagctagcacctgggcttcatgtaacctcctcactcggcctccatctaatccctgaacccctcccccagccctgtatgccgcttttcagggcacaccctttctttctccttaggatctgagctctagaccttacactccagctaaagtcagaaaaatagttcccaaatgccattattctcattttttgtaaattttgtagcattttattccttcacacagacttccctaatatgtatcaaaagcccagtgatgatttttcttctcaatgctaaacatcctgacatgtaaaatattaataattacagcaataatttcagtttggactaaacatattgttttctaga

SEQ ID NO: 10851 - DNA, 399 bp, Homo sapiens
gggcagcagcaatgaggccttctggaggggtctgcacacacccctctggatctgtcctggtgatgtcctgctgggctgaacccctcccaccacctgctatcattccattcaccccctgaatgtcctgggcaaaacgtgtcaggccacagggaggaactttctgctggtggttccctaaagatcctctgatgtaggaagccactgcctgcaagtttaaagtcccagttttcagataagtatgagtttatacttgtttatatattttttccttagagtctctggttggctttctttttttcctccaatgggcaagaacttggacttttttttttctcttttctttccccaaaccctttgatgaaagcttcaggagcattcaactaatagattggctggtaa

SEQ ID NO: 10852 - DNA, 1240 bp, Homo sapiens
caccgtgcccggccccaggttttattttttaaaggtttgctttttccacaaaatttgaatctttcaggctaggaatttggatttggatttcagaagggttttgggtgcctgagggagctatcagggttttgttggtaatttacatctgtgtaaaaagtgaaataacgttgtcgtatttactaatgaggatgtgtttctgacattccacagtattcctcagtgagcagttctgtgaggcatttccatcttatctctgtaatgagaacacctacatttttgtggagacattggttgtcatatcttatgtacccatgagtcaaagaactgtgtatgcccttgcccttcgttgactgcaaaccctaaggcaagaaggcctgtttggaccactccctgccaactttgttttatgtttctcacccaaacttttcttctcacatactcattcatcttttaaaagattgctatatagttattgtgtatatatttggtggcttatcttaaacctttttggagacaggtaggatatacattattcagaaaaaaaaaagtaaaagaaatatccctagagcaatgtttttcaaactttattgacttgagctcactcaggcagtttaaaagacacccgtatacatttctgcatggaaaaaattaacttttgttttaacaaaaagagagggacaaaataatgtaaaatatactaaagtgtgtagacatattcagtacactaaagagctttattttcccgtaacatcagtggtaggggaaatggtaaggttttggataagaaccttagagaagacttactattttgggtcagttggccaatcttaaaatgtggggattttaaagaccatcttgttctgatttattcccagagacattatcagtaaactaaaagacaaactatattcaaaaacgaaatggtcagtgtgtttatcagtggactactctcattaaaagtgaggcttacataatagaaaaaatatcactctaggaattctaaggggaagaaaggaaaactgtggggctagaggagtacttttagaaaatatcacagaaatttctggttaaaaagtactactaacatttcctactaatgttagtgttcagttttatctgaaaatcctcagtgatacatatttacattttttcctaaggcagccattgcctatttgggcaattataagagtcagggtgatctcttactttctcttaagttcttccataaaattgaaaccta

SEQ ID NO: 10853 - DNA, 758 bp, Homo sapiens
gagggcggtcgaccttatactagtaattcccaattatgggcagtgttgtccctcggggatgtttgacaatatctggagatgcttttggttgtcaaaagattgagaaaccctgctgttggccaggcatggtggctcacacctgtaatcccacactttgggaggctgaagtcaaaggattgcttgaggccagatattcgagaccagcctgggcaacatagtgagaccctatttttagaaaaaatagataaataaaataaactacaggtcacgtggtggtatgcgcttgtggtctcagctacttgggcagctgaggtcacaagattgcttgagcccaggagtttgagcctacagttagacctgtgattgcaccactgccctccagcctgggtgacagagcaagaccctgtctcaaaaaataaacaaaaaaaaaaaaaccctgctctatactgttctgtgtggtcctatgggagtcctcaaatgcagcagcgttgatattaacagctggcatttactgagcatttacttggtgcttggatttgttctaaacacttccacgtgttttaacttattttatccttgcagcagtcctgtgaggtaggagttaatatttccctcattttggagatacagaaattgaggcccagagaggttgagtcagttgccaaaagtcacacagctaatacatggcagcattggcattgaacaaggcagtctggctcaggagctcacgctgttatccactgtgctacgcagtatgt

SEQ ID NO: 10854 - DNA, 643 bp, Homo sapiens
aaggagaaagataggggtatatccagccaggcgtggtggctcatgcctgtaatcccagcactttgggagggcaagactggtggatcacctgaagtcaggagttcgagaccagcctccagcctgtaaattttgtaaagatacaaaaattaaccaggcatggtggcgtgcacctgtagtcccagctactcgggaggctgagacagaagaactgcttgaacctgggagatggagattgcagtgagccaagatcacaccactgccctccagcctgggtgacagagcaagaccctgtctcaaaaaataaacaaaaaaaaaaaaaccctgctctatactgttctgtgtggtcctatgggagtcctcaaatgcagcagcgttgatattaacagctggcatttactgagcatttacttggtgcttggatttgttctaaacacttccacgtgttttaacttattttatccttgcagcagtcctgtgaggtaggagttaatatttccctcattttggagatacagaaattgaggcccagagaggttgagtcagttgccaaaagtcacacagctaatacatggcagcattggcattgaacaaggcagtctggctcaggagctcacgctgttatccactgtgctacgcagtatgt

SEQ ID NO: 10855 - DNA, 517 bp, Homo sapiens
ggtctgcagggagctgtcatgtcctctgataacaatgccttcttctggaatacctcctgaaggacccctggaggctgtttcacagttaaagttttttctttttaataagcagaaggaatacactaatgattaaaagtaaatatataaaccagttacatagtcatttgttatcattaccaagtattatgtactgcacataattgtatgcactgtacttttatatgactggcagcacactaggtttgtttacaccagcatcaccacaaacacatgagtaatgcattccactacagctacaacatcaactgccaatagcaatttttcagctccattataatgtcatgagaccatcatggtatagacagtcagtcatttacgaggtccttcgttaaccaaaatgtccttatgtggtacatgactctctatgcacgtgtaaacatatatctgtgtgtctttttgcaagcttaaaaaaaaagtatgaaaggattcccactgaaaatccccccgagaagttcag

SEQ ID NO: 10856 - DNA, 378 bp, Homo sapiens
gtgaacgacggcaggaatcgagctcggtaccaccactcctatagatcagattggactataattgtatgcactgtacttttatatgactggcagcacactaggtttgtttacaccagcatcaccacaaacacatgagtaatgcattccactacagctacaacatcaactgccaatagcaatttttcagctccattataatgtcatgagaccatcatggtatagacagtcagtcatttacgaggtccttcgttaaccaaaatgtccttatgtggtacatgactctctatgcacgtgtaaacatatatctgtgtgtctttttgcaagcttaaaaaaaaagtatgaaaggattcccactgaaaatccccccgagaagttcag

SEQ ID NO: 10857 - DNA, 182 bp, Homo sapiens
atggcgggaagatataaaaaataaaaacatatccaggcttaaacacaagaaaatgaccactaggtgggctggaatttgtgaagaatacttaataagacagaatgcatttgcagtgagcttttaagtgtgagttaggatcttgagagttaaaggagaagaaagccttcaaagtgaggagcagg

SEQ ID NO: 10858 - DNA, 375 bp, Homo sapiens
actttctacagcaagtctcctgtgtgagaccaggacctcttcccagcattctaaatgcaagacatctcaacagcccagcatgtcagagtggcatcccgtaggatgtctgctttctctcatcagtcctggagtcgcacctcagagaatgcctgtgagcagcatccgacagagactaccaacaaactggcccaggcatctggcaccagagaaaaatgaactcccagtagacagttccaccacgtgacattttcatgattgacagccctctcccactttccctagcctggcttacatgttgagaaggtaggattccccattacgagaggaggtggtctctgagcaaccacagtgatgtttccattctggagacttact

SEQ ID NO: 10859 - DNA, 342 bp, Homo sapiens
gaatgagctggggcagagtgaattgggcagccttccatcttgacagcacaccaaaatgtataaattagcaaaagcccatctttccctaatgccactaagctgtcagtttctggaattatcatcattattaaattcataatggttttaatgaaggtgtcatccaaactgacactttgaaaataaagtgagatgatgcctaaattggaggcttggaatgaccttagaaaactgctccaggaaacttgagaatgtcccaattacttaaagaactctgagtcagctacatggctcattccattcatttgctttgcattggagagatttatttggattgacaccggt

SEQ ID NO: 10860 - DNA, 632 bp, Homo sapiens
ttctagttaattaggtttttttcaaatataaaactacatcatctgcaaacaaagatataatttgacttctttctttccaatttggatgccctttatttttttctcttgtcaaattgttctggctggcacttccaatactatgtcgaataacagtggtgaaagtatgcatcttttgtgcctcttcttttgtcttcttcaggtgcagacaccttatcagaatgcccttgggtttaggttcccaatttcacaaggtaattcatcctcatacatcctattgtcttttcctggtcctaggtttcagaactgtctgggaagaccacagatgcctatggtggccatgtctcttggaatgtctagggaatgacagctactgcatcacatcctcatggtgggcagcctgaggtatagggtagaggcctcacgggagcagctgagtgccctgatgctaaagcactcttcttgtttacttttcatccaaaacaccaaatccttatggcattaagattttctttctccaaatccagtttccatgttttagagacacattgctggtcagccaatggaaagctgatattgatgggaaaggcagaaataattcctaccatctggattttttcagaattgtggaaggg

SEQ ID NO: 10861 - DNA, 572 bp, Homo sapiens
tttcttttttcttgacatggagtctgactctgttgtccaggctggagtgtaatggcatgatctcggctcactacaacctccctcctgggctcaagcgattctcctgcctcagcttcctgagtagctgagattacaggcacccacaaccacccctggctaatttctgtacttttagtagagatggggtttccccatgttggccaagttggtcttgaactcctgacctcaggtgatccgcccgcctcagcctcccaaagtgctgggattacaggagtgagccaccgcgcccggctgaatttcatcatgttttaagaaagtttactaatttgtattgggctgcattcaaagccctcctggcgcgcacgcaaccagcaggccacaggttggacaagcttgctctagagcatagcctcaaactatcacccagccaaagtgtcactcaagtccagaaacaagggcaaacactggcaaatgggaaaaaacattcagaaaataggacactgacattatggagggaaaaaaacaggagtccagccaaataagagataaaatactctggattggggccggat

SEQ ID NO: 10862 - DNA, 703 bp, Homo sapiens
gcagtttttgccattggaagctgaggcgcaatgaatattcttgtaatgtgtctcttggtgtaaatatgcatgaagtttgtaactagacgtagaattgtagcagttctcagaacgtggtctctagaggatgcctgggtatcctaaaaacctattcaagggtttaatgaaattaaaatgattttcataataatgccaagatgttaaatgtctttttcattgagttgacatatgcacaaatggtacagaagtaatagtgagttaaacggctggcaccttagcacaaatcaaagcagtaatgctggttgtagttgtgatcattgtattctttttctttttcttttcttttttttttttttgagacaaggtctcactttgttactcaggttggagtgcagtggcatgagcacaatcactgctcactgcggcctcggtctcctgggctcaagtgatcctattgttttctttctcgtcatgtacttccaggaaaagaaaaaagccaattcgagtcacttattcttttgattctttttcgtagcaaagcatcaatgcattttctaaatgattgaattcatttaaattcgggaaacatttactgagtgcctatggaattctgggatatgagtgtatgtttaaggcagtgtgatttccagttaccatcctttctgttctaaacacgattgtgtcatattaaaatataaaaaga

SEQ ID NO: 10863 - DNA, 1054 bp, Homo sapiens
tatttatttattgagtcaatttgttcaggtaagtactggggggcttcataagtcatgaggatgtttttatatataaatgtagcaaacatacattacagttcttactgtgtaatcgatgctccataataattcacaaatattcctgctggagcttagtttgtaatttcaagtcagaaatgaaagatatcagtggtgaagaaataagattgattcttcatatggagtggacattttttccagactataaaactgaatcttgctgaatttaaagagaaattctggccgaggcagatggatcacctgaggttaggagtttcagaccagcctggtgaaacccggtctctactaataaactacaaaaattagctgattgtggtggcatccacctgtagcccagctactcaggaggctgaggcagaagaattgcttgaacccaggaggcgaagattgtggtgagccgagattgtgccattgcactacagcctgggtgacagaatgagactcataaaaaaaaaaataaattctgcttcttttattttctacttctcttcagatttgtttctcgtatgtattttccaactatgtatgcatcacagcccttctttttctgagttatagctacagttttctgactgttctcttcacgccatttcatttcgcctggtattttgtagattttgatgacaaaattctatttttagtgcacttaaaaatggattttaactggtgagttcgcttatcaatataacattcagattagttaattaagataaaagccaggtgtggtggctcacgcctctaatcccagcactttgagaggccgaggcaagtggatcacttgagctcaggagttcgagaccagcctgaccaacatggtgaaaccccgtgtctactacaaatacaaaattagccacatgttgtggcgcatgcctgtaatcccagctactcgggaggctgatgcgggagaatcgcttgaacccgggaggcagaggttgcagtgagccgaaattgcgccattgcactccagcctggacaagagcaaaactctgtctca

SEQ ID NO: 10864 - DNA, 1163 bp, Homo sapiens
  misc_feature (1163)..(1163): n is a, c, g, or t
tatttatttattgagtcaatttgttcaggtaagtactggggggcttcataagtcatgaggatgtttttatatataaatgtagcaaacatacattacagttcttactgtgtaatcgatgctccataataattcacaaatattcctgctggagcttagtttgtaatttcaagtcagaaatgaaagatatcagtggtgaagaaataagattgattcttcatatggagtggacattttttccagactataaaactgaatcttgctgaatttaaagagaaattctggccgaggcagatggatcacctgaggttaggagtttcagaccagcctggtgaaacccggtctctactaataaactacaaaaattagctgattgtggtggcatccacctgtagcccagctactcaggaggctgaggcagaagaattgcttgaacccaggaggcgaagattgtggtgagccgagattgtgccattgcactacagcctgggtgacagaatgagactcataaaaaaaaaaataaattctgcttcttttaaaaaaaaaaaaaaaaaaaaaaaaaaaaaaaaaaaaaaaaaaaacaacaaaaaaacaagaaaaaacaaaacaacaaacaaaagcaaacaaaccgcaagcaaaaaacgacagcggcgggcggggccacaaaatatacttctccagcgggggggcccacaacatccacgccaccagtctataattgtcagaacagcgagccactcacatgagtgatttcatcaacagccggcagcaggcgccgacacacaaacgctatacacagcaaaccaactaccatgcgctcagtgcgacagccccttcggagcgggggtggaaaagaaggcacacccaaccagaagatagagacgcgacggggtaaaaaaacacactaggtaggtgttaaggagggcaacacccgatcgatgcgcttgcgagagacgttgcgtgccggtctttccacaaatatgccgtgcgcggacgaaaataaacgaaaaaaaaatcaagaaaagagaggcagagaggcagcgacaagcgtagaagagaagtacaccagaaaacacgagaaacgcaagcgaaagacaaagcagactacgcaatcgacacatagtagagagatgtcgccacggtcaacaagaacgacactacgcacn

SEQ ID NO: 10865 - DNA, 703 bp, Homo sapiens
agcgggcggcgcgggcccgcagccgggcgccctgctcagccagcgccagcggccgccgcacccagccgcgccggcgaggacatgggcagccgcggcgcgcccaccccccgcgccgatgtgaattattaaaaagaaaatggcccaacggagcactgtatttccttctcgtgtcaccaaggaaaggtataatatatggaaaatatgcatctaaggcgagtgagaaccatgccccgacacagccagtccctgaccatggcaccatactcatctgtaagcctcgtggagcagctggaagacaggatcctctgccatgagaaaaccaccgccgccctcgtagagcacgcctttcggattaaagatgacattgtcaacagtttgcagaaaatgcaaaacaaagggggaggtgaccgcttggccaggcttttcttggaggagcatatcagaaacataactgccatagtgaagcaacttaatcgggatatcgaggtactccaggagcagattcgtgctcgggacaacattagctatggaactaattctgccttaaagaccctggagatgcgccagctctccggtttgggagatcttcgaggaagagtggcaagatgtgatgccagcatagctagactttctgcagagcacaaaacgacctatgaggggctccagcacttgaacaaagaacagcaggctgccaaacttatct

SEQ ID NO: 10866 - DNA, 846 bp, Homo sapiens
agcgggcggcgcgggcccgcagccgggcgccctgctcagccagcgccagcggccgccgcacccagccgcgccggcgaggacatgggcagccgcggcgcgcccaccccccgcgccgatgtgaattattaaaaagaaaatggcccaacggagcactgtatttccttctcgtgtcaccaaggaaaggtataatatatggaaaatatgcatctaaggcgagtgagaaccatgccccgacacagccagtccctgaccatggcaccatactcatctgtaagcctcgtggagcagctggaagacaggatcctctgccatgagaaaaccaccgccgccctcgtagagcacgcctttcggattaaagatgacattgtcaacagtttgcagaaaatgcaaaacaaagggggaggtgaccgcttggccaggcttttcttggaggagcatatcagaaacataactgccatagtgaagcaacttaatcgggatatcgaggtactccaggagcagattcgtgctcgggacaacattagctatggaactaattctgccttaaagaccctggagatgcgccagctctccggtttgggagatcttcgaggaagagtggcaaggtaggtgttcaaatgttggggtctctgctcatcaaaaaccattttctataaactccattgtagtggggaatatattaatgaagccccaaagcaaatggcttgcattcctttagtacattccctccctgctttggccataaaatccagtggtaggagttaaacctggttgtgagggtgccatgggtttcttttgttacgcaattggtgttgtcttcctgggaagaaatgatgggagaactca

SEQ ID NO: 10867 - DNA, 1359 bp, Homo sapiens
agcgggcggcgcgggcccgcagccgggcgccctgctcagccagcgccagcggccgccgcacccagccgcgccggcgaggacatgggcagccgcggcgcgcccaccccccgcgccgatgtgaattattaaaaagaaaatggcccaacggagcactgtatttccttctcgtgtcaccaaggaaaggtataatatatggaaaatatgcatctaaggcgagtgagaaccatgccccgacacagccagtccctgaccatggcaccatactcatctgtaagcctcgtggagcagctggaagacaggatcctctgccatgagaaaaccaccgccgccctcgtagagcacgcctttcggattaaagatgacattgtcaacagtttgcagaaaatgcaaaacaaagggggaggtgaccgcttggccaggcttttcttggaggagcatatcagaaacataactgccatagtgaagcaacttaatcgggatatcgaggtaaggtttgtgaaagtcaggtggcctatgtccctttccacagaattgctccatgtcaggaggtcacccacatctaactcctacctcccaggcagtactgcatttagaacaaagctgtctgtcttgtctattcttaatgatcgccaaggagacagcttgcagaaatatcctaattaaatttattccagtgtttgataacagttactgttagtgttatgtttaatctaaatttaccttgctgattattaaatgattttattttgtttggctcttaatgaagagagagaagaactagtcgaatagtttcactctataatctttcatatctttgaagacagctattaagtcaattactaaggtcagactctgttgcttcagattaaatgtttctaggtcataatgattatatgtaatacagtttattactcaaacaatttaggcatttggattgctcctcagactcccctttttactgctgtagttttctttgaaatgagaccaataaaaggccaatattgtctatttttagaattggtagatttactgctatttattgagcaatcacagggaccacacagtttagttcagaaagcttcagatcatttagggcttgggtttccctcactacgcaatgttcatatctttcacatgtaatgactgaatatatgaatactaatagatatatggctagattaaggaaaacttttgcttcctgtgatggagattatatctgaattatgcttcctaaaattaaacctcatttcttttttttccattgtcagatttgtatgtatgtatttattttaaccgctttattgagatataatgtaaatgtcacaaaaagtgtaaaattaaatgatttttagtaaattt

SEQ ID NO: 10868 - DNA, 749 bp, Homo sapiens
agcgggcggcgcgggcccgcagccgggcgccctgctcagccagcgccagcggccgccgcacccagccgcgccggcgaggacatgggcagccgcggcgcgcccaccccccgcgccgatgtgaattattaaaaagaaaatggcccaacggagcactgtatttccttctcgtgtcaccaaggaaaggtataatatatggaaaatatgcatctaaggcgagtgagaaccatgccccgacacagccagtccctgaccatggcaccatactcatctgtaagcctcgtggagcagctggaagacaggatcctctgccatgagaaaaccaccgccgccctcgtagagcacgcctttcggattaaagatgacattgtcaacagtttgcagaaaatgcaaaacaaagggggaggtgaccgcttggccaggcttttcttggaggagcatatcagaaacataactgccatagtgaagcaacttaatcgggatatcgaggtactccaggagcagattcgtgctcgggacaacattagctatggaactaattctgccttaaagaccctggagatgcgccagctctccggtttgggagatcttcgaggaagagtggcaaggatgaactccagtctccttagtgtgatccttggtgatgacaccctgttgactccctcttctctctctacccttgcactgtacctttcagcagtgatcaacttttttgttagtccctgaataaaccatgctcttctattgctcca

SEQ ID NO: 10869 - DNA, 447 bp, Homo sapiens
aggaattggcttgtgtgattatggaggccaagaaatcccatgatctgagggtccaagaaagttggagatgtaattctcgcctgagtgcagaggcctgagaaccaggggagctgatgaatctaaaaaaaggagagagctcaggtacatacacagagaattaaacagtgcttaccatggtcaggggttggggggaagaaatggggggatatagatcaaaggatacaaaatagatatctaggatcaacaaggccagagatctaatacagaacatgaggactaaagttaacaaaattatatttatcagggagttttgttaagtaattagattttaactgctcttgtcacacacacaaaaaaggtaactcttttactatttgtgtcctataacatcatgttgtgaatctcaaatatgtgaaataaaatttattgaagaaaatttaaaaggct

SEQ ID NO: 10870 - DNA, 368 bp, Homo sapiens
caaaaggaagaaaaaagtcatgagtatattaattgtggtaaaagaagaatttgaaaaaatcgaacaatcttccatgataaaaaacactcagcaaactaggaatagaagaaaactatctcataataaaaggcatgtatgaaaaatacactgtgagtaacataatggtgaaagactgaaagcttttcctcaaagaaaaaaaattgcaagaatgcccattttcaccacttctattcaacatagtattggaaattctagccagagcagttaggtaagaaaaagaaataaaactatcccaaatttaaaagacagtagtgaaagtatctcttttcacagatgacatgatcctatatgttgaaaaccctacagat

SEQ ID NO: 10871 - DNA, 271 bp, Homo sapiens
ctgctgttgttaagcatgcctcagattcactctccttcacagtgcagctctgtctttccagcagacagtttccatccaaaggcaaagtgaatcttagaaaccgggaaaaaaagactctaaaagatgacatttaaaatataatagtaagatctaaccaaacatcagactcttcttgtgttgccttaaaggacacacacacacacacacacacacacacacacacacacacgctttctctctctttcatgtagtgaggggggaagagctggct

SEQ ID NO: 10872 - DNA, 452 bp, Homo sapiens
ctctggctaaatcttaaaaacacatctacttctatgccacagtatttgtcaataatctggggacagagaaaaagacattctgaaataaggggtcagagctgtagcagaaaatgtacatccttatttttcaggaatttatagagaaaggctactgttatgtgtgatgatacaaaccccagtaagagaggccaggctcttgcctataatcccagcactttgggaagctgaggcgggagaattatttgagcccaggagttcaagaccagcctgggcaacatggggagaccctgtctctacaaaaagttagccaggtgtggtagcgcatgcctgtggtcccagctactcgggaggctgaggcgggaggattgcttgagcccacctcaaggtgggtgcagtgagccatgatcgtgccactgcactcctgcctgagcaatgaaggaagaccctgtctc

SEQ ID NO: 10873 - DNA, 454 bp, Homo sapiens
gaacaaactatgagaaccacttccagccactgcttctgcacacttctctgctaagtgagtctctgctgtgtgagtctcattggtaaaactaccctgatctaacattctgttacctcctttgtggtccaacactccaagagtccatggcctcagacgcccctgggtttctgctgatgtaaattggcaaaaacttgcattcagtgtgtatgtggctcctcttgggtctcactgtgtgtttatccctctgcacccaactctagtcatggctctgggaataatgagggtcggtggaggtggatctcaagggagatctgtcatcttgcaaggctgtttcctcaagtgaagccatcacagatctttgggcacagttttactcacctcagactctaaggaagggtcacttctgcttacagggagactcaggaaggtctaatgttcaggggactcagagtca

SEQ ID NO: 10874 - DNA, 361 bp, Homo sapiens
ctgggactacaagcacccaccaccatgcccagctaatttttttgtatttttagtagagacggggtttcaccgtgttagccaggatggtctggatctcctgacctcgtgatccgcccatctcagcctcccaaagtgctgggattacaggcatgagccaccacacccagctgattattttccattataccaccagcctctttagctcacgtgccaatgtgaattcaaggccctaacagatggtcaaccacaaggtggattttcagaacacacatgaaaaaaattccttccactataactttttttttttttaagatggagtctcactcttgttgcccaggctggagtgcaatggtgtgatctc

SEQ ID NO: 10875 - DNA, 924 bp, Homo sapiens
cacaactcaacccttccaaacttttttcttcccagcaaggaaggtgaaagcccatccttctgtcttctcttttcttcagctgtgggaccatccacccaggcttcctacatacaattcagcccctccctgtccctccttccactcctccagttcaggtgcattttctcatctctatcttgatttctgacatagctcctgagtggtccagctgccaaaagtcttactcttcccatatcctcttaccatctgtctgaaattcaaatctgactgtgtcattccctttctgagacttaccatcaccatagggatgccattccataacatctgcaatcccgaccagatgttccattatcaggcttccatatttgtcattgctatctcccattatgcccggcattgcactttgtacttgagtaatatagaactatgtgtagttttcagaaatatcatgctgttccatacctggtgcctttggttacaattttttcctctacctataaaactctaccccagtgattttcaaccagggacaattttgtcccttgaagagacagttggcaacatctgcagacatttttgtttgtcataacttggggaggggtgctactggcacatagtgcatagagtccaagaatgtcacccttccataacaaagaattatctggcccaaatgtcaatattgccaaggttgattaaccttcctctacctcttcatttccagtaggataatttctactttccgattatgatttaggtaagactttctcttctttagcaaattgttcatgatccttccttttgtaggattggggaagtagccctttgctgttctatgaaagtgttctctgtgtatacctataccatattttcataggccatatgttattataattttttatttttaataaagaaaatacaagtgtt

SEQ ID NO: 10876 - DNA, 952 bp, Homo sapiens
  misc_feature (624)..(624): n is a, c, g, or t
cggtccggaattcccggatcaagaggagaggcgaggcggggagcgcaagcggcggcggccactgccacgtattcccggcagtggtggcggcggcggcggcggcgcccgcgggcaggaataactcaagtcacctgtactggaaatcagtttgctgaaattaatcaacgattcttgaagttgaagaaaagttgttctctctacaggaggttccagccttggcaagaggagtgtggcccttcctggaatccctctggacacaccctcctagcatcctctaggaaagatgcggcagctcaaagggaagcccaagaaggagacctccaaggacaagaaggagcggaagcaagccatgcaggaggcccggcagcagatcactacagtggtactgcccacgctggccgtggtcgtgctcttgatcgtggtgtttgtgtacgtggccacgcgccccaccatcaccgagtgagccccgcagccggccgcggaccccatcggcagggagaggaggcgcgggagggggacgcaaacaaaaaatggctttcatattcagagatgttcatgttgctgagctgtaagcaggagcaccctgtcttctctggtctttgacttgattaaagtatctccgcntttcttgggagggaataggggatgttttatcagtgaatgtgccatacaccttatggtccacttcatgtgcctttcagacttcaaagcgcgcgcgcatgtgtgtgtgtgtgtgtgtgtgtgtgtgtgtgtgcttctttttctctcctaaaaatcgataagtagctccacctgaagagggatggaacctctgggtcaggaaacagctggaatccacactcacctcattcccattgtttggatcatgcctctttccaacacgtgttcacaatctccaaagggactgtatttcttctctgtgcttaatgtgatttgaaatatgttgaatcaa

SEQ ID NO: 10877 - DNA, 992 bp, Homo sapiens
cggtccggaattcccggatcaagaggagaggcgaggcggggagcgcaagcggcggcggccactgccacgtattcccggcagtggtggcggcggcggcggcggcgcccgcgggcaggaataactcaagtcacctgtactggaaatcagtttgctgaaattaatcaacgattcttgaagttgaagaaaaggaggttccagccttggcaagaggagtgtggcccttcctggaatccctctggacacaccctcctagcatcctctaggaaagatgcggcagctcaaagggaagcccaagaaggagacctccaaggacaagaaggagcggaagcaagccatgcaggaggcccggcagcagatcactacagtggtactgcccacgctggccgtggtcgtgctcttgatcgtggtgtttgtgtacgtggccacgcgccccaccatcaccgagtgagccccgcagccggccgcggaccccatcggcagggagaggaggcgcgggagggggacgcaaacaaaaaatggctttcatattcagagatgttcatgttgctgagctgtaagcaggagcaccctgtcttctctggtctttgacttgattaaagtatctccgctttcttgggagggaataggggatgttttatcagtgaatgtgccatacaccttatggtccacttcatgtgcctttcagacttcaaagcgcgcgcgcatgtgtgtgtgtgtgtgtgtgtgtgtgtgtgtgtgtgtgtgtgcttctttttctctcctaaaaatcgataagtagctccacctgaagagggatggaacctctgggtcaggaaacagctggaatccacactcacctcattcccattgtttggatcatgcttctttccaacacgtgttcacaatctccaaagggactgtatttcttctctgtgcttaatgtgatttgaaatatgttgaatcaaagtgaaatatttattttttgaataaaggagataatagccttaaaaaaa

SEQ ID NO: 10878 - DNA, 1990 bp, Homo sapiens
ggctagtcacacatgcatggaagctggtgatgcagaatgctggggggtggcgagttcatctggagactgtgccagcagccacatctagtttttgggggtggtcatggtggctcggcacctcctgctccagtgcccatgtccagtgctgacggtggtgatgcaggctctggcatcctcacactgggagtgtgagttgggctccagttatggcagcacagcataatgtcctgcccattttctgagcctggttctttggcttttctgggaatcagtgagatgccaaaggcctttaagtaaactcgatttaaatcagctgaagtctgtttcatctgcttaaagctaagaagccgacttttatagagatgttcctctgtagttatccaaacatttgtattcattcttctggcccctgaaagttctacttcacctgttaggcacctccgtgagctacagaattaacaggagaatcccaggttgagtgggtggcaggactgtgggctcagccgtctcccttcattattactgtgacccgggtctccatcatgccccctagacggtgacctctgtggggacacaactgagtccttcatctctatcctcagctccttgagtaatgcttggcacacggtgggtgcttgggaaggtttggatgaatgggccaaggaaccaacaaagagatgagagaagttgatgcctgtgggctctctgcagccttaatgaggctggcctggcttgggcaggaagggggctacgtgcctggagactgcaggctgcctgcagttccatgctggagatgggctggggagatcatggaacttagagcaggaaagcaagtagctagagccacgaaagggagagccgctcctctgagtggaggcggcgtagttggtgcttcccaatcctttcacctcatggcatgtacagaacacagtattatttgtctggtacccagggctttgtccagctggcgctggagcggaggcccctctcacagcacaccggtgacccagtgcccactacttagagcgctgatcccaagagaacttagagcctggtgtggcctctgttcttagccctttgtcatgtaagttgcagatatttttcctagttgtgtatttgcctttaagtgatttattttttcttctatttggtttattctctactatcacagttgttctctctacaggaggttccagccttggcaagaggagtgtggcccttcctggaatccctctggacacaccctcctagcatcctctaggaaagatgcggcagctcaaagggaagcccaagaaggagacctccaaggacaagaaggagcggaagcaagccatgcaggaggcccggcagcagatcactacagtggtactgcccacgctggccgtggtcgtgctcttgatcgtggtgtttgtgtacgtggccacgcgccccaccatcaccgagtgagccccgcagccggccgcggaccccatcggcagggagaggaggcgcgggagggggacgcaaacaaaaaatggctttcatattcagagatgttcatgttgctgagctgtaagcaggagcaccctgtcttctctggtctttgacttgattaaagtatctccgctttcttgggagggaataggggatgttttatcagtgaatgtgccatacaccttatggtccacttcatgtgcctttcagacttcaaagcgcgcgcgcatgtgtgtgtgtgtgtgtgtgtgtgtgtgtgtgtgtgtgtgtgcttctttttctctcctaaaaatcgataagtagctccacctgaagagggatggaacctctgggtcaggaaacagctggaatccacactcacctcattcccattgtttggatcatgcttctttccaacacgtgttcacaatctccaaagggactgtatttcttctctgtgcttaatgtgatttgaaatatgttgaatcaaagtgaaatatttattttttgaataaaggagataatagccttaaaaaaa

SEQ ID NO: 10879 - DNA, 847 bp, Homo sapiens
cgcccgctctgtgccaagccctgagttatacagcttcctactccatcctcaccacggtcccgcgaaggaggttccagccttggcaagaggagtgtggcccttcctggaatccctctaggaaagatgcggcagctcaaagggaagcccaagaaggagacctccaaggacaagaaggagcggaagcaagccatgcaggaggcccggcagcagatcactacagtggtactgcccacgctggccgtggtcgtgctcttgatcgtggtgtttgtgtacgtggccacgcgccccaccatcaccgagtgagccccgcagccggccgcggaccccatcggcagggagaggaggcgcgggagggggacgcaaacaaaaaatggctttcatattcagagatgttcatgttgctgagctgtaagcaggagcaccctgtcttctctggtctttgacttgattaaagtatctccgctttcttgggagggaataggggatgttttatcagtgaatgtgccatacaccttatggtccacttcatgtgcctttcagacttcaaagcgcgcgcgcatgtgtgtgtgtgtgtgtgtgtgtgtgtgtgtgtgtgtgtgtgcttctttttctctcctaaaaatcgataagtagctccacctgaagagggatggaacctctgggtcaggaaacagctggaatccacactcacctcattcccattgtttggatcatgcttctttccaacacgtgttcacaatctccaaagggactgtatttcttctctgtgcttaatgtgatttgaaatatgttgaatcaaagtgaaatatttattttttgaataaaggagataatagccttaaaaaaa

SEQ ID NO: 10880 - DNA, 858 bp, Homo sapiens
cggtccggaattcccggatcaagaggagaggcgaggcggggagcgcaagcggcggcggccactgccacgtattcccggcagtggtggcggcggcggcggcggcgcccgcgggcaggaataactcaagtcacctgtactggaaatcagtttgctgaaattaatcaacgattcttgaagttgaagaaaaggaggttccagccttggcaagaggagtgtggcccttcctggaatccctctggacacaccctcctagcatcctctaggaaagatgcggcagctcaaagggaagcccaagaaggagacctccaaggacaagaaggagcggaagcaagccatgcaggaggcccggcagcagatcactacagtggtactgcccacgctggccgtggtcgtgctcttgatcgtggtgtttgtgtacgtggccacgcgccccaccatcaccgagtgagccccgcagccggccgcggaccccatcggcagggagaggaggcgcgggagggggacgcaaacaaaaaatggctttcatattcagagatgttcatgttgctgagctgtaagcaggagcaccctgtcttctctggtctttgacttgattaaagtatctccgctttcttgggagggaataggggatgttttatcagtgaatgtgccatacaccttatggtccacttcatgtgcctttcagacttcaaagcgcgcgcgcatgtgtgtgtgtgtgtgagtctgttagattagtatctttatttatctttatactatatattctactactttatcaagactcttgtcagggtttcttgtaatctatctagttttattaattacatactataaccttactgtactaaggtactaatt

SEQ ID NO: 10881 - DNA, 895 bp, Homo sapiens
  misc_feature (548)..(548): n is a, c, g, or t
tggtctcacctcttcaaagacctaatcagcgtctagtgggaataactcaagtcacctgtactggaaatcagtttgctgaaattaatcaacgattcttgaagttgaagaaaagttgttctctctacaggaggttccagccttggcaagaggagtgtggcccttcctggaatccctctggacacaccctcctagcatcctctaggaaagatgcggcagctcaaagggaagcccaagaaggagacctccaaggacaagaaggagcggaagcaagccatgcaggaggcccggcagcagatcactacagtggtactgcccacgctggccgtggtcgtgctcttgatcgtggtgtttgtgtacgtggccacgcgccccaccatcaccgagtgagccccgcagccggccgcggaccccatcggcagggagaggaggcgcgggagggggacgcaaacaaaaaatggctttcatattcagagatgttcatgttgctgagctgtaagcaggagcaccctgtcttctctggtctttgacttgattaaagtatctccgcntttcttgggagggaataggggatgttttatcagtgaatgtgccatacaccttatggtccacttcatgtgcctttcagacttcaaagcgcgcgcgcatgtgtgtgtgtgtgtgtgtgtgtgtgtgtgtgtgcttctttttctctcctaaaaatcgataagtagctccacctgaagagggatggaacctctgggtcaggaaatgttgagtctcatccactaaccgtgggtggatgcgcctcagactgtccactcccgggaggatacgccggctagggtcgcatttgccacgaatttttgcaagaaaagcctcgggggccgccctacgtcggtactgtacgccgttgccg

SEQ ID NO: 10882 - DNA, 379 bp, Homo sapiens
ttaagatgatcatacgggttttgtttttaattctgtttatatggtggaccacatatgtttgcatatgttgaaccatccttgcatcccagagacaaagcccatttgattgtgtgtgtgtgtgtgtgtgtgtgtgcttctttttctctcctaaaaatcgataagtagctccacctgaagagggatggaacctctgggtcaggaaacagctggaatccacactcacctcattcccattgtttggatcatgcttctttccaacacgtgttcacaatctccaaagggactgtatttcttctctgtgcttaatgtgatttgaaatatgttgaatcaaagtgaaatatttattttttgaataaaggagataatagccttaaaaaaa

SEQ ID NO: 10883 - DNA, 2064 bp, Homo sapiens
cgatttaatctttacataaaagctgtacatataaccaagaagttatttttgccagtaaattaacttatttgctttattcatcttatttggttcctaatcgtaaatattttgtagctgctgtaaatttttttctcccaaatgaggagtcttattatcataaaggtaaaggctattcagctttgataaccacctgcaattcttttttggatcattcatccatctaacaaatacataatgaggacagttcatgttaatgaaaatccatgttgtttaatagaatgccatcctttacctacttttgctctgtatggacgtttttcttttcatgctctagtgagctttccctatatcatgagaagtggttatatttgtgcaaatatacaaatataggaaaacaaagattcatacctgtaggcaatagtctaacttgtccaaaccactttgcctttactgctatttttatccccaatgcgtagatatttcccccaggcctatagcctttgtgaaggaaagcaaatcatacctcctgtatattgacacgaatctggttttcaaatgtcatttccagattttttagttaattgggggttgtccttttcccttaatgtgagagtcattttcctgtatatttctggatctctcaggggctgggaggggggagtgaggggactacaaccatagcactccaagaacccttttgggattactccagtaatcaactacgaaagttattttctaaatgtagatatgtaaggtgttcttttaaagtaaggtactttgaaatatgtagcataaactggtactgctgttaaatgggtcgattattaaacggagcagctgtgtgagggcagctaactttgaatgcctgtctccctggctggtgtgtctccttctcatgttgagagcaccagggattgcgtggctgcatgctgaaaccgcattttcccatggtgtatgactagttcatctctttcttgagcaccattacaagaagatcaaatgaaaatgagatcaatgtggaagacaattcatagcacaaaaaaagtcatcttaaatctactctcaaacattcatcttatacatgcatcaaagtaatttactgacatcagtttgggtgagagagggagtcactttactgaaaaggcagaggcttaaggtgtatacatttgtactcacttccttattttcttaacttgtaagcagaaaacaagccctctctcttgtgaagtatcttcaaaggattggggtgcaaaaataccttgctggtaagccatcaatgttttatttaaatccctgcattcaaagttagctgcctttttgaaataaacaaacaaaaaatactactgtatgtttgaaaatgtgaatagtatttttatagcttgttaaagacatggctagttgcatttgtaaataagtataatgttgctttgattttcttttgtggacatctttatttggaacataattgtctttagggttgatttgtatataagtaattggcctgtgattgtttcttttttggttggaagttatcattttgacattacttgtgattctgtgttcagcactattgtgatgtgttcaacctctgcactcgcttacacaataggatatgccaattgtgtgtggtgtaatgttattttgatttttttccatgttattgatgaaggatcatgcacctaacacatactaacttttttaatgttaggcatatttttagtatactttctcttattctttcttctcctccaaccttttacccatcctccttcctttccctcattcctgttgttatttgagaatgagggagaaacagtattttacatttatgtaattaggcttttccgttagttctcaaggatcctcttttggctcttgggaaagaattgtacctgtacaaggcaattatagaatgcgaactgctttgcctcattccatactgatcatcccagctgaacaatttgaaaactgttctgcctttttgttacatgaatctgtcagaaatatatttttaatttaatataaatgaaattcaataaaatatgaaacaaacgttcaaaaaag

SEQ ID NO: 10884 - DNA, 3022 bp, Homo sapiens
agcaatcttggggcaggggccattttggaagcatgttgcgaggctccgcttcttctacaagtatggagaaggcaaaaggcaaggagtggacctccacagagaagtcgagggaagaggatcagcaggcttctaatcaaccaaattcaattgctttgccaggaacatcagcaaagagaaccaaagaaaaaatgtctgtcaaaggcagtaaagtgctctgccctaagaaaaaggcagagcacactgacaaccccagacctcagaagaagataccaatccctccattaccttctaaactgccacctgttaatctgattcaccgggacattctgcgggcctggtgccaacaattgaagctgagctccaaaggccagaaattggatgcatataagcgcctgtgtgcctttgcctacccaaatcaaaaggattttcctagcacagcaaaagaggccaaaatccggaaatcattgcaaaaaaaattaaaggtggaaaagggggaaacgtccctgcaaagttctgagacacatcctcctgaagtggctcttcctcctgtgggggagccgcctgccctggaaaattccactgctctccttgagggagttaatacagttgtggtgacaacttctgccccagaggctttgctggcctcctgggcgagaatttcagccagggcgaggacaccagaggcagtggaatctccacaagaggcctctggtgtcaggtggtgtgtggtccatgggaaaagtctccctgcagacacagatggttgggttcacctgcagtttcatgctggtcaagcctgggttccagaaaagcaagaagggagagtgagtgcactcttcttgcttcctgcctccaattttccacccccgcaccttgaagacaatatgttgtgccccaaatgtgttcacaggaacaaggtcttaataaaaagcctccaatgggaatagaatatcaggaaaaaggccacatctatggtaattaatggcagaaaagctggagagttggattctgcggtgctgctgacaggtgaactctggtcctctgcacctgtttatgggccatgcagactggtggggtggcagatgttagcctaagacccctagcagtgcctgttgctttgtgagtggagatagagactcttacatttaaaaatggaaaaacatttcacaaattaccataaattgtagttaatatgtagaaaaactcattcatactacttttctaaaatagacatgacttcagcagcagcttttttttgttgtattttgagacagtgtctcactgttgcccaggctggagtgcagtggtgcaatctcagttcagtgcaatctccgcctcctgggttcaaatgattctcctgcctcagcctcttgagtagctaggtacaggcacctgccaccacacccagctaattttttgtatttttagtagagatggggtttcaccatgttggccaggttggtctcaaactcctggactcaagtgatcaccctcctcagcctcccaaaatgctgggactatgggcatgagcccctgcgcctgaccttcaacagctcttttaagtgagttcttcagctaagcattgtgatggacttgagtaaaatggtagttggctcttgtgctcaattttctcttcctctgaacactgactactttaggagctgcttcattccaattgcaatttcataaaacgtaaagtattttaaggcaaagaaaggctgttaattccctccctcccccaaacacatgatttttaatattctaaacaatatttttcaaagttctcttaataacctgagatttctatggtttgactccaggatcaaaacacaagggactttgtattatttcacttataattgttttgtatatttctggagtttaaaatgtttaaggttgcttcccgctcataaatacataatatattgaatttaaaatgtgtttattaaccgattctccataaataaaaataagatgtgtatgtaaaataattcatctgttgtatttagagaaccatattcattgcatgcaaattttattgttagtgttcttaactcaagtaggagtaaaccaaaaagtgtgatttttcttttgtatgactcgtttgttctttattagttggtggtatgggttggatcatttgtttttaaaactacttaggtatgattcacatacaaaaagctgcacatatttaatgtatcctattgtgtaattaatttttaatttttttgtgtacttcctaaacttatagtcctgcgagtctgggaacagatctgtttttcacttatcctgatttaatgacagtttccaacattgttttgttattacaagtaggggatctttttttttgcccgtttaatgaagatactaaaaataatgcactggaaggagtggaagagttggaaaatttgtaaccatcataatacaggtgtaataggtttgggaaagaatcctcaaaaatgttaaagcaagggaggaaagtttgttgagaagcaagatgttcttctctcctgcccgcccccgccgttggttgttggtggtcagaattattgtgtaataaataatagacattttttcttatactatgtgtattgttccttttgtttcctttttaaacttctcccctgctttatttggatgggtcaagtttctgttctgtttccttcctttctattaatttggaaatgtccttggctttacgattctgcttgtagatacttcccctgtttctaacacatttcaataaacttaaatttctctatatacaaaataaattaataattggagtctaccagtaagacagtttatttactcatcttcctgccccagcaagataaaaccttaaggttacatacttgccaaatcaccctaattttcacaggcctcccccaaagttcctatcaatcacattcagtcccccactccctgtctccctgctatgctcccagaatgctaagaggaagacagttggagctataaactccctgtgtctcagatgagttccctggcagaggcatgacat

SEQ ID NO: 10885 - DNA, 2580 bp, Homo sapiens
agcaatcttggggcaggggccattttggaagcatgttgcgaggctccgcttcttctacaagtatggagaaggcaaaaggcaaggagtggacctccacagagaagtcgagggaagaggatcagcaggcttctaatcaaccaaattcaattgctttgccaggaacatcagcaaagagaaccaaagaaaaaatgtctgtcaaaggcagtaaagtgctctgccctaagaaaaaggcagagcacactgacaaccccagacctcagaagaagataccaatccctccattaccttctaaactgccacctgttaatctgattcaccgggacattctgcgggcctggtgccaacaattgaagctgagctccaaaggccagaaattggatgcatataagcgcctgtgtgcctttgcctacccaaatcaaaaggattttcctagcacagcaaaagaggccaaaatccggaaatcattgcaaaaaaaattaaaggtggaaaagggggaaacgtccctgcaaagttctgagacacatcctcctgaagtggctcttcctcctgtgggggagccgcctgccctggaaaattccactgctctccttgagggagttaatacagttgtggtgacaacttctgccccagaggctttgctggcctcctgggcgagaatttcagccagggcgaggacaccagaggcagtggaatctccacaagaggcctctggtgtcaggtggtgtgtggtccatgggaaaagtctccctgcagacacagatggttgggttcacctgcagtttcatgctggtcaagcctgggttccagaaaagcaagaagggagagtgagtgcactcttcttgcttcctgcctccaattttccacccccgcaccttgaagacaatatgttgtgccccaaatgtgttcacaggaacaaggtcttaataaaaagcctccaatgggaatagaatatcaggaaaaaggccacatctatggtaattaatggcagaaaagctggagagttggattctgcggtgctgctgacaggtgaactctggtcctctgcacctgtttatgggccatgcagactggtggggtggcagatgttagcctaagacccctagcagtgcctgttgctttgtgagtggagatagagactcttacatttaaaaatggaaaaacatttcacaaattaccataaattgtagttaatatgtagaaaaactcattcatactacttttctaaaatagacatgacttcagcagcagcttttttttgttgtattttgagacagtgtctcactgttgcccaggctggagtgcagtggtgcaatctcagttcagtgcaatctccgcctcctgggttcaaatgattctcctgcctcagcctcttgagtagctaggtacaggcacctgccaccacacccagctaattttttgtatttttagtagagatggggtttcaccatgttggccaggttggtctcaaactcctggactcaagtgatcaccctcctcagcctcccaaaatgctgggactatgggcatgagcccctgcgcctgaccttcaacagctcttttaagtgagttcttcagctaagcattgtgatggacttgagtaaaatggtagttggctcttgtgctcaattttctcttcctctgaacactgactactttaggagctgcttcattccaattgcaatttcataaaacgtaaagtattttaaggcaaagaaaggctgttaattccctccctcccccaaacacatgatttttaatattctaaacaatatttttcaaagttctcttaataacctgagatttctatggtttgactccaggatcaaaacacaagggactttgtattatttcacttataattgttttgtatatttctggagtttaaaatgtttaaggttgcttcccgctcataaatacataatatattgaatttaaaatgtgtttattaaccgattctccataaataaaaataagatgtgtatgtaaaataattcatctgttgtatttagagaaccatattcattgcatgcaaattttattgttagtgttcttaactcaagtaggagtaaaccaaaaagtgtgatttttcttttgtatgactcgtttgttctttattagttggtggtatgggttggatcatttgtttttaaaactacttaggtatgattcacatacaaaaagctgcacatatttaatgtatcctattgtgtaattaatttttaatttttttgtgtacttcctaaacttatagtcctgcgagtctgggaacagatctgtttttcacttatcctgatttaatgacagtttccaacattgttttgttattacaagtaggggatctttttttttgcccgtttaatgaagatactaaaaataatgcactggaaggagtggaagagttggaaaatttgtaaccatcataatacaggtgtaataggtttgggaaagaatcctcaaaaatgttaaagcaagggaggaaagtttgttgagaagcaagatgttcttctctcctgcccgcccccgccgttggttgttggtggtcagaattattgtgtaataaataatagacattttttctta

SEQ ID NO: 10886 - DNA, 299 bp, Homo sapiens
  misc_feature (15)..(15): n is a, c, g, or t
cgcggccgcgcgacngccgagaagacgacagaaggggggagaaggcaaaaggcaaggaggtcagtacagagtggagttctgtgtgtctttgtgtttctgtcttccctgggcactcctgatttttcctttaaggagaaaagaatgtgccttcgaattttctcctcttgacttttttttttttattttaagagtaaggcccaagaatatgattgcagcctggtatattggagtgagcagacaagtaagaaatgaggttttctaggtttagttgaggaggttgagtgtgtcaaaagatgggc

SEQ ID NO: 10887 - DNA, 2535 bp, Homo sapiens
  misc_feature (2498)..(2498): n is a, c, g, or t
agcaatcttggggcaggggccattttggaagcatgttgcgaggctccgcttcttctacaagtatggagaaggcaaaaggcaaggagtggacctccacagagaagtcgagggaagaggatcagcaggcttctaatcaaccaaattcaattgctttgccaggaacatcagcaaagagaaccaaagaaaaaatgtctgtcaaaggcagtaaagtgctctgccctaagaaaaaggcagagcacactgacaaccccagacctcagaagaagataccaatccctccattaccttctaaactgccacctgttaatctgattcaccgggacattctgcgggcctggtgccaacaattgaagctgagctccaaaggccagaaattggatgcatataagcgcctgtgtgcctttgcctacccaaatcaaaaggattttcctagcacagcaaaagaggccaaaatccggaaatcattgcaaaaaaaattaaaggtggaaaagggggaaacgtccctgcaaagttctgagacacatcctcctgaagtggctcttcctcctgtgggggagccgcctgccctggaaaattccactgctctccttgagggagttaatacagttgtggtgacaacttctgccccagaggctttgctggcctcctgggcgagaatttcagccagggcgaggacaccagaggcagtggaatctccacaagaggcctctggtgtcaggtggtgtgtggtccatgggaaaagtctccctgcagacacagatggttgggttcacctgcagtttcatgctggtcaagcctgggttccagaaaagcaagaagggagagtgagtgcactcttcttgcttcctgcctccaattttccacccccgcaccttgaagacaatatgttgtgccccaaatgtgttcacaggaacaaggtcttaataaaaagcctccaatgggaatagaatatcaggaaaaaggccacatctatggtaattaatggcagaaaagctggagagttggattctgcggtgctgctgacaggtgaactctggtcctctgcacctgtttatgggccatgcagactggtggggtggcagatgttagcctaagacccctagcagtgcctgttgctttgtgagtggagatagagactcttacatttaaaaatggaaaaacatttcacaaattaccataaattgtagttaatatgtagaaaaactcattcatactacttttctaaaatagacatgacttcagcagcagcttttttttgttgtattttgagacagtgtctcactgttgcccaggctggagtgcagtggtgcaatctcagttcagtgcaatctccgcctcctgggttcaaatgattctcctgcctcagcctcttgagtagctaggtacaggcacctgccaccacacccagctaattttttgtatttttagtagagatggggtttcaccatgttggccaggttggtctcaaactcctggactcaagtgatcaccctcctcagcctcccaaaatgctgggactatgggcatgagcccctgcgcctgaccttcaacagctcttttaagtgagttcttcagctaagcattgtgatggacttgagtaaaatggtagttggctcttgtgctcaattttctcttcctctgaacactgactactttaggagctgcttcattccaattgcaatttcataaaacgtaaagtattttaaggcaaagaaaggctgttaattccctccctcccccaaacacatgatttttaatattctaaacaatatttttcaaagttctcttaataacctgagatttctatggtttgactccaggatcaaaacacaagggactttgtattatttcacttataattgttttgtatatttctggagtttaaaatgtttaaggttgcttcccgctcataaatacataatatattgaatttaaaatgtgtttattaaccgattctccataaataaaaataagatgtgtatgtaaaataattcatctgttgtatttagagaaccatattcattgcatgcaaattttattgttagtgttcttaactcaagtaggagtaaaccaaaaagtgtgatttttcttttgtatgactcgtttgttctttattagttggtggtatgggttggatcatttgtttttaaaactacttaggtatgattcacatacaaaaagctgcacatatttaatgtatcctattgtgtaattaatttttaatttttttgtgtacttcctaaacttatagtcctgcgagtctgggaacagatctgtttttcacttatcctgatttaatgacagtttccaacattgttttgttattacaagtaggggatctttttttttgcccgtttaatgaagatactaaaaataatgcactggaaggagtggaagagttggaaaatttgtaaccatcataatacaggtgtaataggtttgggaaagaatcctcaaaaatgttaaagcaagggaggaaagtttgttgagaagcaagncgccaccacacaacgaaagaaaaagaagccggccgcc

SEQ ID NO: 10888 - DNA, 2234 bp, Homo sapiens
ccattctcctgcctcagcctcctgagtagctgggactacaggcccccgccaccacgcctggctaattttttgtatttttagtagaaacggggtttcactgtgttagccaggatggtctcgatctcctgacctcgtgatccacccgcctcggcctcccaaagtgctgggattacaagcgtgagccactgcgcccagcttgtatgcttttctaaaggagaacagaatagagaagaggttaagttaggatttcagggttcacatcttggagctggtcaatcaagggtgatgggccataatgcagtcttacatcagtatgtcatcctggtgtgcgggtacctgtctctttcctttgccattgccaggtggtgtcaggtggtgtgtggtccatgggaaaagtctccctgcagacacagatggttgggttcacctgcagtttcatgctggtcaagcctgggttccagaaaagcaagaagggagagtgagtgcactcttcttgcttcctgcctccaattttccacccccgcaccttgaagacaatatgttgtgccccaaatgtgttcacaggaacaaggtcttaataaaaagcctccaatgggaatagaatatcaggaaaaaggccacatctatggtaattaatggcagaaaagctggagagttggattctgcggtgctgctgacaggtgaactctggtcctctgcacctgtttatgggccatgcagactggtggggtggcagatgttagcctaagacccctagcagtgcctgttgctttgtgagtggagatagagactcttacatttaaaaatggaaaaacatttcacaaattaccataaattgtagttaatatgtagaaaaactcattcatactacttttctaaaatagacatgacttcagcagcagcttttttttgttgtattttgagacagtgtctcactgttgcccaggctggagtgcagtggtgcaatctcagttcagtgcaatctccgcctcctgggttcaaatgattctcctgcctcagcctcttgagtagctaggtacaggcacctgccaccacacccagctaattttttgtatttttagtagagatggggtttcaccatgttggccaggttggtctcaaactcctggactcaagtgatcaccctcctcagcctcccaaaatgctgggactatgggcatgagcccctgcgcctgaccttcaacagctcttttaagtgagttcttcagctaagcattgtgatggacttgagtaaaatggtagttggctcttgtgctcaattttctcttcctctgaacactgactactttaggagctgcttcattccaattgcaatttcataaaacgtaaagtattttaaggcaaagaaaggctgttaattccctccctcccccaaacacatgatttttaatattctaaacaatatttttcaaagttctcttaataacctgagatttctatggtttgactccaggatcaaaacacaagggactttgtattatttcacttataattgttttgtatatttctggagtttaaaatgtttaaggttgcttcccgctcataaatacataatatattgaatttaaaatgtgtttattaaccgattctccataaataaaaataagatgtgtatgtaaaataattcatctgttgtatttagagaaccatattcattgcatgcaaattttattgttagtgttcttaactcaagtaggagtaaaccaaaaagtgtgatttttcttttgtatgactcgtttgttctttattagttggtggtatgggttggatcatttgtttttaaaactacttaggtatgattcacatacaaaaagctgcacatatttaatgtatcctattgtgtaattaatttttaatttttttgtgtacttcctaaacttatagtcctgcgagtctgggaacagatctgtttttcacttatcctgatttaatgacagtttccaacattgttttgttattacaagtaggggatctttttttttgcccgtttaatgaagatactaaaaataatgcactggaaggagtggaagagttggaaaatttgtaaccatcataatacaggtgtaataggtttgggaaagaatcctcaaaaatgttaaagcaagggaggaaagtttgttgagaagcaagatgttcttctctcctgcccgcccccgccgttggttgttggtggtcagaattattgtgtaataaataatagacattttttctta

SEQ ID NO: 10889 - DNA, 2190 bp, Homo sapiens
ccattctcctgcctcagcctcctgagtagctgggactacaggcccccgccaccacgcctggctaattttttgtatttttagtagaaacggggtttcactgtgttagccaggatggtctcgatctcctgacctcgtgatccacccgcctcggcctcccaaagtgctgggattacaagcgtgagccactgcgcccagcttgtatgcttttctaaaggagaacagaatagagaagaggttaagttaggatttcagggttcacatcttggagctggtcaatcaagggtgatgggccataatgcagtcttacatcagtatgtcatcgtgtcaggtggtgtgtggtccatgggaaaagtctccctgcagacacagatggttgggttcacctgcagtttcatgctggtcaagcctgggttccagaaaagcaagaagggagagtgagtgcactcttcttgcttcctgcctccaattttccacccccgcaccttgaagacaatatgttgtgccccaaatgtgttcacaggaacaaggtcttaataaaaagcctccaatgggaatagaatatcaggaaaaaggccacatctatggtaattaatggcagaaaagctggagagttggattctgcggtgctgctgacaggtgaactctggtcctctgcacctgtttatgggccatgcagactggtggggtggcagatgttagcctaagacccctagcagtgcctgttgctttgtgagtggagatagagactcttacatttaaaaatggaaaaacatttcacaaattaccataaattgtagttaatatgtagaaaaactcattcatactacttttctaaaatagacatgacttcagcagcagcttttttttgttgtattttgagacagtgtctcactgttgcccaggctggagtgcagtggtgcaatctcagttcagtgcaatctccgcctcctgggttcaaatgattctcctgcctcagcctcttgagtagctaggtacaggcacctgccaccacacccagctaattttttgtatttttagtagagatggggtttcaccatgttggccaggttggtctcaaactcctggactcaagtgatcaccctcctcagcctcccaaaatgctgggactatgggcatgagcccctgcgcctgaccttcaacagctcttttaagtgagttcttcagctaagcattgtgatggacttgagtaaaatggtagttggctcttgtgctcaattttctcttcctctgaacactgactactttaggagctgcttcattccaattgcaatttcataaaacgtaaagtattttaaggcaaagaaaggctgttaattccctccctcccccaaacacatgatttttaatattctaaacaatatttttcaaagttctcttaataacctgagatttctatggtttgactccaggatcaaaacacaagggactttgtattatttcacttataattgttttgtatatttctggagtttaaaatgtttaaggttgcttcccgctcataaatacataatatattgaatttaaaatgtgtttattaaccgattctccataaataaaaataagatgtgtatgtaaaataattcatctgttgtatttagagaaccatattcattgcatgcaaattttattgttagtgttcttaactcaagtaggagtaaaccaaaaagtgtgatttttcttttgtatgactcgtttgttctttattagttggtggtatgggttggatcatttgtttttaaaactacttaggtatgattcacatacaaaaagctgcacatatttaatgtatcctattgtgtaattaatttttaatttttttgtgtacttcctaaacttatagtcctgcgagtctgggaacagatctgtttttcacttatcctgatttaatgacagtttccaacattgttttgttattacaagtaggggatctttttttttgcccgtttaatgaagatactaaaaataatgcactggaaggagtggaagagttggaaaatttgtaaccatcataatacaggtgtaataggtttgggaaagaatcctcaaaaatgttaaagcaagggaggaaagtttgttgagaagcaagatgttcttctctcctgcccgcccccgccgttggttgttggtggtcagaattattgtgtaataaataatagacattttttctta

SEQ ID NO: 10890 - DNA, 346 bp, Homo sapiens
tgctggtcaagcctgggttccagaaaagcaagaagggagagtgagtgcactcttcttgcttcctgcctccaattttccacccccgcaccttgaagacaatatgttgtgccccaaatgtgttcacaggtaattacctgatgcttttctacaaactaaaagtgggtgccggattttcaattgcagaaagttaagatatacattaatcttaaatagccaggtatttcaagctcaaattgtcagtaaagagtttcaagaaaattattactcagttaagtttatccccaggaaaaagaaagcatttatgtgtcagggtttaatgcttctacctggagacacagaattctgg

SEQ ID NO: 10891 - DNA, 1319 bp, Homo sapiens
agcaatcttggggcaggggccattttggaagcatgttgcgaggctccgcttcttctacaagtatggagaaggcaaaaggcaaggagtggacctccacagagaagtcgagggaagaggatcagcaggcttctaatcaaccaaattcaattgctttgccaggaacatcagcaaagagaaccaaagaaaaaatgtctgtcaaaggcagtaaagtgctctgccctaagaaaaaggcagagcacactgacaaccccagacctcagaagaagataccaatccctccattaccttctaaactgccacctgttaatctgattcaccgggacattctgcgggcctggtgccaacaattgaagctgagctccaaaggccagaaattggatgcatataagcgcctgtgtgcctttgcctacccaaatcaaaaggattttcctagcacagcaaaagaggccaaaatccggaaatcattgcaaaaaaaattaaaggtggaaaagggggaaacgtccctgcaaagttctgagacacatcctcctgaagtggctcttcctcctgtgggggagccgcctgccctggaaaattccactgctctccttgagggagttaatacagttgtggtgacaacttctgccccagaggctttgctggcctcctgggcgagaatttcagccagggcgaggacaccagaggcagtggaatctccacaagaggcctctggtgtcaggtggtgtgtggtccatgggaaaagtctccctgcagacacagatggttgggttcacctgcagtttcatgctggtcaagcctgggttccagaaaagcaagaagggagagtgagtgcactcttcttgcttcctgcctccaattttccacccccgcaccttgaagacaatatgttgtgccccaaatgtgttcacaggaacaaggtcttaataaaaagcctccaatgggaatagaatatcaggaaaaaggccacatctatggtaattaatggcagaaaagctggagagttggattctgcggtgctgctgacaggtgaactctggtcctctgcacctgtttatgggccatgcagactggtggggtggcagatgttagcctaagacccctagcagtgcctgttgctttgtgagtggagatagagactcttacatttaaaaatggaaaaacatttcacaaattaccataaattgtagttaatatgtagaaaaactcattcatactacttttctaaaatagacatgacttcagcagcagcttttttttgttgtattttgagacagtgtctcactgcactccagccgggcgacagagcaagattctgtctc

SEQ ID NO: 10892 - DNA, 1144 bp, Homo sapiens
ttctggggagattttaccgagcaacgtagggaaacggctgcctggctacctacccctttttgacacccacacgtgctcggcaccttacatacactgcgtgattttatcctaaagccacttttaaaatcttagtgtgtaaacagagaaactgggcgtcacataaggcaagtgacctgcacagcctgctccggaggagacccgtacgatcccagagacaagcactgaacataaggcacccggcgccgcgcccgctttgcaacctctcgcgacagttgtacgtcatccgagagcgccgtggaagtcgtgctgcaggcgtcgcgccaatcttcgctctgaggtgctgtctcaccggtgagacctggaagcgggcgagtctcgtgctgtgtcggacctgcagcccctggccttccgccaccatggagtacctcatcggtatccaaggccccgactatgttcttgtcgcctccgaccgggtggccgccagcaatattgtccagatgaaggacgatcatgacaagatgtttaagatgagtgaaaagatattactcctgtgtgttggagaggctggagacactgtacagtttgcagaatatattcagaaaaacgtgcaactttataagatgcgaaatggatatgaattgtctcccacggcagcagctaacttcacacgccgaaacctggctgactgtcttcggagtcggaccccatatcatgtgaacctcctcctggctggctatgatgagcatgaagggccagcgctgtattacatggactacctggcagccttggccaaggccccttttgcagcccacggctatggtgccttcctgactctcagtatcctcgaccgatactacacaccgactatctcacgtgagagggcagtggaactccttaggaaatgtctggaggagctccagaaacgcttcatcctgaatctgccaaccttcagtgttcgaatcattgacaaaaatggcatccatgacctggataacatttccttccccaaacagggctcctaacatcatgtcctccctcccacttgccagggaacttttttttgatgggctcctttatttttttctactcttttcaggcgcactcttgataaatggttaattcagaataaaggtgactatggata

SEQ ID NO: 10893 - DNA, 1032 bp, Homo sapiens
ttctggggagattttaccgagcaacgtagggaaacggctgcctggctacctacccctttttgacacccacacgtgctcggcaccttacatacactgcgtgattttatcctaaagccacttttaaaatcttagtgtgtaaacagagaaactgggcgtcacataaggcaagtgacctgcacagcctgctccggaggagacccgtacgatcccagagacaagcactgaacataaggcacccggcgccgcgcccgctttgcaacctctcgcgacagttgtacgtcatccgagagcgccgtggaagtcgtgctgcaggcgtcgcgccaatcttcgctctgaggtgctgtctcaccggtgagacctggaagcgggcgagtctcgtgctgtgtcggacctgcagcccctggccttccgccaccatggagtacctcatcggtatccaaggccccgactatgttcttgtcgcctccgaccgggtggccgccagcaatattgtccagatgaaggacgatcatgacaagatgtttaagatgagtgaaaagatattactcctgtgtgttggagaggctggagacactgtacagtttgcagaatatattcagaaaaacgtgcaactttataagatgcgaaatggatatgaattgtctcccacggcagcagctaacttcacacgccgaaacctggctgactgtcttcggagtcggaccccatatcatgtgaacctcctcctggctggctatgatgagcatgaagggccagcgctgtattacatggactacctggcagccttggccaaggccccttttgcagcccacggctatggtgccttcctgactctcagtatcctcgaccgatactacacaccgactatctcacgtgagagggcagtggaactccttaggaaatgtctggaggagctccagaaacgcttcatcctgaatctgccaaccttcagtgttcgaatcattgacaaaaatggcatccatgacctggataacatttccttccctggcaagtgggagggaggacatgatc

SEQ ID NO: 10894 - DNA, 748 bp, Homo sapiens
gtttccgtagtgtagtggttatcacgttcgcctcacatcatgacaagatgtttaagatgagtgaaaagatattactcctgtgtgttggagaggctggagacactgtacagtttgcagaatatattcagaaaaacgtgcaactttataagatgcgaaatggatatgaattgtctcccacggcagcagctaacttcacacgccgaaacctggctgactgtcttcggagtcggaccccatatcatgtgaacctcctcctggctggctatgatgagcatgaagggccagcgctgtattacatggactacctggcagccttggccaaggccccttttgcagcccacggctatggtgccttcctgactctcagtatcctcgaccgatactacacaccgactatctcacgtgagagggcagtggaactccttaggaaatgtctggaggagctccagaaacgcttcatcctgaatctgccaaccttcagtgttcgaatcattgacaaaaatggcatccatgacctggataacatttccttccccaaacagggctcctaacatcatgtcctccctcccacttgccagggaacttttttttgatgggctcctttatttttttctactcttttcaggcgcactcttgataaatggttaattcagaataaaggtgactatggatatataaacacaaaaaaaaacaaaaaattttttggggcatggccaaaaagagttaaaacaatgtgggacgcggggca

SEQ ID NO: 10895 - DNA, 297 bp, Homo sapiens
  misc_feature (63)..(63): n is a, c, g, or t
ccactagttattccactcatgctacagtgcaagaggcagtggcactccttaggaaagtctggnaggactccagaaacgcttcatcctgaatctgccaaccttcagtgttcgaatcattgacaaaaatggcatccatgacctggataacatttccttccccaaacagggctcctaacatcatgtcctccctcccacttgccagggaacttttttttgatgggctcctttatttttttctactcttttcaggcgcactcttgataaatggttaattcagaataaaggtgactatggata

SEQ ID NO: 10896 - DNA, 2355 bp, Homo sapiens
ttctggggagattttaccgagcaacgtagggaaacggctgcctggctacctacccctttttgacacccacacgtgctcggcaccttacatacactgcgtgattttatcctaaagccacttttaaaatcttagtgtgtaaacagagaaactgggcgtcacataaggcaagtgacctgcacagcctgctccggaggagacccgtacgatcccagagacaagcactgaacataaggcacccggcgccgcgcccgctttgcaacctctcgcgacagttgtacgtcatccgagagcgccgtggaagtcgtgctgcaggcgtcgcgccaatcttcgctctgaggtgctgtctcaccggtgagacctggaagcgggcgagtctcgtgctgtgtcggacctgcagcccctggccttccgccaccatggagtacctcatcggtatccaaggccccgactatgttcttgtcgcctccgaccgggtggccgccagcaatattgtccagatgaaggacgatcatgacaagatgtttaagatgagtgaaaagatattactcctgtgtgttggagaggctggagacactgtacagtttgcagaatatattcagaaaaacgtgcaactttataagatgcgaaatggatatgaattgtctcccacggcagcagctaacttcacacgccgaaacctggctgactgtcttcggagtcggaccccatatcatgtgaacctcctcctggctggctatgatgagcatgaagggccagcgctgtattacatggactacctggcagccttggccaaggccccttttgcagcccacggctatggtgccttcctgactctcagtatcctcgaccgatactacacaccgactatctcacgtgagagggcagtggaactccttaggaaatgtctggaggagctccagaaacgcttcatcctgaatctgccaaccttcagtgttcgaatcattgacaaaaatggcatccatgacctggataacatttccttccccaaacagggctcctaacatcatgtcctccctcccacttgccagggaacttttttttgatgggctcctttatttttttctactcttttcaggcgcactcttgataaatggttaattcagaataaaggtgactatggatataattgagccctctggtccaggtctcagtttacctaatattacctcagaaaggatatggagggaagatgatctttttgccaggtctgacttttcttcctgctccgccctccattaacgctcagtaccctttagcagctgacggccccacgttctactccatgcttggcttcctttccaactagctctttcatatattttacttgctagtatctccattctctctaaagtagtggttctttttgcccttaaacttaaatttttaaattaattaacctgaattaataatacatgcacttaatgtaacatgcaaacagtacaaaaacatgtagtgaaaaatatttcttccagagctgggtgtggtggctcatacctgtaatcccagcactttgggaggccgaggcgggcggatcacgaggtcaagagagcgagaccatcctgaccaacatggtgaaaccccgtctctactaaaaatacaaaaattagctgggcgtggtggcacgcacccctagtcccagctactggggaggctgagacaggagaatcggtcgaacccgggaggcagaggttgcagtgagcctagatcgcgccactgtactccagcctggcaacagagtgagactccgtctcaaaaaaaagaaggaaaaatgtttcttccatccctataatccagtcatctgcttcctgcttcccttcctggaggaaacttcagctactaatttcttatgttttttaagagatattctgttactgtgtaaagtatacatacatacagacacatgccccctttaaattttttagatttatttatttatttagagacagggtctcactctagcccaggctggagtgctgtggcgtaatcttggctcactgcaacctccgcctcccgggcccaagtgatcctcccatctcagcctcctgagtagctgggattacaggcgcacaccaccaatgcccagctagtttttgtgtttttcatagagacagggtctcaccatgtcattcagaccagcctggccaacatggtgaaaccccatctctactaaaaaaatatataacaattagccaggcgtggtggcacacgcctgtaaacccaactacttgggaggctgaggcaggagaattgcttgagcccgggagagggaggttgcagtgagccgagatcatgccactgcactccagcctggctgacagagcaagactctgtctc

SEQ ID NO: 10897 - DNA, 3205 bp, Homo sapiens
ttctggggagattttaccgagcaacgtagggaaacggctgcctggctacctacccctttttgacacccacacgtgctcggcaccttacatacactgcgtgattttatcctaaagccacttttaaaatcttagtgtgtaaacagagaaactgggcgtcacataaggcaagtgacctgcacagcctgctccggaggagacccgtacgatcccagagacaagcactgaacataaggcacccggcgccgcgcccgctttgcaacctctcgcgacagttgtacgtcatccgagagcgccgtggaagtcgtgctgcaggcgtcgcgccaatcttcgctctgaggtgctgtctcaccggtgagacctggaagcgggcgagtctcgtgctgtgtcggacctgcagcccctggccttccgccaccatggagtacctcatcggtatccaaggccccgactatgttcttgtcgcctccgaccgggtggccgccagcaatattgtccagatgaaggacgatcatgacaagatgtttaagatgagtgaaaagatattactcctgtgtgttggagaggctggagacactgtacagtttgcagaatatattcagaaaaacgtgcaactttataagatgcgaaatggatatgaattgtctcccacggcagcagctaacttcacacgccgaaacctggctgactgtcttcggagtcggaccccatatcatgtgaacctcctcctggctggctatgatgagcatgaagggccagcgctgtattacatggactacctggcagccttggccaaggccccttttgcagcccacggctatggtgccttcctgactctcagtatcctcgaccgatactacacaccgactatctcacgtgagagggcagtggaactccttaggaaatgtctggaggagctccagaaacgcttcatcctgaatctgccaaccttcagtgttcgaatcattgacaaaaatggcatccatgacctggataacatttccttccccaaacagggctcctaacatcatgtcctccctcccacttgccagggaacttttttttgatgggctcctttatttttttctactcttttcaggcgcactcttgataaatggttaattcagaataaaggtgactatggatataattgagccctctggtccaggtctcagtttacctaatattacctcagaaaggatatggagggaagatgatctttttgccaggtctgacttttcttcctgctccgccctccattaacgctcagtaccctttagcagctgacggccccacgttctactccatgcttggcttcctttccaactagctctttcatatattttacttgctagtatctccattctctctaaagtagtggttctttttgcccttaaacttaaatttttaaattaattaacctgaattaataatacatgcacttaatgtaacatgcaaacagtacaaaaacatgtagtgaaaaatatttcttccagagctgggtgtggtggctcatacctgtaatcccagcactttgggaggccgaggcgggcggatcacgaggtcaagagagcgagaccatcctgaccaacatggtgaaaccccgtctctactaaaaatacaaaaattagctgggcgtggtggcacgcacccctagtcccagctactggggaggctgagacaggagaatcggtcgaacccgggaggcagaggttgcagtgagcctagatcgcgccactgtactccagcctggcaacagagtgagactccgtctcaaaaaaaagaaggaaaaatgtttcttccatccctataatccagtcatctgcttcctgcttcccttcctggaggaaacttcagctactaatttcttatgttttttaagagatattctgttactgtgtaaagtatacatacatacagacacatgccccctttaaattttttagatttatttatttatttagagacagggtctcactctagcccaggctggagtgctgtggcgtaatcttggctcactgcaacctccgcctcccgggcccaagtgatcctcccatctcagcctcctgagtagctgggattacaggcgcacaccaccaatgcccagctagtttttgtgtttttcatagagacagggtctcaccatgtcattcaggttggtcttgaactcctgggctcaagcagtctgcctgccttggcttcccagtgctgggattacaggcgtgagccaccgtgcccggctaaaaagtatttttaagttctgcatattgcttatttcacttaacactatattagagattgttttatatcaatacatatagatatgcttattcttgttgacagttgcataattttccattaaattgatgtatcatgggcagttaaccagttactcgttttactcttagcataactttagggaacaatgtggatgttttgtggttaaagctattaaaacagtggttcttgaccagatgtgtgtttcagaatgttcatctcacatttccagttgctactgatgctgctggtctaggaaccacatatcaaaaccatttggtctccgactaagataaaccctactttatccaattctgtgctcctcttaatatcatatacagataggtttttgttttgtctgtgattaaatgtatcatctaagatactacctactgatcataacgttcatattaaagtattgggttaacattagatttgggtgtcttatacactatttaatacgccaatgataaatgccttacaccataagaagaaagctaatcattgagtaaatgggagaaaagagatgattcacgtcactacagttgattcaacctccaacaccaccatgaatatgcataggtttgagcttttagctagattcctgagtgtaaggcatctattttaaaagtgccacaggttggccgggtgcggtggctcatgcctgtaatcccagcactttggccgcccgccgaggcgggcggatcacctgaggtcaggagttcaagaccagcctggccaacatggtgaaaccccatctctactaaaaaaatatataacaattagccaggcgtggtggcacacgcctgtaaacccaactacttgggaggctgaggcaggagaattgcttgagcccgggagagggaggttgcagtgagccgagatcatgccactgcactccagcctggctgacagagcaagactctgtctc

SEQ ID NO: 10898 - DNA, 2861 bp, Homo sapiens
  misc_feature (2713)..(2713): n is a, c, g, or t
  misc_feature (2718)..(2718): n is a, c, g, or t
  misc_feature (2720)..(2720): n is a, c, g, or t
ttctggggagattttaccgagcaacgtagggaaacggctgcctggctacctacccctttttgacacccacacgtgctcggcaccttacatacactgcgtgattttatcctaaagccacttttaaaatcttagtgtgtaaacagagaaactgggcgtcacataaggcaagtgacctgcacagcctgctccggaggagacccgtacgatcccagagacaagcactgaacataaggcacccggcgccgcgcccgctttgcaacctctcgcgacagttgtacgtcatccgagagcgccgtggaagtcgtgctgcaggcgtcgcgccaatcttcgctctgaggtgctgtctcaccggtgagacctggaagcgggcgagtctcgtgctgtgtcggacctgcagcccctggccttccgccaccatggagtacctcatcggtatccaaggccccgactatgttcttgtcgcctccgaccgggtggccgccagcaatattgtccagatgaaggacgatcatgacaagatgtttaagatgagtgaaaagatattactcctgtgtgttggagaggctggagacactgtacagtttgcagaatatattcagaaaaacgtgcaactttataagatgcgaaatggatatgaattgtctcccacggcagcagctaacttcacacgccgaaacctggctgactgtcttcggagtcggaccccatatcatgtgaacctcctcctggctggctatgatgagcatgaagggccagcgctgtattacatggactacctggcagccttggccaaggccccttttgcagcccacggctatggtgccttcctgactctcagtatcctcgaccgatactacacaccgactatctcacgtgagagggcagtggaactccttaggaaatgtctggaggagctccagaaacgcttcatcctgaatctgccaaccttcagtgttcgaatcattgacaaaaatggcatccatgacctggataacatttccttccccaaacagggctcctaacatcatgtcctccctcccacttgccagggaacttttttttgatgggctcctttatttttttctactcttttcaggcgcactcttgataaatggttaattcagaataaaggtgactatggatataattgagccctctggtccaggtctcagtttacctaatattacctcagaaaggatatggagggaagatgatctttttgccaggtctgacttttcttcctgctccgccctccattaacgctcagtaccctttagcagctgacggccccacgttctactccatgcttggcttcctttccaactagctctttcatatattttacttgctagtatctccattctctctaaagtagtggttctttttgcccttaaacttaaatttttaaattaattaacctgaattaataatacatgcacttaatgtaacatgcaaacagtacaaaaacatgtagtgaaaaatatttcttccagagctgggtgtggtggctcatacctgtaatcccagcactttgggaggccgaggcgggcggatcacgaggtcaagagagcgagaccatcctgaccaacatggtgaaaccccgtctctactaaaaatacaaaaattagctgggcgtggtggcacgcacccctagtcccagctactggggaggctgagacaggagaatcggtcgaacccgggaggcagaggttgcagtgagcctagatcgcgccactgtactccagcctggcaacagagtgagactccgtctcaaaaaaaagaaggaaaaatgtttcttccatccctataatccagtcatctgcttcctgcttcccttcctggaggaaacttcagctactaatttcttatgttttttaagagatattctgttactgtgtaaagtatacatacatacagacacatgccccctttaaattttttagatttatttatttatttagagacagggtctcactctagcccaggctggagtgctgtggcgtaatcttggctcactgcaacctccgcctcccgggcccaagtgatcctcccatctcagcctcctgagtagctgggattacaggcgcacaccaccaatgcccagctagtttttgtgtttttcatagagacagggtctcaccatgtcattcaggttggtcttgaactcctgggctcaagcagtctgcctgccttggcttcccagtgctgggattacaggcgtgagccaccgtgcccggctaaaaagtatttttaagttctgcatattgcttatttcacttaacactatattagagattgttttatatcaatacatatagatatgcttattcttgttgacagttgcataattttccattaaattgatgtatcatgggcagttaaccagttactcgttttactcttagcataactttagggaacaatgtggatgttttgtggttaaagctattaaaacagtggttcttgaccagatgtgtgtttcagaatgttcatctcacatttccagttgctactgatgctgctggtctaggaaccacatatcaaaaccatttggtctccgactaagataaaccctactttatccaattctgtgctcctcttaatatcatatacagataggtttttgttttgtctgtgattaaatgtatcatctaagatactacctactgatcataacgttcatattaaagtattgggttaccttaccaaaaanaaaananaaaaaatttttgcggcccgccccgaaaatttaacctctttggcggcccaggaaggaaatgcaggtccacagaacggggagtcgggtcccaaaaacgggcgcgttgaacaggtgggctgttagccaccacccccggggaggg

SEQ ID NO: 10899 - DNA, 1977 bp, Homo sapiens
  misc_feature (1829)..(1829): n is a, c, g, or t
  misc_feature (1834)..(1834): n is a, c, g, or t
  misc_feature (1836)..(1836): n is a, c, g, or t
ttctggggagattttaccgagcaacgtagggaaacggctgcctggctacctacccctttttgacacccacacgtgctcggcaccttacatacactgcgtgattttatcctaaagccacttttaaaatcttagtgtgtaaacagagaaactgggcgtcacataaggcaagtgacctgcacagcctgctccggaggagacccgtacgatcccagagacaagcactgaacataaggcacccggcgccgcgcccgctttgcaacctctcgcgacagttgtacgtcatccgagagcgccgtggaagtcgtgctgcaggcgtcgcgccaatcttcgctctgaggtgctgtctcaccggtgagacctggaagcgggcgagtctcgtgctgtgtcggacctgcagcccctggccttccgccaccatggagtacctcatcggtatccaaggccccgactatgttcttgtcgcctccgaccgggtggccgccagcaatattgtccagatgaaggacgatcatgacaagatgtttaagatgagtgaaaagatattactcctgtgtgttggagaggctggagacactgtacagtttgcagaatatattcagaaaaacgtgcaactttataagatgcgaaatggatatgaattgtctcccacggcagcagctaacttcacacgccgaaacctggctgactgtcttcggagtcggaccccatatcatgtgaacctcctcctggctggctatgatgagcatgaagggccagcgctgtattacatggactacctggcagccttggccaaggccccttttgcagcccacggctatggtgccttcctgactctcagtatcctcgaccgatactacacaccgactatctcacgtgagagggcagtggaactccttaggaaatgtctggaggagctccagaaacgcttcatcctgaatctgccaaccttcagtgttcgaatcattgacaaaaatggcatccatgacctggataacatttccttccccaaacagggctcctaacatcatgtcctccctcccacttgccagggaacttttttttgatgggctcctttatttttttctactcttttcaggcgcactcttgataaatggttaattcagaataaaggtgactatggatataattgagccctctggtccaggtctcagtttacctaatattacctcagaaaggatatggagggaagatgatctttttgccaggtctgacttttcttcctgctccgccctccattaacgctcagtaccctttagcagctgacggccccacgttctactccatgcttggcttcccagtgctgggattacaggcgtgagccaccgtgcccggctaaaaagtatttttaagttctgcatattgcttatttcacttaacactatattagagattgttttatatcaatacatatagatatgcttattcttgttgacagttgcataattttccattaaattgatgtatcatgggcagttaaccagttactcgttttactcttagcataactttagggaacaatgtggatgttttgtggttaaagctattaaaacagtggttcttgaccagatgtgtgtttcagaatgttcatctcacatttccagttgctactgatgctgctggtctaggaaccacatatcaaaaccatttggtctccgactaagataaaccctactttatccaattctgtgctcctcttaatatcatatacagataggtttttgttttgtctgtgattaaatgtatcatctaagatactacctactgatcataacgttcatattaaagtattgggttaccttaccaaaaanaaaananaaaaaatttttgcggcccgccccgaaaatttaacctctttggcggcccaggaaggaaatgcaggtccacagaacggggagtcgggtcccaaaaacgggcgcgttgaacaggtgggctgttagccaccacccccggggaggg

SEQ ID NO: 10900 - DNA, 2544 bp, Homo sapiens
ttctggggagattttaccgagcaacgtagggaaacggctgcctggctacctacccctttttgacacccacacgtgctcggcaccttacatacactgcgtgattttatcctaaagccacttttaaaatcttagtgtgtaaacagagaaactgggcgtcacataaggcaagtgacctgcacagcctgctccggaggagacccgtacgatcccagagacaagcactgaacataaggcacccggcgccgcgcccgctttgcaacctctcgcgacagttgtacgtcatccgagagcgccgtggaagtcgtgctgcaggcgtcgcgccaatcttcgctctgaggtgctgtctcaccgatcatgacaagatgtttaagatgagtgaaaagatattactcctgtgtgttggagaggctggagacactgtacagtttgcagaatatattcagaaaaacgtgcaactttataagatgcgaaatggatatgaattgtctcccacggcagcagctaacttcacacgccgaaacctggctgactgtcttcggagtcggaccccatatcatgtgaacctcctcctggctggctatgatgagcatgaagggccagcgctgtattacatggactacctggcagccttggccaaggccccttttgcagcccacggctatggtgccttcctgactctcagtatcctcgaccgatactacacaccgactatctcacgtgagagggcagtggaactccttaggaaatgtctggaggagctccagaaacgcttcatcctgaatctgccaaccttcagtgttcgaatcattgacaaaaatggcatccatgacctggataacatttccttccccaaacagggctcctaacatcatgtcctccctcccacttgccagggaacttttttttgatgggctcctttatttttttctactcttttcaggcgcactcttgataaatggttaattcagaataaaggtgactatggatataattgagccctctggtccaggtctcagtttacctaatattacctcagaaaggatatggagggaagatgatctttttgccaggtctgacttttcttcctgctccgccctccattaacgctcagtaccctttagcagctgacggccccacgttctactccatgcttggcttcctttccaactagctctttcatatattttacttgctagtatctccattctctctaaagtagtggttctttttgcccttaaacttaaatttttaaattaattaacctgaattaataatacatgcacttaatgtaacatgcaaacagtacaaaaacatgtagtgaaaaatatttcttccagagctgggtgtggtggctcatacctgtaatcccagcactttgggaggccgaggcgggcggatcacgaggtcaagagagcgagaccatcctgaccaacatggtgaaaccccgtctctactaaaaatacaaaaattagctgggcgtggtggcacgcacccctagtcccagctactggggaggctgagacaggagaatcggtcgaacccgggaggcagaggttgcagtgagcctagatcgcgccactgtactccagcctggcaacagagtgagactccgtctcaaaaaaaagaaggaaaaatgtttcttccatccctataatccagtcatctgcttcctgcttcccttcctggaggaaacttcagctactaatttcttatgttttttaagagatattctgttactgtgtaaagtatacatacatacagacacatgccccctttaaattttttagatttatttatttatttagagacagggtctcactctagcccaggctggagtgctgtggcgtaatcttggctcactgcaacctccgcctcccgggcccaagtgatcctcccatctcagcctcctgagtagctgggattacaggcgcacaccaccaatgcccagctagtttttgtgtttttcatagagacagggtctcaccatgtcattcaggttggtcttgaactcctgggctcaagcagtctgcctgccttggcttcccagtgctgggattacaggcgtgagccaccgtgcccggctaaaaagtatttttaagttctgcatattgcttatttcacttaacactatattagagattgttttatatcaatacatatagatatgcttattcttgttgacagttgcataattttccattaaattgatgtatcatgggcagttaaccagttactcgttttactcttagcataactttagggaacaatgtggatgttttgtggttaaagctattaaaacagtggttcttgaccagatgtgtgtttcagaatgttcatctcacatttccagttgctactgatgctgctggtctaggaaccacatatcaaaaccatttggtctccgactaagataaaccctactttatccaattctgtgctcctcttaatatcatatacagataggtttttgttttgtctgtgattaaatgtatcatctaagatactacctactgatcataacgttcatattaaagtattgggtta

SEQ ID NO: 10901 - DNA, 1162 bp, Homo sapiens
ttctggggagattttaccgagcaacgtagggaaacggctgcctggctacctacccctttttgacacccacacgtgctcggcaccttacatacactgcgtgattttatcctaaagccacttttaaaatcttagtgtgtaaacagagaaactgggcgtcacataaggcaagtgacctgcacagcctgctccggaggagacccgtacgatcccagagacaagcactgaacataaggcacccggcgccgcgcccgctttgcaacctctcgcgacagttgtacgtcatccgagagcgccgtggaagtcgtgctgcaggcgtcgcgccaatcttcgctctgaggtgctgtctcaccggtgagacctggaagcgggcgagtctcgtgctgtgtcggacctgcagcccctggccttccgccaccatggagtacctcatcggtatccaaggccccgactatgttcttgtcgcctccgaccgggtggccgccagcaatattgtccagatgaaggacgatcatgacaagatgtttaagatgagtgaaaagatattactcctgtgtgttggagaggctggagacactgtacagtttgcagaatatattcagaaaaacgtgcaactttataagatgcgaaatggatatgaattgtctcccacggcagcagctaacttcacacgccgaaacctggctgactgtcttcggagtcggaccccatatcatgtgaacctcctcctggctggctatgatgagcatgaagggccagcgctgtattacatggactacctggcagccttggccaaggccccttttgcagcccacggctatggtgccttcctgactctcagtatcctcgaccgatactacacaccgactatctcacgtgagagggcagtggaactccttaggaaatgtctggaggagctccagaaacgcttcatcctgaatctgccaaccttcagtgttcgaatcattgacaaaaatggcatccatgacctggataacatttccttccccaaacagggctcctaacatcatgtcctccctcccacttgccagggaacttttttttgatgggctcctttatttttttctactcttttcaggcgcactaaaacacaatcggtctaaatcagaataacacagactctggacctaaaagacacaacgtc

SEQ ID NO: 10902 - DNA, 2577 bp, Homo sapiens
ttctggggagattttaccgagcaacgtagggaaacggctgcctggctacctacccctttttgacacccacacgtgctcggcaccttacatacactgcgtgattttatcctaaagccacttttaaaatcttagtgtgtaaacagagaaactgggcgtcacataaggcaagtgacctgcacagcctgctccggaggagacccgtacgatcccagagacaagcactgaacataaggcacccggcgccgcgcccgctttgcaacctctcgcgacagttgtacgtcatccgagagcgccgtggaagtcgtgctgcaggcgtcgcgccaatcttcgctctgaggtgctgtctcaccggtgagacctggaagcgggcgagtctcgtgctgtgtcggacctgcagcccctggccttccgccaccatggagtacctcatcggtatccaaggccccgactatgttcttgtcgcctccgaccgggtggccgccagcaatattgtccagatgaaggacggatatgaattgtctcccacggcagcagctaacttcacacgccgaaacctggctgactgtcttcggagtcggaccccatatcatgtgaacctcctcctggctggctatgatgagcatgaagggccagcgctgtattacatggactacctggcagccttggccaaggccccttttgcagcccacggctatggtgccttcctgactctcagtatcctcgaccgatactacacaccgactatctcacgtgagagggcagtggaactccttaggaaatgtctggaggagctccagaaacgcttcatcctgaatctgccaaccttcagtgttcgaatcattgacaaaaatggcatccatgacctggataacatttccttccccaaacagggctcctaacatcatgtcctccctcccacttgccagggaacttttttttgatgggctcctttatttttttctactcttttcaggcgcactcttgataaatggttaattcagaataaaggtgactatggatataattgagccctctggtccaggtctcagtttacctaatattacctcagaaaggatatggagggaagatgatctttttgccaggtctgacttttcttcctgctccgccctccattaacgctcagtaccctttagcagctgacggccccacgttctactccatgcttggcttcctttccaactagctctttcatatattttacttgctagtatctccattctctctaaagtagtggttctttttgcccttaaacttaaatttttaaattaattaacctgaattaataatacatgcacttaatgtaacatgcaaacagtacaaaaacatgtagtgaaaaatatttcttccagagctgggtgtggtggctcatacctgtaatcccagcactttgggaggccgaggcgggcggatcacgaggtcaagagagcgagaccatcctgaccaacatggtgaaaccccgtctctactaaaaatacaaaaattagctgggcgtggtggcacgcacccctagtcccagctactggggaggctgagacaggagaatcggtcgaacccgggaggcagaggttgcagtgagcctagatcgcgccactgtactccagcctggcaacagagtgagactccgtctcaaaaaaaagaaggaaaaatgtttcttccatccctataatccagtcatctgcttcctgcttcccttcctggaggaaacttcagctactaatttcttatgttttttaagagatattctgttactgtgtaaagtatacatacatacagacacatgccccctttaaattttttagatttatttatttatttagagacagggtctcactctagcccaggctggagtgctgtggcgtaatcttggctcactgcaacctccgcctcccgggcccaagtgatcctcccatctcagcctcctgagtagctgggattacaggcgcacaccaccaatgcccagctagtttttgtgtttttcatagagacagggtctcaccatgtcattcaggttggtcttgaactcctgggctcaagcagtctgcctgccttggcttcccagtgctgggattacaggcgtgagccaccgtgcccggctaaaaagtatttttaagttctgcatattgcttatttcacttaacactatattagagattgttttatatcaatacatatagatatgcttattcttgttgacagttgcataattttccattaaattgatgtatcatgggcagttaaccagttactcgttttactcttagcataactttagggaacaatgtggatgttttgtggttaaagctattaaaacagtggttcttgaccagatgtgtgtttcagaatgttcatctcacatttccagttgctactgatgctgctggtctaggaaccacatatcaaaaccatttggtctccgactaagataaaccctactttatccaattctgtgctcctcttaatatcatatacagataggtttttgttttgtctgtgattaaatgtatcatctaagatactacctactgatcataacgttcatattaaagtattgggtta

SEQ ID NO: 10903 - DNA, 1868 bp, Homo sapiens
  misc_feature (45)..(45): n is a, c, g, or t
ttttattatagtcaaaaaataggaaagaggggggctattgttacngagagaggtttggagctccacagaatgtctggaggagctccagaaacgcttcatcctgaatctgccaaccttcagtgttcgaatcattgacaaaaatggcatccatgacctggataacatttccttccccaaacagggctcctaacatcatgtcctccctcccacttgccagggaacttttttttgatgggctcctttatttttttctactcttttcaggcgcactcttgataaatggttaattcagaataaaggtgactatggatataattgagccctctggtccaggtctcagtttacctaatattacctcagaaaggatatggagggaagatgatctttttgccaggtctgacttttcttcctgctccgccctccattaacgctcagtaccctttagcagctgacggccccacgttctactccatgcttggcttcctttccaactagctctttcatatattttacttgctagtatctccattctctctaaagtagtggttctttttgcccttaaacttaaatttttaaattaattaacctgaattaataatacatgcacttaatgtaacatgcaaacagtacaaaaacatgtagtgaaaaatatttcttccagagctgggtgtggtggctcatacctgtaatcccagcactttgggaggccgaggcgggcggatcacgaggtcaagagagcgagaccatcctgaccaacatggtgaaaccccgtctctactaaaaatacaaaaattagctgggcgtggtggcacgcacccctagtcccagctactggggaggctgagacaggagaatcggtcgaacccgggaggcagaggttgcagtgagcctagatcgcgccactgtactccagcctggcaacagagtgagactccgtctcaaaaaaaagaaggaaaaatgtttcttccatccctataatccagtcatctgcttcctgcttcccttcctggaggaaacttcagctactaatttcttatgttttttaagagatattctgttactgtgtaaagtatacatacatacagacacatgccccctttaaattttttagatttatttatttatttagagacagggtctcactctagcccaggctggagtgctgtggcgtaatcttggctcactgcaacctccgcctcccgggcccaagtgatcctcccatctcagcctcctgagtagctgggattacaggcgcacaccaccaatgcccagctagtttttgtgtttttcatagagacagggtctcaccatgtcattcaggttggtcttgaactcctgggctcaagcagtctgcctgccttggcttcccagtgctgggattacaggcgtgagccaccgtgcccggctaaaaagtatttttaagttctgcatattgcttatttcacttaacactatattagagattgttttatatcaatacatatagatatgcttattcttgttgacagttgcataattttccattaaattgatgtatcatgggcagttaaccagttactcgttttactcttagcataactttagggaacaatgtggatgttttgtggttaaagctattaaaacagtggttcttgaccagatgtgtgtttcagaatgttcatctcacatttccagttgctactgatgctgctggtctaggaaccacatatcaaaaccatttggtctccgactaagataaaccctactttatccaattctgtgctcctcttaatatcatatacagataggtttttgttttgtctgtgattaaatgtatcatctaagatactacctactgatcataacgttcatattaaagtattgggtta

SEQ ID NO: 10904 - DNA, 1202 bp, Homo sapiens
  misc_feature (1094)..(1094): n is a, c, g, or t
  misc_feature (1169)..(1169): n is a, c, g, or t
  misc_feature (1194)..(1195): n is a, c, g, or t
ttctggggagattttaccgagcaacgtagggaaacggctgcctggctacctacccctttttgacacccacacgtgctcggcaccttacatacactgcgtgattttatcctaaagccacttttaaaatcttagtgtgtaaacagagaaactgggcgtcacataaggcaagtgacctgcacagcctgctccggaggagacccgtacgatcccagagacaagcactgaacataaggcacccggcgccgcgcccgctttgcaacctctcgcgacagttgtacgtcatccgagagcgccgtggaagtcgtgctgcaggcgtcgcgccaatcttcgctctgaggtgctgtctcaccggtgagacctggaagcgggcgagtctcgtgctgtgtcggacctgcagcccctggccttccgccaccatggagtacctcatcggtatccaaggccccgactatgttcttgtcgcctccgaccgggtggccgccagcaatattgtccagatgaaggacgatcatgacaagatgtttaagatgagtgaaaagatattactcctgtgtgttggagaggctggagacactgtacagtttgcagaatatattcagaaaaacgtgcaactttataagatgcgaaatggatatgaattgtctcccacggcagcagctaacttcacacgccgaagaagcatcgttaaagtctctcttcaccctgccgtcatgtctaagtcagagtctcctaaagagcccgaacagctgaggaagctcttcattggagggttgagctttgaaacaactgatgagagcctgaggagccattttgagcaatggggaacgctcacggactgtgtggtaatgagagatccaaacaccaagcgctccaggggctttgggtttgtcacatatgccactgtggaggaggtggatgcagctatgaatgcaaggccacacaaggtggatggaagagttgtggaaccaaagagagctgtctccagagaagattctcaaagaccaggtgcccacttaactgtgaaaaagatatttgttggtggcatttaaagaagacactgaagaacatcacctaagagattattttgaacagtntggaaaaattgaagtggattgggaatcatgactgacccgaggcaatggcaagaaaaaggggcttttgcctttggnaaccctttgacgaccattgactccnnggattaa

SEQ ID NO: 10905 - DNA, 965 bp, Homo sapiens
ttctggggagattttaccgagcaacgtagggaaacggctgcctggctacctacccctttttgacacccacacgtgctcggcaccttacatacactgcgtgattttatcctaaagccacttttaaaatcttagtgtgtaaacagagaaactgggcgtcacataaggcaagtgacctgcacagcctgctccggaggagacccgtacgatcccagagacaagcactgaacataaggcacccggcgccgcgcccgctttgcaacctctcgcgacagttgtacgtcatccgagagcgccgtggaagtcgtgctgcaggcgtcgcgccaatcttcgctctgaggtgctgtctcaccggtgagacctggaagcgggcgagtctcgtgctgtgtcggacctgcagcccctggccttccgccaccatggagtacctcatcgatcatgacaagatgtttaagatgagtgaaaagatattactcctgtgtgttggagaggctggagacactgtacagtttgcagaatatattcagacagctaacttcacacgccgaaacctggctgactgtcttcggagtcggaccccatatcatgtgaacctcctcctggctggctatgatgagcatgaagggccagcgctgtattacatggactacctggcagccttggccaaggccccttttgcagcccacggctatggtgccttcctgactctcagtatcctcgaccgatactacacaccgattattttacgtgtgagggcagccgtacctcttagcaaatgtctgttcgcagctcctattttcgtttcatcccttatccttactactctacaaatggcccccacattgacataagcttctctcccttttcctgtctcttctctactttaccccattagctctcttaaccctagtgccctcctttctattgtttgtctaatctctctttacttctcttctttttatcctcat

SEQ ID NO: 10906 - DNA, 1406 bp, Homo sapiens
  misc_feature (1152)..(1152): n is a, c, g, or t
  misc_feature (1157)..(1157): n is a, c, g, or t
  misc_feature (1160)..(1160): n is a, c, g, or t
ttctggggagattttaccgagcaacgtagggaaacggctgcctggctacctacccctttttgacacccacacgtgctcggcaccttacatacactgcgtgattttatcctaaagccacttttaaaatcttagtgtgtaaacagagaaactgggcgtcacataaggcaagtgacctgcacagcctgctccggaggagacccgtacgatcccagagacaagcactgaacataaggcacccggcgccgcgcccgctttgcaacctctcgcgacagttgtacgtcatccgagagcgccgtggaagtcgtgctgcaggcgtcgcgccaatcttcgctctgaggtgctgtctcaccggtgagacctggaagcgggcgagtctcgtgctgtgtcggacctgcagcccctggccttccgccaccatggagtacctcatcggtatccaaggccccgactatgttcttgtcgcctccgaccgggtggccgccagcaatattgtccagatgaaggacgatcatgacaagatgtttaagatgagtgaaaagatattactcctgtgtgttggagaggctggagacactgtacagtttgcagaatatattcagaaaaacgtgcaactttataagatgcgaaatggatatgaattgtctcccacggcagcagctaacttcacacgccgaaacctggctgactgtcttcggagtcggaccccatatcatgtgaacctcctcctggctggctatgatgagcatgaagggccagcgctgtattacatggactacctggcagccttggccaaggccccttttgcagcccacggctatggtgccttcctgactctcagtatcctcgaccgatactacacaccgactatctcacgtgagagggcagtggaactccttaggaaatgtctggaggagctccagaaacgcttcatcctgaatctgccaaccttcagtgttcgaatcattgacaaaaatggcatccatgacctggataacatttccttccccaaacagggctcctaacatcatgtcctccctcccacttgccagggaacttttttttgatgggctcctttatttttttctactcttttcaggcgcactcttgataaatggttaattcagaataaaggtgactatggataaaaacaanacacnaancacacaaaacgcaacacaaaacgcccgggttcgggcccgcgacctgagccgcccagaaaacacgtcctcacaacacccaccccgtggggaagccggcgcgccccagtaggtggaagggagaacctgtgcgccataacgggatcccaaaggaagaacccggggaccaacacaagccgccggggactccccacccacataaaaaagacccccgggggacaaccgcgagcgtttcgagaacaacccgag

SEQ ID NO: 10907 - DNA, 824 bp, Homo sapiens
  misc_feature (128)..(128): n is a, c, g, or t
gtccagactgaaggaagagaccggaaggggctgattatcgatcaggtattccgcatggtgggctgcggcggctttccggtccaactacggacatgtcgtacatggagtatctgacgaaatcgcatgtnatgtacctcggtcacctccgaccgggtggccgccagcaatattgtccagatgaaggacgatcatgacaagatgtttaagatgagtgaaaagatattactcctgtgtgttggagaggctggagacactgtacagtttgcagaatatattcagaaaaacgtgcaactttataagatgcgaaatggatatgaattgtctcccacggcagcagctaacttcacacgccgaaacctggctgactgtcttcggagtcggaccccatatcatgtgaacctcctcctggctggctatgatgagcatgaagggccagcgctgtattacatggactacctggcagccttggccaaggccccttttgcagcccacggctatggtgccttcctgactctcagtatcctcgaccgatactacacaccgactatctcacgtgagagggcagtggaactccttaggaaatgtctggaggagctccagaaacgcttcatcctgaatctgccaaccttcagtgttcgaatcattgacaaaaatggcatccatgacctggataacatttccttccccaaacagggctcctaacatcatgtcctccctcccacttgccagggaacttttttttgatgggctcctttatttttttctactcttttcaggcgcactcttgataaatggttaattcagaataaaggtgactatggata

SEQ ID NO: 10908 - DNA, 759 bp, Homo sapiens
ccccagtaccagcccggggagaacctctaggcacaggcgggcccagaccggcttctcggcttggatcctgggctgggtggcccctgtctcggggcttgccccactctgcctgcctgctgttggtcctctctctgtggggctgaattgccaggggcgaggcccttcctctttggtggcatggaaggggcttctggacctatctcacgtgagagggcagtggaactccttaggaaatgtctggaggagctccagaaacgcttcatcctgaatctgccaaccttcagtgttcgaatcattgacaaaaatggcatccatgacctggataacatttccttccccaaacagggctcctaacatcatgtcctccctcccacttgccagggaacttttttttgatgggctcctttatttttttctactcttttcaggcgcactcttgataaatggttaattcagaataaaggtgactatggatacacaaaaacaaaaaaacaaaaaaaaaaaaaaaaaaaaaaaaaaaaaaaacaaacagaaaccagcacagcccgcagaacagaaaacaaacagaacaaggacaacacagaagataagacaacacgagaaagacagagacagaacaaagaaacagaacaacaacaacaggagaggcgcatcatcaaagaaaacgaacgcagaggcaagaaaaagaatcggcaacggacagataagaagaagagaccgaaaaagaaaaaagaataaacaaaaagaagaaaacacgca

SEQ ID NO: 10909 - DNA, 2700 bp, Homo sapiens
ttctggggagattttaccgagcaacgtagggaaacggctgcctggctacctacccctttttgacacccacacgtgctcggcaccttacatacactgcgtgattttatcctaaagccacttttaaaatcttagtgtgtaaacagagaaactgggcgtcacataaggcaagtgacctgcacagcctgctccggaggagacccgtacgatcccagagacaagcactgaacataaggcacccggcgccgcgcccgctttgcaacctctcgcgacagttgtacgtcatccgagagcgccgtggaagtcgtgctgcaggcgtcgcgccaatcttcgctctgaggtgctgtctcaccggtgagacctggaagcgggcgagtctcgtgctgtgtcggacctgcagcccctggccttccgccaccatggagtacctcatcggtatccaaggccccgactatgttcttgtcgcctccgaccgggtggccgccagcaatattgtccagatgaaggacgatcatgacaagatgtttaagatgagtgaaaagatattactcctgtgtgttggagaggctggagacactgtacagtttgcagaatatattcagaaaaacgtgcaactttataagatgcgaaatggatatgaattgtctcccacggcagcagctaacttcacacgccgaaacctggctgactgtcttcggagtcggaccccatatcatgtgaacctcctcctggctggctatgatgagcatgaagggccagcgctgtattacatggactacctggcagccttggccaaggccccttttgcagcccacggctatggtgccttcctgactctcagtatcctcgaccgatactacacaccgactatctcacgtgagagggcagtggaactccttaggaaatgtctggaggagctccagaaacgcttcatcctgaatctgccaaccttcagtgttcgaatcattgacaaaaatggcatccatgacctggataacatttccttccccaaacagggctcctaacatcatgtcctccctcccacttgccagggaacttttttttgatgggctcctttatttttttctactcttttcaggcgcactcttgataaatggttaattcagaataaaggtgactatggatataattgagccctctggtccaggtctcagtttacctaatattacctcagaaaggatatggagggaagatgatctttttgccaggtctgacttttcttcctgctccgccctccattaacgctcagtaccctttagcagctgacggccccacgttctactccatgcttggcttcctttccaactagctctttcatatattttacttgctagtatctccattctctctaaagtagtggttctttttgcccttaaacttaaatttttaaattaattaacctgaattaataatacatgcacttaatgtaacatgcaaacagtacaaaaacatgtagtgaaaaatatttcttccagagctgggtgtggtggctcatacctgtaatcccagcactttgggaggccgaggcgggcggatcacgaggtcaagagagcgagaccatcctgaccaacatggtgaaaccccgtctctactaaaaatacaaaaattagctgggcgtggtggcacgcacccctagtcccagctactggggaggctgagacaggagaatcggtcgaacccgggaggcagaggttgcagtgagcctagatcgcgccactgtactccagcctggcaacagagtgagactccgtctcaaaaaaaagaaggaaaaatgtttcttccatccctataatccagtcatctgcttcctgcttcccttcctggaggaaacttcagctactaatttcttatgttttttaagagatattctgttactgtgtaaagtatacatacatacagacacatgccccctttaaattttttagatttatttatttatttagagacagggtctcactctagcccaggctggagtgctgtggcgtaatcttggctcactgcaacctccgcctcccgggcccaagtgatcctcccatctcagcctcctgagtagctgggattacaggcgcacaccaccaatgcccagctagtttttgtgtttttcatagagacagggtctcaccatgtcattcaggttggtcttgaactcctgggctcaagcagtctgcctgccttggcttcccagtgctgggattacaggcgtgagccaccgtgcccggctaaaaagtatttttaagttctgcatattgcttatttcacttaacactatattagagattgttttatatcaatacatatagatatgcttattcttgttgacagttgcataattttccattaaattgatgtatcatgggcagttaaccagttactcgttttactcttagcataactttagggaacaatgtggatgttttgtggttaaagctattaaaacagtggttcttgaccagatgtgtgtttcagaatgttcatctcacatttccagttgctactgatgctgctggtctaggaaccacatatcaaaaccatttggtctccgactaagataaaccctactttatccaattctgtgctcctcttaatatcatatacagataggtttttgttttgtctgtgattaaatgtatcatctaagatactacctactgatcataacgttcatattaaagtattgggtta

SEQ ID NO: 10910 - DNA, 2470 bp, Homo sapiens
ttctggggagattttaccgagcaacgtagggaaacggctgcctggctacctacccctttttgacacccacacgtgctcggcaccttacatacactgcgtgattttatcctaaagccacttttaaaatcttagtgtgtaaacagagaaactgggcgtcacataaggcaagtgacctgcacagcctgctccggaggagacccgtacgatcccagagacaagcactgaacataaggcacccggcgccgcgcccgctttgcaacctctcgcgacagttgtacgtcatccgagagcgccgtggaagtcgtgctgcaggcgtcgcgccaatcttcgctctgaggtgctgtctcaccggtgagacctggaagcgggcgagtctcgtgctgtgtcggacctgcagcccctggccttccgccaccatggagtacctcatcggtatccaaggccccgactatgttcttgtcgcctccgaccgggtggccgccagcaatattgtccagatgaaggacgatcatgacaagatgtttaagatgagtgaaaagatattactcctgtgtgttggagaggctggagacactgtacagtttgcagaatatattcagaaaaacgtgcaactttataagatgcgaaatggatatgaattgtctcccacggcagcagctaacttcacacgccgaaacctggctgactgtcttcggagtcggaccccatatcatgtgaacctcctcctggctggctatgatgagcatgaagggccagcgctgtattacatggactacctggcagccttggccaaggccccttttgcagcccacggctatggtgccttcctgactctcagtatcctcgaccgatactacacaccgactatctcacgtgagagggcagtggaactccttaggaaatgtctggaggagctccagaaacgcttcatcctgaatctgccaaccttcagtgttcgaatcattgacaaaaatggcatccatgacctggataacatttccttccccaaacagggctcctaacatcatgtcctccctcccacttgccagggaacttttttttgatgggctcctttatttttttctactcttttcaggcgcactcttgataaatggttaattcagaataaaggtgactatggatataattgagccctctggtccaggtctcagtttacctaatattacctcagaaaggatatggagggaagatgatctttttgccaggtctgacttttcttcctgctccgccctccattaacgctcagtaccctttagcagctgacggccccacgttctactccatgcttggcttcctttccaactagctctttcatatattttacttgctagtatctccattctctctaaagtagtggttctttttgcccttaaacttaaatttttaaattaattaacctgaattaataatacatgcacttaatgtaacatgcaaacagtacaaaaacatgtagtgaaaaatatttcttccagagctgggtgtggtggctcatacctgtaatcccagcactttgggaggccgaggcgggcggatcacgaggtcaagagagcgagaccatcctgaccaacatggtgaaaccccgtctctactaaaaatacaaaaattagctgggcgtggtggcacgcacccctagtcccagctactggggaggctgagacaggagaatcggtcgaacccgggaggcagaggttgcagtgagcctagatcgcgccactgtactccagcctggcaacagagtgagactccgtctcaaaaaaaagaaggaaaaatgtttcttccatccctataatccagtcatctgcttcctgcttcccttcctggaggaaacttcagctactaatttcttatgttttttaagagatattctgttactgtgtaaagtatacatacatacagacacatgccccctttaaattttttagatttatttatttatttagagacagggtctcactctagcccaggctggagtgctgtggcgtaatcttggctcactgcaacctccgcctcccgggcccaagtgatcctcccatctcagcctcctgagtagctgggattacaggcgcacaccaccaatgcccagctagtttttgtgtttttcatagagacagggtctcaccatgtcattcaggttggtcttgaactcctgggctcaagcagtctgcctgccttggcttcccagtgctgggattacaggcgtgagccaccgtgcccggctaaaaagtatttttaagttctgcatattgcttatttcacttaacactatattagagattgttttatatcaatacatatagatatgcttattcttgttgacagttgcataattttccattaaattgatgtatcatgggcagttaaccagttactcgttttactcttagcataactttagggaacaatgtggatgttttgtggttaaagctattaaaacagtggttcttgacca

SEQ ID NO: 10911 - DNA, 2488 bp, Homo sapiens
ttctggggagattttaccgagcaacgtagggaaacggctgcctggctacctacccctttttgacacccacacgtgctcggcaccttacatacactgcgtgattttatcctaaagccacttttaaaatcttagtgtgtaaacagagaaactgggcgtcacataaggcaagtgacctgcacagcctgctccggaggagacccgtacgatcccagagacaagcactgaacataaggcacccggcgccgcgcccgctttgcaacctctcgcgacagttgtacgtcatccgagagcgccgtggaagtcgtgctgcaggcgtcgcgccaatcttcgctctgaggtgctgtctcaccggtgagacctggaagcgggcgagtctcgtgctgtgtcggacctgcagcccctggccttccgccaccatggagtacctcatcggtatccaaggccccgactatgttcttgtcgcctccgaccgggtggccgccagcaatattgtccagatgaaggacgatcatgacaagatgtttaagatgagtgaaaagatattactcctgtgtgttggagaggctggagacactgtacagtttgcagaatatattcagaaaaacgtgcaactttataagatgcgaaatggatatgaattgtctcccacggcagcagctaacttcacacgccgaaacctggctgactgtcttcggagtcggaccccatatcatgtgaacctcctcctggctggctatgatgagcatgaagggccagcgctgtattacatggactacctggcagccttggccaaggccccttttgcagcccacggctatggtgccttcctgactctcagtatcctcgaccgatactacacaccgactatctcacgtgagagggcagtggaactccttaggaaatgtctggaggagctccagaaacgcttcatcctgaatctgccaaccttcagtgttcgaatcattgacaaaaatggcatccatgacctggataacatttccttccccaaacagggctcctaacatcatgtcctccctcccacttgccagggaacttttttttgatgggctcctttatttttttctactcttttcaggcgcactcttgataaatggttaattcagaataaaggtgactatggatataattgagccctctggtccaggtctcagtttacctaatattacctcagaaaggatatggagggaagatgatctttttgccaggtctgacttttcttcctgctccgccctccattaacgctcagtaccctttagcagctgacggccccacgttctactccatgcttggcttcctttccaactagctctttcatatattttacttgctagtatctccattctctctaaagtagtggttctttttgcccttaaacttaaatttttaaattaattaacctgaattaataatacatgcacttaatgtaacatgcaaacagtacaaaaacatgtagtgaaaaatatttcttccagagctggggcgtgagccaccgtgcccggctaaaaagtatttttaagttctgcatattgcttatttcacttaacactatattagagattgttttatatcaatacatatagatatgcttattcttgttgacagttgcataattttccattaaattgatgtatcatgggcagttaaccagttactcgttttactcttagcataactttagggaacaatgtggatgttttgtggttaaagctattaaaacagtggttcttgaccagatgtgtgtttcagaatgttcatctcacatttccagttgctactgatgctgctggtctaggaaccacatatcaaaaccatttggtctccgactaagataaaccctactttatccaattctgtgctcctcttaatatcatatacagataggtttttgttttgtctgtgattaaatgtatcatctaagatactacctactgatcataacgttcatattaaagtattgggttaacattagatttgggtgtcttatacactatttaatacgccaatgataaatgccttacaccataagaagaaagctaatcattgagtaaatgggagaaaagagatgattcacgtcactacagttgattcaacctccaacaccaccatgaatatgcataggtttgagcttttagctagattcctgagtgtaaggcatctattttaaaagtgccacaggttggccgggtgcggtggctcatgcctgtaatcccagcactttggccgcccgccgaggcgggcggatcacctgaggtcaggagttcaagaccagcctggccaacatggtgaaaccccatctctactaaaaaaatatataacaattagccaggcgtggtggcacacgcctgtaaacccaactacttgggaggctgaggcaggagaattgcttgagcccgggagagggaggttgcagtgagccgagatcatgccactgcactccagcctggctgacagagcaagactctgtctc

SEQ ID NO: 10912 - DNA, 2486 bp, Homo sapiens
  misc_feature (272)..(272): n is a, c, g, or t
gatgaactaggactgaggagcaagcgagcaagcagcagttcgtggtgaagatggaaaagagtcctggagccagtgcgatttagtgaaggaagctaggaagaaggaaggagcgctaacgatttggtggtgaagctaggaaaaaggattccaggaaggagcaagtgcaatttggtgatgaaggtagcaggcggcttggcttggcaaccacacggaggaggcgagcaggcgttgtgcgtagaggatcctgttgctggcgacacgtgtcgccagcnatattgtccagatgaaggacgatcatgacaagatgtttaagatgagtgaaaagatattactcctgtgtgttggagaggctggagacactgtacagtttgcagaatatattcagaaaaacgtgcaactttataagatgcgaaatggatatgaattgtctcccacggcagcagctaacttcacacgccgaaacctggctgactgtcttcggagtcggaccccatatcatgtgaacctcctcctggctggctatgatgagcatgaagggccagcgctgtattacatggactacctggcagccttggccaaggccccttttgcagcccacggctatggtgccttcctgactctcagtatcctcgaccgatactacacaccgactatctcacgtgagagggcagtggaactccttaggaaatgtctggaggagctccagaaacgcttcatcctgaatctgccaaccttcagtgttcgaatcattgacaaaaatggcatccatgacctggataacatttccttccccaaacagggctcctaacatcatgtcctccctcccacttgccagggaacttttttttgatgggctcctttatttttttctactcttttcaggcgcactcttgataaatggttaattcagaataaaggtgactatggatataattgagccctctggtccaggtctcagtttacctaatattacctcagaaaggatatggagggaagatgatctttttgccaggtctgacttttcttcctgctccgccctccattaacgctcagtaccctttagcagctgacggccccacgttctactccatgcttggcttcctttccaactagctctttcatatattttacttgctagtatctccattctctctaaagtagtggttctttttgcccttaaacttaaatttttaaattaattaacctgaattaataatacatgcacttaatgtaacatgcaaacagtacaaaaacatgtagtgaaaaatatttcttccagagctgggtgtggtggctcatacctgtaatcccagcactttgggaggccgaggcgggcggatcacgaggtcaagagagcgagaccatcctgaccaacatggtgaaaccccgtctctactaaaaatacaaaaattagctgggcgtggtggcacgcacccctagtcccagctactggggaggctgagacaggagaatcggtcgaacccgggaggcagaggttgcagtgagcctagatcgcgccactgtactccagcctggcaacagagtgagactccgtctcaaaaaaaagaaggaaaaatgtttcttccatccctataatccagtcatctgcttcctgcttcccttcctggaggaaacttcagctactaatttcttatgttttttaagagatattctgttactgtgtaaagtatacatacatacagacacatgccccctttaaattttttagatttatttatttatttagagacagggtctcactctagcccaggctggagtgctgtggcgtaatcttggctcactgcaacctccgcctcccgggcccaagtgatcctcccatctcagcctcctgagtagctgggattacaggcgcacaccaccaatgcccagctagtttttgtgtttttcatagagacagggtctcaccatgtcattcaggttggtcttgaactcctgggctcaagcagtctgcctgccttggcttcccagtgctgggattacaggcgtgagccaccgtgcccggctaaaaagtatttttaagttctgcatattgcttatttcacttaacactatattagagattgttttatatcaatacatatagatatgcttattcttgttgacagttgcataattttccattaaattgatgtatcatgggcagttaaccagttactcgttttactcttagcataactttagggaacaatgtggatgttttgtggttaaagctattaaaacagtggttcttgaccagatgtgtgtttcagaatgttcatctcacatttccagttgctactgatgctgctggtctaggaaccacatatcaaaaccatttggtctccgactaagataaaccctactttatccaattctgtgctcctcttaatatcatatacagataggtttttgttttgtctgtgattaaatgtatcatctaagatactacctactgatcataacgttcatattaaagtattgggtta

SEQ ID NO: 10913 - DNA, 1129 bp, Homo sapiens
ttctggggagattttaccgagcaacgtagggaaacggctgcctggctacctacccctttttgacacccacacgtgctcggcaccttacatacactgcgtgattttatcctaaagccacttttaaaatcttagtgtgtaaacagagaaactgggcgtcacataaggcaagtgacctgcacagcctgctccggaggagacccgtacgatcccagagacaagcactgaacataaggcacccggcgccgcgcccgctttgcaacctctcgcgacagttgtacgtcatccgagagcgccgtggaagtcgtgctgcaggcgtcgcgccaatcttcgctctgaggtgctgtctcaccggtgagacctggaagcgggcgagtctcgtgctgtgtcggacctgcagcccctggccttccgccaccatggagtacctcatcggtatccaaggccccgactatgttcttgtcgcctccgaccgggtggccgccagcaatattgtccagatgaaggacgatcatgacaagatgtttaagatgagtgaaaagatattactcctgtgtgttggagaggctggagacactgtacagtttgcagaatatattcagaaaaacgtgcaactttataagatgcgaaatggatatgaattgtctcccacggcagcagctaacttcacacgccgaaacctggctgactgtcttcggagtcggaccccatatcatgtgaacctcctcctggctggctatgatgagcatgaagggccagcgctgtattacatggactacctggcagccttggccaaggccccttttgcagcccacggctatggtgccttcctgactctcagtatcctcgaccgatactacacaccgactatctcacgtgagagggcagtggaactccttaggaaatgtctggaggagctccagaaacgcttcatcctgaatctgccaaccttcagtgttcgaatcattgacaaaaatggcatccatgacctggataacatttccttccccaaacagggctcctaacatcatgtcctccctcccacttgccagggaacttttttttgatgggctcctttatttttttaattcagaataaaggtgactatggatataatttgaacaaaaccacg

SEQ ID NO: 10914 - DNA, 2646 bp, Homo sapiens
ttctggggagattttaccgagcaacgtagggaaacggctgcctggctacctacccctttttgacacccacacgtgctcggcaccttacatacactgcgtgattttatcctaaagccacttttaaaatcttagtgtgtaaacagagaaactgggcgtcacataaggcaagtgacctgcacagcctgctccggaggagacccgtacgatcccagagacaagcactgaacataaggcacccggcgccgcgcccgctttgcaacctctcgcgacagttgtacgtcatccgagagcgccgtggaagtcgtgctgcaggcgtcgcgccaatcttcgctctgaggtgctgtctcaccggtgagacctggaagcgggcgagtctcgtgctgtgtcggacctgcagcccctggccttccgccaccatggagtacctcatcggtatccaaggccccgactatgttcttgtcgcctccgaccgggtggccgccagcaatattgtccagatgaaggacgatcatgacaagatgtttaagatgagtgaaaagatattactcctgtgtgttggagaggctggagacactgtacagtttgcagaatatattcagacagctaacttcacacgccgaaacctggctgactgtcttcggagtcggaccccatatcatgtgaacctcctcctggctggctatgatgagcatgaagggccagcgctgtattacatggactacctggcagccttggccaaggccccttttgcagcccacggctatggtgccttcctgactctcagtatcctcgaccgatactacacaccgactatctcacgtgagagggcagtggaactccttaggaaatgtctggaggagctccagaaacgcttcatcctgaatctgccaaccttcagtgttcgaatcattgacaaaaatggcatccatgacctggataacatttccttccccaaacagggctcctaacatcatgtcctccctcccacttgccagggaacttttttttgatgggctcctttatttttttctactcttttcaggcgcactcttgataaatggttaattcagaataaaggtgactatggatataattgagccctctggtccaggtctcagtttacctaatattacctcagaaaggatatggagggaagatgatctttttgccaggtctgacttttcttcctgctccgccctccattaacgctcagtaccctttagcagctgacggccccacgttctactccatgcttggcttcctttccaactagctctttcatatattttacttgctagtatctccattctctctaaagtagtggttctttttgcccttaaacttaaatttttaaattaattaacctgaattaataatacatgcacttaatgtaacatgcaaacagtacaaaaacatgtagtgaaaaatatttcttccagagctgggtgtggtggctcatacctgtaatcccagcactttgggaggccgaggcgggcggatcacgaggtcaagagagcgagaccatcctgaccaacatggtgaaaccccgtctctactaaaaatacaaaaattagctgggcgtggtggcacgcacccctagtcccagctactggggaggctgagacaggagaatcggtcgaacccgggaggcagaggttgcagtgagcctagatcgcgccactgtactccagcctggcaacagagtgagactccgtctcaaaaaaaagaaggaaaaatgtttcttccatccctataatccagtcatctgcttcctgcttcccttcctggaggaaacttcagctactaatttcttatgttttttaagagatattctgttactgtgtaaagtatacatacatacagacacatgccccctttaaattttttagatttatttatttatttagagacagggtctcactctagcccaggctggagtgctgtggcgtaatcttggctcactgcaacctccgcctcccgggcccaagtgatcctcccatctcagcctcctgagtagctgggattacaggcgcacaccaccaatgcccagctagtttttgtgtttttcatagagacagggtctcaccatgtcattcaggttggtcttgaactcctgggctcaagcagtctgcctgccttggcttcccagtgctgggattacaggcgtgagccaccgtgcccggctaaaaagtatttttaagttctgcatattgcttatttcacttaacactatattagagattgttttatatcaatacatatagatatgcttattcttgttgacagttgcataattttccattaaattgatgtatcatgggcagttaaccagttactcgttttactcttagcataactttagggaacaatgtggatgttttgtggttaaagctattaaaacagtggttcttgaccagatgtgtgtttcagaatgttcatctcacatttccagttgctactgatgctgctggtctaggaaccacatatcaaaaccatttggtctccgactaagataaaccctactttatccaattctgtgctcctcttaatatcatatacagataggtttttgttttgtctgtgattaaatgtatcatctaagatactacctactgatcataacgttcatattaaagtattgggtta

SEQ ID NO: 10915 - DNA, 1397 bp, Homo sapiens
ttctggggagattttaccgagcaacgtagggaaacggctgcctggctacctacccctttttgacacccacacgtgctcggcaccttacatacactgcgtgattttatcctaaagccacttttaaaatcttagtgtgtaaacagagaaactgggcgtcacataaggcaagtgacctgcacagcctgctccggaggagacccgtacgatcccagagacaagcactgaacataaggcacccggcgccgcgcccgctttgcaacctctcgcgacagttgtacgtcatccgagagcgccgtggaagtcgtgctgcaggcgtcgcgccaatcttcgctctgaggtgctgtctcaccggtgagacctggaagcgggcgagtctcgtgctgtgtcggacctgcagcccctggccttccgccaccatggagtacctcatcggtatccaaggccccgactatgttcttgtcgcctccgaccgggtggccgccagcaatattgtccagatgaaggacgatcatgacaagatgtttaagatgagtgaaaagatattactcctgtgtgttggagaggctggagacactgtacagtttgcagaatatattcagaaaaacgtgcaactttataagatgcgaaatggatatgaattgtctcccacggcagcagctaacttcacacgccgaaacctggctgactgtcttcggagtcggatcttggctcactgcaacctccgcctcccgggcccaagtgatcctcccatctcagcctcctgagtagctgggattacaggcgcacaccaccaatgcccagctagtttttgtgtttttcatagagacagggtctcaccatgtcattcaggttggtcttgaactcctgggctcaagcagtctgcctgccttggcttcccagtgctgggattacaggcgtgagccaccgtgcccggctaaaaagtatttttaagttctgcatattgcttatttcacttaacactatattagagattgttttatatcaatacatatagatatgcttattcttgttgacagttgcataattttccattaaattgatgtatcatgggcagttaaccagttactcgttttactcttagcataactttagggaacaatgtggatgttttgtggttaaagctattaaaacagtggttcttgaccagatgtgtgtttcagaatgttcatctcacatttccagttgctactgatgctgctggtctaggaaccacatatcaaaaccatttggtctccgactaagataaaccctactttatccaattctgtgctcctcttaatatcatatacagataggtttttgttttgtctgtgattaaatgtatcatctaagatactacctactgatcataacgttcatattaaagtattgggtta

SEQ ID NO: 10916 - DNA, 693 bp, Homo sapiens
aatgtagctattatttattgtttgtctttctcctagaaagtaaactttctgagggcaagaatatttttcagttttgtttactactgtattgacagcttggtaggtagtaatcacttaaagttttgttacatgtccgaattaataagaggctgggcagattaactgttcatctgtaccttgaagtattaccagcctttacggaggacaaactagatcctttttgtccacatagtaaatataaacagcaaattgcagaaaagtatgcacagtatgatcttaattgtggcaaattctccttatgaatgtacaaacattcatgcatatctacatgtactgtgtagttaatagtacctttctaaaactgttaacatgggattcatcttggagagatgggggctgaaggaaagttttattttataccattttgtagtgtttgattttttttttttaaccatgggaatgtatttcctatatagcaataaaaaagagtttatttagtcacttctcctcttgcaggactacagaggaaaaaaattaatgttaatcatctgtggtgatgactataaccaaccttatttttcccttgaataatttaactggattttgttctcagatgtaaaggcttggatgaagcatttatcttctgtgtatatgtggtttgtctgatgaatttcttctgcatagtgttaccta

SEQ ID NO: 10917 - DNA, 574 bp, Homo sapiens
aatgtagctattatttattgtttgtctttctcctagaaagtaaactttctgagggcaagaatatttttcagttttgtttactactgtattgacagcttggtaggtagtaatcacttaaagttttgttacatgtccgaattaataagaggctgggcagattaactgttcatctgtaccttgaagtattaccagcctttacggaggacaaactagatcctttttgtccacatagtaaatataaacagcaaattgcagaaaagtatgcacagtatgatcttaattgtggcaaattctccttatgaatgtacaaacattcatgcatatctacatgtactgtgtagttaatagtacctttctaaaactgttaacatgggattcatcttggagagatgggggctgaaggaaagttttattttataccattttttatttgacgttattttccattttttaattttaattttaatttgagacggagttcactctcattgccaagctggagtgaatggcgtgatctcagctcactgagctctgtcagagatgataattcctcttcaaaaagtagtctctgtct

SEQ ID NO: 10918 - DNA, 351 bp, Homo sapiens
ttttctgagtatttttgatccacagttggttaaatctgcaggtgcaaacctgcaaatatgggggaccaactggaaagatacacgtgtaaagatattcattgcagcactgtttgtagggattaaaaatccagaaatggatgcagtatccatgaataaagaaatcactgaatgaattatattcagtgaaatattaggtagctttcaaagagtaagttagacttctatgtattgggagacaggtccctgatatgttgttacttgaaaacaaattatagatttgtgcatggcattttcttaccatttaagcaaaaatcctacacagtcttgtgtcacttaacaatggggacatgt

SEQ ID NO: 10919 - DNA, 796 bp, Homo sapiens
attagctggtttaagggaactgcacacacagcagggagccagattggaccacccccctacaaaccctaaagcgttagctgttagctccggggaagacctcccggcactaagcatggaaaaaggctttcacacccgacttctcttccgtctcctcactgatctaatggattcagcgcggtcactgctcccctcatgaaacttcctaacagtctactctcaccacttttccctctctgacctctgactgtctctcttcagccgtgtcatcacacaccctcccgccagctgcaggggtcctctgaaggtcagccctctgtgctgaggcctgtgcaacatgcagccaccttgtgatttaagctgtcacatctgaatccccagctttggcctctgcctggccacctgaaggacctcaccacggctcaatggtccaaagcagggtcatctttctacaggagtgcctccccttccccactggcccattggtgtcacagctcctgtcaccactctgcaactctttgttctcattcctcactcaacaaatatttgattgcccactatgtgccaaacacaagactagatgtcgaagacaaacataagccaaaccaagacacatctgtcaaaggcatttgagttagatggaaagaaatataaaattacagttgggaaaagtgctacaaaggctggacatggtggctcacgcctgtaatcctaccactttgggaggccaaggctggagggtcagttgagcccaggagttcgagacaaacctgggcaacatagcgagtccctgtctctt

SEQ ID NO: 10920 - DNA, 5418 bp, Homo sapiens
cctcctacccaaagattgatgatgtggaagaagaggggaggagtgcatacacttctgtcaactgctgcccaggatttgattcatgctgaactgaaaatgttgtttacaaaatgctttctgtcctctggctttaaacttggaagaaaaatgatacagaaggagtcagtaagggaagaagtgggaaaccaaaatatagtagagacatccatgatgcaagagccaaattaccagcaagagttaagtaaaccccaaacttggaaggatgtgattggtggatctcagcatagctctcatgaggataccaataaaaatattaactctgagcaggatattgttgaaatggtgtctttagctgctgaggaatcatctttaatgaatgacttatttgcacaagaaattgaatatagtccagttgaattggagtcattgagcaatgaagaaaatattgagacagagagatggaatggaagaatacttcagatgttaaatcgtttacgggtcgctgatcagggccaggcggctgcagcagcgactgcagaggcgctgcgccaagccgggccggagtggtgcgagccggcggggctgcggagggccagtggactcagcccccgggataccgcccatcccaccccttactcggacccacagcctcatggccatgtccctgccaggaagtagacggacctctgctggatcacgcaggcgcacctctccacctgtgagcgtgcgggatgcctacggcacctcttcgctcagcagcagcagcaattctggctcctacaagggcagtgacagcagtcccacgccaaggcgctccatgaaatacacgctgtgcagtgacaaccatggcatcaagcccccgaccccggagcagtacctgacccccctgcagcagaaggaggtgtgcatccggcacctgaaagcccggctgaaggacacacaggaccggctccaggaccgggacacagagattgatgacctgaagacgcagctgtcacgcatgcaggaggactggattgaggaggagtgccaccgcgtggaggcccagctggccctgaaggaggcccgaaaggagatcaagcagctcaagcaggtcatcgacactgtcaagaacaacctgattgacaaggacaaggggctgcagaagtacttcgtggacatcaacatccagaacaagaagctggagacgctgctgcacagcatggaggtggcccagaatggcatggccaaggaggatggcactggggagtcagccggtgggtcccctgcccgctccctcacccgcagctccacctacaccaagctgagtgacccggctgtctgtggtgaccgccagccgggtgatccctccagcggctctgctgaggatggggcagacagtggctttgcagcagccgatgacacactgagccggacggacgcgctggaagccagcagcctgctgtcgtcgggggtggactgtggcaccgaggagacctcgctgcacagctccttcggcctgggcccccgcttccctgccagcaacacctatgagaagctgctgtgtggcatggaggctggtgtgcaggccagctgcatgcaggagcgtgccatccagacagacttcgtgcagtaccagcctgaccttgacaccatcctggagaaagtgacccaggcccaggtctgtgggacagaccctgagtcaggggacaggtgcccagagctggatgcccacccttcagggcccagagaccccaactcagcagtggtggtgacagtgggtgatgagctagaggccccagagcccatcacccgtggacccaccccacagcggcctggtgccaaccccaaccctggccagtcggtgagcgtggtgtgccccatggaagaggaggaggaggctgccgtggctgagaaggagcccaagagctactggagccgccactacatcgtggatctgctggctgtggtggtgccggccgtgcccacggtggcctggctttgccgctcccagcggcgccagggccagcccatctacaacatcagctccctgctgcggggctgctgcactgtggccttgcactccatccgcaggatcagctgccgctcgctgagccagccgagtcccagcccagcgggcggcggctcccagctctgagggggcccattccggcagcggcgcctgcggcctgaccactgattgtagggatgccgttcccccctcccttctcccatgggcatcatcttatttatttagttttgggtgtggaactgtttctttttttcaagatgttaaaacagtcccgtggaaggagcaggggttggagaaaggcatcccaaagcttcgatggagagcagggaagggggacccaaggcaggaggtacaccagctggacaaattgcagggaggggagggagcgagggccaacccggcccctctgtccccttggctcttcagacagggccagccctgctcaggaagtctctggctgtcttcatgtggggaagccgggcttgagttgcccataggcccctgccctgcaccatcctgtccagtgccctgcgcactccatgccgtctcttccaagccaccttgcccgcagcccaggctcctgggccagtgctctctcctcaaatggaggcagccatggcctgaagtgcagatcactgacccagggctcagagcagaggccagaaccactgggccggccggcattccagcctccccagactgctgcccaccttgggactcaggagctcagtcaaggccacaggctggaggagagacggggctgggcgcaaggtggcggagggcagtgtgggttctgtgtctgtctgttcatcccaggctttcccgtcatccctttcctcttggcacttctgggtgtgtcagtcattattcctgtgaggtagctaagcccggcaagctcagtgctggggtaggagggcctgcctgagtcccagctcccagctggagaatccaccagcacaagaagaggaggcaggggcagaaacccaagggggctcccccagccttccaaggtgaggccatctcatctgcaggctgggaggcagggctggactcaggaacccacagcttactgaaaaagccagaggccatgactgcccccagaaacttgccccgagtttctctggggccctcgggcccaacttctgctttgcactatgttcactttggggttggttctcagccatccaagggtctccagtgaggtggctgcttgctgtctgagatgagggttcctaaaccttaaacctctctgcctctggaggagggtggggtattctggcaggatgaatcgcaggatggcgcgtactgaagccacgatgttcatccaggccaaagcagggtgtcctgggataggtttcctaggcaggggcgtggcagagcaggtaggcgccctgcaccctccctgctcccagcccaaggccagtcggcctgggaagttcactgccccaactcttttcccgggaccatactgagtcccccagccacgctgctgacattaccattattattttaccaagtaaactcactccttttcccccacaggggttacacccatctggttgtcccacccactcttcagaggctaggccccacctctgggggttggagggaccctgtgtcttactcgcccctctggcctaagggccactctggttatctgccaaggttgcttgccctcaccccaatgctccaacagccattgcctaactcatgggctctgcccttctgctcggtgccctccacgtgaggcggggcacctgcatgcactgggagggggcggctggcccagccctcggggcaggagccccctctgccacacgctttgtgcctccaaagctccccccgccttggtcagggcctcagaccagccaacctttgtggaataagccccagcccagccaaaccaaacccagatgcctgaggcctggctggggctgcccccgcaggacactgtggccatgccacggagggggcagtggacaaaaccaatccaaagccaagccgggactggctgcggacccagcctcctgtgccgcgcactcacggagctgcgtagtctcctcagacatagtcaaagctttgccgagaaaagaaatgtatgaactatatttgacaacataaaatctctctatttttcaccactggaatttagtcaagcttcaggcccctctgctcctgtctgtgtcttgcgtctgtggccttcctattgtgtcttgtgttttggtggatgtgacagggctggggccacagtctactctgtctctgctgctagagaagccacctgtggaggactgggctgtggttgggcctgaggcctgtggaggaggtgagtgtagccagcagcggccgtctactcctgttctggcctgagaccaccggtgtgggtcacgaggaccctggcccacagtgttgagggtcctctctttcgggggctctcctggggccttcgatgggcttttcttcttgtcagtggagggagcagctccccactcagccctgggacaggccctgggactgtggtggccggtggccctggcccagctctggagtgcatgtgtgtgtgctcagatcccgcatctatgcaaaggtgcaggctgcctgtgaggctccaggcggtggaggtgcggcagctgctgctcaggtgccatgccctgaagaggcagggtacacatggggctgggagggcaaagatggggcggggcctccccctgagagagctcaccctccacagtgacccttttccttcctgcctaatacctcctcccgttgggctgtgacttttcctcctgccctcagcctctgaaacagaaatctttggggcctcccctttccccagcgtctggcaagagctgatgaggtcctgaggaacagtgtccccaggaaccaccttctggagcctagcggccagacgtggcttctcctgagttctagggctcgggccagagtggcactactgcccggccagtccaggctcaggcaggaatcggacgctggggcccgggctctgcacagagagctgggcttgagtggagtttattgtagatttctcccaaggggatcacttagcttctcactgacacacccttcccaattgccacaagcgcaggggtatcttacagcactttggggaggggtgggacaaactgcaaggttctggggccaaggcctacccaggggcctctgcccagagaactcacaaccccctctctgacctaggggacaatgcaaacaggtcacagtgcattcccatattaggccatccccttcacgaagaattcaggggatgtgggaagtggggaggcggggagggatcttgactcttgtctcctttgtccttttgttcagacagagttgtacctgcagcagacaactctgaattaaagcatgaaaacacagcaaaaaaaaag

SEQ ID NO: 10921 - DNA, 5540 bp, Homo sapiens
ggcggcccctgcagggcagctgaagccatggaagcctccgcaggtcgctgatcagggccaggcggctgcagcagcgactgcagaggcgctgcgccaagccgggccggagtggtgcgagccggcggggctgcggagggccagtggactcagggttgttgagaggagtcaatggcataatacgggaagccccgaaccacgggccaactgggaagttgatggtcggcgagaccagcccatcctaatttggggttcctggtcctgctccaggagtcctacagcctgcagcccctaccagagagggaggactgaacagcaagggggtgtgtgggtctgagtatcagggtcctggggaagaagcaggcctggctcgtagagtagaagactcggtgccggcagtcaggaggccctgctcctgaagcctctgtgaccttgggcacggccttcactctgtctggggcacattcactcatctggagaacacagggttggactgattacttttagccactcctgacagttgtggttttaagttgggtggtgggaacctgtgcaccagccctattcaattcactggtggaggcagccgtggtctgccaggccctcgctcctggggtgtcctgccgaagggtgagaagagaagccatgccgggcagcggccccagcgagaggatgacgtggcctggcccggccctttctgcgggccccccaacccgccctctctcctcagcccccgggataccgcccatcccaccccttactcggacccacagcctcatggccatgtccctgccaggaagtagacggacctctgctggatcacgcaggcgcacctctccacctgtgagcgtgcgggatgcctacggcacctcttcgctcagcagcagcagcaattctggctcctacaagggcagtgacagcagtcccacgccaaggcgctccatgaaatacacgctgtgcagtgacaaccatggcatcaagcccccgaccccggagcagtacctgacccccctgcagcagaaggaggtgtgcatccggcacctgaaagcccggctgaaggacacacaggaccggctccaggaccgggacacagagattgatgacctgaagacgcagctgtcacgcatgcaggaggactggattgaggaggagtgccaccgcgtggaggcccagctggccctgaaggaggcccgaaaggagatcaagcagctcaagcaggtcatcgacactgtcaagaacaacctgattgacaaggacaaggggctgcagaagtacttcgtggacatcaacatccagaacaagaagctggagacgctgctgcacagcatggaggtggcccagaatggcatggccaaggaggatggcactggggagtcagccggtgggtcccctgcccgctccctcacccgcagctccacctacaccaagctgagtgacccggctgtctgtggtgaccgccagccgggtgatccctccagcggctctgctgaggatggggcagacagtggctttgcagcagccgatgacacactgagccggacggacgcgctggaagccagcagcctgctgtcgtcgggggtggactgtggcaccgaggagacctcgctgcacagctccttcggcctgggcccccgcttccctgccagcaacacctatgagaagctgctgtgtggcatggaggctggtgtgcaggccagctgcatgcaggagcgtgccatccagacagacttcgtgcagtaccagcctgaccttgacaccatcctggagaaagtgacccaggcccaggtctgtgggacagaccctgagtcaggggacaggtgcccagagctggatgcccacccttcagggcccagagaccccaactcagcagtggtggtgacagtgggtgatgagctagaggccccagagcccatcacccgtggacccaccccacagcggcctggtgccaaccccaaccctggccagtcggtgagcgtggtgtgccccatggaagaggaggaggaggctgccgtggctgagaaggagcccaagagctactggagccgccactacatcgtggatctgctggctgtggtggtgccggccgtgcccacggtggcctggctttgccgctcccagcggcgccagggccagcccatctacaacatcagctccctgctgcggggctgctgcactgtggccttgcactccatccgcaggatcagctgccgctcgctgagccagccgagtcccagcccagcgggcggcggctcccagctctgagggggcccattccggcagcggcgcctgcggcctgaccactgattgtagggatgccgttcccccctcccttctcccatgggcatcatcttatttatttagttttgggtgtggaactgtttctttttttcaagatgttaaaacagtcccgtggaaggagcaggggttggagaaaggcatcccaaagcttcgatggagagcagggaagggggacccaaggcaggaggtacaccagctggacaaattgcagggaggggagggagcgagggccaacccggcccctctgtccccttggctcttcagacagggccagccctgctcaggaagtctctggctgtcttcatgtggggaagccgggcttgagttgcccataggcccctgccctgcaccatcctgtccagtgccctgcgcactccatgccgtctcttccaagccaccttgcccgcagcccaggctcctgggccagtgctctctcctcaaatggaggcagccatggcctgaagtgcagatcactgacccagggctcagagcagaggccagaaccactgggccggccggcattccagcctccccagactgctgcccaccttgggactcaggagctcagtcaaggccacaggctggaggagagacggggctgggcgcaaggtggcggagggcagtgtgggttctgtgtctgtctgttcatcccaggctttcccgtcatccctttcctcttggcacttctgggtgtgtcagtcattattcctgtgaggtagctaagcccggcaagctcagtgctggggtaggagggcctgcctgagtcccagctcccagctggagaatccaccagcacaagaagaggaggcaggggcagaaacccaagggggctcccccagccttccaaggtgaggccatctcatctgcaggctgggaggcagggctggactcaggaacccacagcttactgaaaaagccagaggccatgactgcccccagaaacttgccccgagtttctctggggccctcgggcccaacttctgctttgcactatgttcactttggggttggttctcagccatccaagggtctccagtgaggtggctgcttgctgtctgagatgagggttcctaaaccttaaacctctctgcctctggaggagggtggggtattctggcaggatgaatcgcaggatggcgcgtactgaagccacgatgttcatccaggccaaagcagggtgtcctgggataggtttcctaggcaggggcgtggcagagcaggtaggcgccctgcaccctccctgctcccagcccaaggccagtcggcctgggaagttcactgccccaactcttttcccgggaccatactgagtcccccagccacgctgctgacattaccattattattttaccaagtaaactcactccttttcccccacaggggttacacccatctggttgtcccacccactcttcagaggctaggccccacctctgggggttggagggaccctgtgtcttactcgcccctctggcctaagggccactctggttatctgccaaggttgcttgccctcaccccaatgctccaacagccattgcctaactcatgggctctgcccttctgctcggtgccctccacgtgaggcggggcacctgcatgcactgggagggggcggctggcccagccctcggggcaggagccccctctgccacacgctttgtgcctccaaagctccccccgccttggtcagggcctcagaccagccaacctttgtggaataagccccagcccagccaaaccaaacccagatgcctgaggcctggctggggctgcccccgcaggacactgtggccatgccacggagggggcagtggacaaaaccaatccaaagccaagccgggactggctgcggacccagcctcctgtgccgcgcactcacggagctgcgtagtctcctcagacatagtcaaagctttgccgagaaaagaaatgtatgaactatatttgacaacataaaatctctctatttttcaccactggaatttagtcaagcttcaggcccctctgctcctgtctgtgtcttgcgtctgtggccttcctattgtgtcttgtgttttggtggatgtgacagggctggggccacagtctactctgtctctgctgctagagaagccacctgtggaggactgggctgtggttgggcctgaggcctgtggaggaggtgagtgtagccagcagcggccgtctactcctgttctggcctgagaccaccggtgtgggtcacgaggaccctggcccacagtgttgagggtcctctctttcgggggctctcctggggccttcgatgggcttttcttcttgtcagtggagggagcagctccccactcagccctgggacaggccctgggactgtggtggccggtggccctggcccagctctggagtgcatgtgtgtgtgctcagatcccgcatctatgcaaaggtgcaggctgcctgtgaggctccaggcggtggaggtgcggcagctgctgctcaggtgccatgccctgaagaggcagggtacacatggggctgggagggcaaagatggggcggggcctccccctgagagagctcaccctccacagtgacccttttccttcctgcctaatacctcctcccgttgggctgtgacttttcctcctgccctcagcctctgaaacagaaatctttggggcctcccctttccccagcgtctggcaagagctgatgaggtcctgaggaacagtgtccccaggaaccaccttctggagcctagcggccagacgtggcttctcctgagttctagggctcgggccagagtggcactactgcccggccagtccaggctcaggcaggaatcggacgctggggcccgggctctgcacagagagctgggcttgagtggagtttattgtagatttctcccaaggggatcacttagcttctcactgacacacccttcccaattgccacaagcgcaggggtatcttacagcactttggggaggggtgggacaaactgcaaggttctggggccaaggcctacccaggggcctctgcccagagaactcacaaccccctctctgacctaggggacaatgcaaacaggtcacagtgcattcccatattaggccatccccttcacgaagaattcaggggatgtgggaagtggggaggcggggagggatcttgactcttgtctcctttgtccttttgttcagacagagttgtacctgcagcagacaactctgaattaaagcatgaaaacacagcaaaaaaaaag

SEQ ID NO: 10922 - DNA, 3980 bp, Homo sapiens
ccgactggaaagggatgggagtgataccatagggtttggggggcttggcacaacggccctggcctctgcactgtgatagctccaagccaaatggtgcaaggcagctgctgggctgcggggaagaggggctgcacttcctgagctggtgcagcggcagagtggataaggatcaggaccccgagccctcctggccctccaaggcggggggacaccggctgcacccaggctgtgacctcagctgacgccgatgatccacatgggatgcagggtctaattttagctccagccacaggggccacagcccagaagcgtctgccagcgggcacaggggcagccagggctgctcaggcaaggggaggagtgggaagaccagcccagctccctccagcctgtccctggccaagccgcctcctgtgggagctctgactggtccccatggcctggcagacagccctcctctcagttgagggcaaggtcaaggggtgcagccaggagggcagggggacacggccctgcattctggacaggggttgcgtcagccagagcagtgcccaggggcaggggtccctgctgggagggaaaaggctggcttggttgtccaaaggccgagaaggcagagtcctgagagcaggggggccaggccagcaagctgggtcccacctggcctcctcctgcctggctggtgactcactatctgaccttagacaggcggcctggtctcgatgggcctcagtcttcccatctgtacaatgacagcacaggactagcaggtcggtcccagctctggtctcccgccccaggccctgctcttcctgcttgctggcagaggcctcccagcttccctagccctgactgtgggtggccacatgcagtcgtggaggagaagaaagtccctgtggctggcactgtcagcctcctggctcctgcttgtcctgctgggaggcttctcccttctccgcctggcgttgcctcccagacctcggcccggggcttcccaaggctggccccgctggctggatgcagagctcctgcagagcttctcccagcctggagagctcccagaagatgccgtttcacctcctcaagcccctcatggtggcagctgcaactgggaatcttgctttgatacctcaaagtgcaggggcgatggccttaaggtattcgtgtacccagcggttggaaccatctctgagactcatcgcaggatcctggcttccattgagggctctcgcttctacacattcagccctgctggggcctgcctcctcctcctcctcagcctggacgcccagactggagagtgcagctcaatgcctctgcaatggaacaggggcaggaaccatctggtcctccgtctccacccggctccctgccccaggaccttccagctgggacaggctatggtggctgaggccagccccacggtggactccttccggcccggctttgatgtggccctcccttttctccctgaagcccacccgttgcgaggtggggctcctggccagctgcggcaacacagcccccagcccggggtagccctgctagccctggaagaggagaggggtgggtggcgcacagcagacactggctcctctgcctgcccctgggatgggcgctgtgagcaagaccctggacctgggcagacccagcgccaggagacgctgcccaatgccaccttctgcctcatctctggccaccgtcccgaggctgcctcgcgcttcctccaagccctgcaggccggctgcatcccagtgcttctcagcccccgctgggagctgcccttctccgaggtcatcgactggaccaaggcagccatcgtagctgatgagaggctcccacttcaggtcctggctgccctccaggagatgtcccctgcacgggtcctcgccctgcgtcagcagacccagtttctatgggatgcctacttctcctcagtggagaaggtcatccataccactctggaggttattcaggaccggatttttggaacatcagctaacccctcactgctgtggaacagccccccaggggcactcctggccctgtctactttttccacaagcccccaggacttccccttctactacctgcaacagggctcccgccctgagggcagattcagcgccctgatctgggtggggcccccaggccagccccctctgaagctcatccaggcggtggcaggctcccagcactgtgcccagatcttggttctctggagcaatgagaggccactcccatccaggtggccggagacagctgtgcccttgacagtcattgatgggcacaggaaggttagtgatcgcttctacccatatagcaccatcagaacagatgccatcctcagcctcgatgcccgcagcagtctttccacaagtgaggtggactttgcctttctggtgtggcagagcttcccagagcggatggtgggcttcctgacgtcgagccatttctgggacgaggcccatggtggctggggctacactgctgagaggaccaacgaattctccatggttctcaccacagccgccttctaccataggtattaccacactctcttcacccactccctgcccaaggctctgaggaccctggcagatgaggcacccacctgtgtggacgtcctgatgaatttcatagtagcagcagtcaccaagctgccccctatcaaggcgcctgggggcccggggcccaggccaaagccgcctgccccagcccccgactgcatcaaccagatagcggcagcgttcggccacatgcccttgctgtcctctcgtctgcgtctggacccggtgctgtttaaggacccggtgtccgtgcagcgcaagaagtaccgcagcctggagaagccctaggggggcgacccgcggagaccccagcagaggtcgcagcccagctcccagggggcccggcgcctgccggcgggctccgctcttgggacaccggagaacctatcatgtcagccagcgggcccacacgtcggaccccggttggccaatcacaacaggggggcgtggccttaccttctcctgctcgccctcagccgcggagcctctgcggaggctgagccccgcgaccggagcgccgctctccgcttctccacccagctaacttctgctcgtctttcagagcattgtctcctccagggacttgcctggccctcctccccctccgcccccaatgggttcggtctcctttgcgctttcgcagcccagtgtttgccgcggttcccgcacggtcaggccccaggactggcttgcgagccccggggggcgggtcgtgtcgtgtccttttctctctggctaggcaggtgtgccgcaaatatttgacgaatagatggatggcagacattaactgcgtgcctggccctatgagggcggcggcgggacagggtgagcggagagacagaactgtccccgccccaccccgccacccattcctagggttcctagtcccgggaaggcaactacccaaagacgcctgggttgtcaggctcaatccttgagcctcaaccaaggagcagaggggtgcgggtaaacgaggagtggggcgaggaaagcgggatgggaacaagtggcctgtccccgcacggcccgcggctcagcctcggccgtctgccctgcactaccaaggccgaccactagaggtcagcgtcgcgccgcactcttcacccgcatgtccagagggcggccgggatgtggagggtgaacgctgtgggcagctcgggggctgaaagctgggaagagaaatctgaagaacagccccatctctttcgcctgcacacttggaactcagcaagaagggactgtttctaggtgggctgggcgcgagcagggactgtcccgagcggtataggtgagaatggagttggggggggacactaggtctccggggttcacccacctggagctggaattatcacttccgaaataaagcgcgtgtccttgccccctcacgctccaggctataaaaaaaaa

SEQ ID NO: 10923 - DNA, 1991 bp, Homo sapiens
ctagggactaccacagacaactctcttgagttctgaagccacaggtcactaccctcatgtcaccagaatccctgccttctacaagcccagaggcaaggacagagcagcggtgaaaggaccatggatccaactaacccttctcccatgtgcagtttacaaagctgacttctcaaacttcttccaccttgagaaagatcactcctgcccctcgcaacccgccttctgccccagatcccagacttcaagaacaaccccctatcctctagatcttggttctctggagcaatgagaggccactcccatccaggtggccggagacagctgtgcccttgacagtcattgatgggcacaggaaggtggactttgcctttctggtgtggcagagcttcccagagcggatggtgggcttcctgacgtcgagccatttctgggacgaggcccatggtggctggggctacactgctgagaggaccaacgaattctccatggttctcaccacagccgccttctaccataggtattaccacactctcttcacccactccctgcccaaggctctgaggaccctggcagatgaggcacccacctgtgtggacgtcctgatgaatttcatagtagcagcagtcaccaagctgccccctatcaaggtgccctatggcaagcagcgccaggaggctgctccactggcgcctgggggcccggggcccaggccaaagccgcctgccccagcccccgactgcatcaaccagatagcggcagcgttcggccacatgcccttgctgtcctctcgtctgcgtctggacccggtgctgtttaaggacccggtgtccgtgcagcgcaagaagtaccgcagcctggagaagccctaggggggcgacccgcggagaccccagcagaggtcgcagcccagctcccagggggcccggcgcctgccggcgggctccgctcttgggacaccggagaacctatcatgtcagccagcgggcccacacgtcggaccccggttggccaatcacaacaggggggcgtggccttaccttctcctgctcgccctcagccgcggagcctctgcggaggctgagccccgcgaccggagcgccgctctccgcttctccacccagctaacttctgctcgtctttcagagcattgtctcctccagggacttgcctggccctcctccccctccgcccccaatgggttcggtctcctttgcgctttcgcagcccagtgtttgccgcggttcccgcacggtcaggccccaggactggcttgcgagccccggggggcgggtcgtgtcgtgtccttttctctctggctaggcaggtgtgccgcaaatatttgacgaatagatggatggcagacattaactgcgtgcctggccctatgagggcggcggcgggacagggtgagcggagagacagaactgtccccgccccaccccgccacccattcctagggttcctagtcccgggaaggcaactacccaaagacgcctgggttgtcaggctcaatccttgagcctcaaccaaggagcagaggggtgcgggtaaacgaggagtggggcgaggaaagcgggatgggaacaagtggcctgtccccgcacggcccgcggctcagcctcggccgtctgccctgcactaccaaggccgaccactagaggtcagcgtcgcgccgcactcttcacccgcatgtccagagggcggccgggatgtggagggtgaacgctgtgggcagctcgggggctgaaagctgggaagagaaatctgaagaacagccccatctctttcgcctgcacacttggaactcagcaagaagggactgtttctaggtgggctgggcgcgagcagggactgtcccgagcggtataggtgagaatggagttggggggggacactaggtctccggggttcacccacctggagctggaattatcacttccgaaataaagcgcgtgtccttgccccctcacgctccaggctataaaaaaaaa

SEQ ID NO: 10924 - DNA, 4019 bp, Homo sapiens
ccgactggaaagggatgggagtgataccatagggtttggggggcttggcacaacggccctggcctctgcactgtgatagctccaagccaaatggtgcaaggcagctgctgggctgcggggaagaggggctgcacttcctgagctggtgcagcggcagagtggataaggatcaggaccccgagccctcctggccctccaaggcggggggacaccggctgcacccaggctgtgacctcagctgacgccgatgatccacatgggatgcagggtctaattttagctccagccacaggggccacagcccagaagcgtctgccagcgggcacaggggcagccagggctgctcaggcaaggggaggagtgggaagaccagcccagctccctccagcctgtccctggccaagccgcctcctgtgggagctctgactggtccccatggcctggcagacagccctcctctcagttgagggcaaggtcaaggggtgcagccaggagggcagggggacacggccctgcattctggacaggggttgcgtcagccagagcagtgcccaggggcaggggtccctgctgggagggaaaaggctggcttggttgtccaaaggccgagaaggcagagtcctgagagcaggggggccaggccagcaagctgggtcccacctggcctcctcctgcctggctggtgactcactatctgaccttagacaggcggcctggtctcgatgggcctcagtcttcccatctgtacaatgacagcacaggactagcaggtcggtcccagctctggtctcccgccccaggccctgctcttcctgcttgctggcagaggcctcccagcttccctagccctgactgtgggtggccacatgcagtcgtggaggagaagaaagtccctgtggctggcactgtcagcctcctggctcctgcttgtcctgctgggaggcttctcccttctccgcctggcgttgcctcccagacctcggcccggggcttcccaaggctggccccgctggctggatgcagagctcctgcagagcttctcccagcctggagagctcccagaagatgccgtttcacctcctcaagcccctcatggtggcagctgcaactgggaatcttgctttgatacctcaaagtgcaggggcgatggccttaaggtattcgtgtacccagcggttggaaccatctctgagactcatcgcaggatcctggcttccattgagggctctcgcttctacacattcagccctgctggggcctgcctcctcctcctcctcagcctggacgcccagactggagagtgcagctcaatgcctctgcaatggaacaggggcaggaaccatctggtcctccgtctccacccggctccctgccccaggaccttccagctgggacaggctatggtggctgaggccagccccacggtggactccttccggcccggctttgatgtggccctcccttttctccctgaagcccacccgttgcgaggtggggctcctggccagctgcggcaacacagcccccagcccggggtagccctgctagccctggaagaggagaggggtgggtggcgcacagcagacactggctcctctgcctgcccctgggatgggcgctgtgagcaagaccctggacctgggcagacccagcgccaggagacgctgcccaatgccaccttctgcctcatctctggccaccgtcccgaggctgcctcgcgcttcctccaagccctgcaggccggctgcatcccagtgcttctcagcccccgctgggagctgcccttctccgaggtcatcgactggaccaaggcagccatcgtagctgatgagaggctcccacttcaggtcctggctgccctccaggagatgtcccctgcacgggtcctcgccctgcgtcagcagacccagtttctatgggatgcctacttctcctcagtggagaaggtcatccataccactctggaggttattcaggaccggatttttggaacatcagctaacccctcactgctgtggaacagccccccaggggcactcctggccctgtctactttttccacaagcccccaggacttccccttctactacctgcaacagggctcccgccctgagggcagattcagcgccctgatctgggtggggcccccaggccagccccctctgaagctcatccaggcggtggcaggctcccagcactgtgcccagatcttggttctctggagcaatgagaggccactcccatccaggtggccggagacagctgtgcccttgacagtcattgatgggcacaggaaggttagtgatcgcttctacccatatagcaccatcagaacagatgccatcctcagcctcgatgcccgcagcagtctttccacaagtgaggtggactttgcctttctggtgtggcagagcttcccagagcggatggtgggcttcctgacgtcgagccatttctgggacgaggcccatggtggctggggctacactgctgagaggaccaacgaattctccatggttctcaccacagccgccttctaccataggtattaccacactctcttcacccactccctgcccaaggctctgaggaccctggcagatgaggcacccacctgtgtggacgtcctgatgaatttcatagtagcagcagtcaccaagctgccccctatcaaggtgccctatggcaagcagcgccaggaggctgctccactggcgcctgggggcccggggcccaggccaaagccgcctgccccagcccccgactgcatcaaccagatagcggcagcgttcggccacatgcccttgctgtcctctcgtctgcgtctggacccggtgctgtttaaggacccggtgtccgtgcagcgcaagaagtaccgcagcctggagaagccctaggggggcgacccgcggagaccccagcagaggtcgcagcccagctcccagggggcccggcgcctgccggcgggctccgctcttgggacaccggagaacctatcatgtcagccagcgggcccacacgtcggaccccggttggccaatcacaacaggggggcgtggccttaccttctcctgctcgccctcagccgcggagcctctgcggaggctgagccccgcgaccggagcgccgctctccgcttctccacccagctaacttctgctcgtctttcagagcattgtctcctccagggacttgcctggccctcctccccctccgcccccaatgggttcggtctcctttgcgctttcgcagcccagtgtttgccgcggttcccgcacggtcaggccccaggactggcttgcgagccccggggggcgggtcgtgtcgtgtccttttctctctggctaggcaggtgtgccgcaaatatttgacgaatagatggatggcagacattaactgcgtgcctggccctatgagggcggcggcgggacagggtgagcggagagacagaactgtccccgccccaccccgccacccattcctagggttcctagtcccgggaaggcaactacccaaagacgcctgggttgtcaggctcaatccttgagcctcaaccaaggagcagaggggtgcgggtaaacgaggagtggggcgaggaaagcgggatgggaacaagtggcctgtccccgcacggcccgcggctcagcctcggccgtctgccctgcactaccaaggccgaccactagaggtcagcgtcgcgccgcactcttcacccgcatgtccagagggcggccgggatgtggagggtgaacgctgtgggcagctcgggggctgaaagctgggaagagaaatctgaagaacagccccatctctttcgcctgcacacttggaactcagcaagaagggactgtttctaggtgggctgggcgcgagcagggactgtcccgagcggtataggtgagaatggagttggggggggacactaggtctccggggttcacccacctggagctggaattatcacttccgaaataaagcgcgtgtccttgccccctcacgctccaggctataaaaaaaaa

SEQ ID NO: 10925 - DNA, 397 bp, Homo sapiens
ttttttttctgagacggagtctcgtctgtcacccaggcgggagtgcggtggcgcgatctgggctcgctgcaagctccgcctccagggttcacgccattctcctgcctcagcctcccaagtagctgggactacaggcacccaacaccacgcctggctaattttttgtatttttagtagagacggggtttcaccgtgttagccaggatggtctcgatctcctgacctcatgatcctcccacctcagcctcccaaagtgctgggattacaagcgtgagcaccacgcccggccaaccaaacaactcttaattaaatcagaaatgcctttgcaattatacactacccacccctaaagaagaaggtttttacaagtgtagacgactcctccttcatatcgccc

SEQ ID NO: 10926 - DNA, 664 bp, Homo sapiens
acagtatctggccagttccctattacaaccttagtacctggcattaattaaaataaaaacactttttacctgggcaagtggctacttggaataaagacagcatttttcaacattccctgaagctaggtacagccatgtgactaagttctggccacgcaagataaccagaggtggaggaacaacttctaaaatatgtctttaaagtgaatgtgagtattctttaaccattatttcttcctgttgggtgaaaatcagactggatggcaggagctcaagcagtcatcttgaactatgaggtagaagccttgtccataaggatgacacagcaaaaagatgaagtgtgtgggtctcgcctatgaacatcccgcctctgcattgacttactgtggacacctattaccagtgagagaaaaacttcatcgctattattttaggttctcagtatctcaagtgaaataatgaattaaaaatgataaacccatctctgttaggttttccctataaaactttcattgtctacataatcttatacttcagagagagtgcttgggctatattttagtgttataaaaatcatgttacaatgatagggcctagcactagcatggaacgtggtagatcacttttttaaataaatgaatattttctgttctttataattaaa

SEQ ID NO: 10927 - DNA, 510 bp, Homo sapiens
acaaaaacaaaaacaaaaaaaacaaaaaacaaaaaacagatgtgttggcatgcacctgtagtcccagctacttgggaagctgagacaggagaattgcttgaacccgggcggcgcaggttgcagtgagctgagatggtgccaatgcactccagcctcggcaacagagcaagattccatctcaaattaaaaaaaaaagttcgtaataaactacaaatattggaatattaatttatggtctactataaaaactggcttttatctttaataacaccaacaaaaagaattactttttatttacttctgacgatttcctattgtggcaaagattactaattgctccttattatgtattatactccttttcctcagtaaaataaaaacactttttacctgggcaagtggctacttggaataaagacagcatttttcaacattccctgaagctaggtacagccatgtgactaagttctggccacgcaagataaccagaggtggaggaacaacttctaa

SEQ ID NO: 10928 - DNA, 279 bp, Homo sapiens
taaaataaaaacactttttacctgggcaagtggctacttggaataaagacagcatttttcaacattccctgaagctaggtacagccatgtgactaagttctggccacgcaagataaccagaggtggaggaacaacttctaaaatatgtctttaaagtgaatgtgagtattctttaaccattatttcttcctgttgggtgaaaatcagactggatggcaggagctcaagcagtcatcttgaactatgaggtagaagccttgtccataaggatgacacagc

SEQ ID NO: 10929 - DNA, 478 bp, Homo sapiens
ggcagagcaatcatttacctatattctttggggtgtatgccaaggtaaggtctctaggtagcccagttgctttgtctaaaacagaagactcttaaaagaagctcctgtattctccctgagctgacctttcctgtcttgtccctcgatattaagcttatgctatcgagcctcatctcagttagatatctgtggcttcctttgccagctgacctagctggagctgctaatggagtaatcaagtatgaattcctgtataaatcaagtctggctcttattccagggatctagactactacaggcctacacaatttagaaaccctcattagatagatgcaagtagttgtaaatataaacctagctaggggccttctgacttaatgtgtctcccaggaagccctccaggtttggaagccttctcagttcacagggaaagaaaattcatttcctccttcttgccttcctttgccatttcaagatg

SEQ ID NO: 10930 - DNA, 336 bp, Homo sapiens
gtagtcccagctacttgggaggctgaggcaggagaactgcttgaacctgggaggcagacattgcagtgagccaagatggcaccactgcactccagcctggtgacagagtgagactgtctaaaaaaaaacaaaaacaaaaacaaaaaacaaaaggaataccatctcacgggcagagctgcccaggggtgaccatggctgatcacaagctcccacctatttaagcacctactgtgtgccagacacattgccctgataatgccgttgttaacaatcccatgaggtaggtactaatatcacccctgttttgcagattaggaaactgaagcttagagaggt

SEQ ID NO: 10931 - DNA, 1210 bp, Homo sapiens
agtgaattctctcttgactgtggctgtactggacatttaggcctggttggagaacgccttcaagggtttggctgacactgtactctatggctggaatattactgaggactttgggttctacactgtcaggaggttgataatgcagaaagattgagtgacaagctgtgatgtatcacttgggtctcaagaagaggcaggtgctagaagaaaaggctttccttcttccctggcttcttagtataatagaatcgggcaaggctgggtggagtggagaagtagggaggatgcccgtggccaatgccttagaaagacttgactgctgtggttgcatgtgtggtcgtgttggtacctcgctgcaatcctcttccccgcccagcatcagatggcactcttgcgccatctccaggctgatgacgccccgagtggcgacgctctagtcgccatttgtctatggcaggcagggtggctgccttagctgccggaggttccgcactctctaaggccccgggtgaagccccacctctgctgcgcgcagcctgcggtgcgggtcatggcgcggctaccgaagctggcagtctttgatttggattacactctctggcctttctgggtcgacacgcacgtagaccctccgttccataagagcagtgatggaactgtacgagataggcggggccaagacgtccgactgtacccagaggtgcctgaggtcctaaaacgattgcagagccttggggtgcccggtgcggctgcttcaaggacaagtgagatagaaggggccaaccagctactggagctctttgacctcttcaggtactttgttcatcgggaaatctatccaggcagcaagatcacacactttgagaggttgcagcagaagactggaattcctttctcccagatgatcttctttgatgatgagaggcggaatattgtagacgtcagcaaactgggtactgagtgatgaggaacagccatttggggtccctaggagggattaggtgttacctgcattcacatccagaatggaatgaatcttcaaactctaagtcaagggttagagacatttgcgaaggcccaaactgggcctttgaggtccagccttgaggagagcccatttgaggcctaaactgaaaggaaatcaagaaggcattttcaggtgcatttgtaatttattaaagttcatctgtgtgtgacagaagagatttta

SEQ ID NO: 10932 - DNA, 1022 bp, Homo sapiens
agtgaattctctcttgactgtggctgtactggacatttaggcctggttggagaacgccttcaagggtttggctgacactgtactctatggctggaatattactgaggactttgggttctacactgtcaggaggttgataatgcagaaagattgagtgacaagctgtgatgtatcacttgggtctcaagaagaggcaggtgctagaagaaaaggctttccttcttccctggcttcttagtataatagaatcgggcaaggctgggtggagtggagaagtagggaggatgcccgtggccaatgccttagaaagacttgactgctgtggttgcatgtgtggtcgtgttggtacctcgctgcaatcctcttccccgcccagcatcagatggcactcttgcgccatctccaggctgatgacgccccgagtggcgacgctctagtcgccatttgtctatggcaggcagggtggctgccttagctgccggaggttccgcactctctaaggccccgggtgaagccccacctctgctgcgcgcagcctgcggtgcgggtcatggcgcggctaccgaagctggcagtctttgatttggattacactctctggcctttctgggtcgacacgcacgtagaccctccgttccataagagcagtgatggaactgtacgagataggcggggccaagacgtccgactgtacccagaggtgcctgaggtcctaaaacgattgcagagccttggggtgcccggtgcggctgcttcaaggacaagtgagatagaaggggccaaccagctactggagctctttgacctcttcaggtgttacctgcattcacatccagaatggaatgaatcttcaaactctaagtcaagggttagagacatttgcgaaggcccaaactgggcctttgaggtccagccttgaggagagcccatttgaggcctaaactgaaaggaaatcaagaaggcattttcaggtgcatttgtaatttattaaagttcatctgtgtgtgacagaagagatttta

SEQ ID NO: 10933 - DNA, 1283 bp, Homo sapiens
agtgaattctctcttgactgtggctgtactggacatttaggcctggttggagaacgccttcaagggtttggctgacactgtactctatggctggaatattactgaggactttgggttctacactgtcaggaggttgataatgcagaaagattgagtgacaagctgtgatgtatcacttgggtctcaagaagaggcaggtgctagaagaaaaggctttccttcttccctggcttcttagtataatagaatcgggcaaggctgggtggagtggagaagtagggaggatgcccgtggccaatgccttagaaagacttgactgctgtggttgcatgtgtggtcgtgttggtacctcgctgcaatcctcttccccgcccagcatcagatggcactcttgcgccatctccaggctgatgacgccccgagtggcgacgctctagtcgccatttgtctatggcaggcagggtggctgccttagctgccggaggttccgcactctctaaggccccgggtgaagccccacctctgctgcgcgcagcctgcggtgcgggtcatggcgcggctaccgaagctggcagtctttgatttgggtgagggacgggaaggggagaatttcgtaaggtgctctccttttccacatccctaacagcagctcccgaatccctgcatctcccgccccaggctgaaccttccctctccttcctctcgcagattacactctctggcctttctgggtcgacacgcacgtagaccctccgttccataagagcagtgatggaactgtacgagataggcggggccaagacgtccgactgtacccagaggtgcctgaggtcctaaaacgattgcagagccttggggtgcccggtgcggctgcttcaaggacaagtgagatagaaggggccaaccagctactggagctctttgacctcttcaggtactttgttcatcgggaaatctatccaggcagcaagatcacacactttgagaggttgcagcagaagactggaattcctttctcccagatgatcttctttgatgatgagaggcggaatattgtagacgtcagcaaactgggtgttacctgcattcacatccagaatggaatgaatcttcaaactctaagtcaagggttagagacatttgcgaaggcccaaactgggcctttgaggtccagccttgaggagagcccatttgaggcctaaactgaaaggaaatcaagaaggcattttcaggtgcatttgtaatttattaaagttcatctgtgtgtgacagaagagatttta

SEQ ID NO: 10934 - DNA, 1236 bp, Homo sapiens
agtgaattctctcttgactgtggctgtactggacatttaggcctggttggagaacgccttcaagggtttggctgacactgtactctatggctggaatattactgaggactttgggttctacactgtcaggaggttgataatgcagaaagattgagtgacaagctgtgatgtatcacttgggtctcaagaagaggcaggtgctagaagaaaaggctttccttcttccctggcttcttagtataatagaatcgggcaaggctgggtggagtggagaagtagggaggatgcccgtggccaatgccttagaaagacttgactgctgtggttgcatgtgtggtcgtgttggtacctcgctgcaatcctcttccccgcccagcatcagatggcactcttgcgccatctccaggctgatgacgccccgagtggcgacgctctagtcgccatttgtctatggcaggcagggtggctgccttagctgccggaggttccgcactctctaaggccccgggtgaagccccacctctgctgcgcgcagcctgcggtgcgggtcatggcgcggctaccgaagctggcagtctttgatttggattacactctctggcctttctgggtcgacacgcacgtagaccctccgttccataagagcaggtgaggtagggacagggaagactgggggcgagataggacccagccagggctgagcgcactcttgccctctccagtgatggaactgtacgagataggcggggccaagacgtccgactgtacccagaggtgcctgaggtcctaaaacgattgcagagccttggggtgcccggtgcggctgcttcaaggacaagtgagatagaaggggccaaccagctactggagctctttgacctcttcaggtactttgttcatcgggaaatctatccaggcagcaagatcacacactttgagaggttgcagcagaagactggaattcctttctcccagatgatcttctttgatgatgagaggcggaatattgtagacgtcagcaaactgggtgttacctgcattcacatccagaatggaatgaatcttcaaactctaagtcaagggttagagacatttgcgaaggcccaaactgggcctttgaggtccagccttgaggagagcccatttgaggcctaaactgaaaggaaatcaagaaggcattttcaggtgcatttgtaatttattaaagttcatctgtgtgtgacagaagagatttta

SEQ ID NO: 10935 - DNA, 1405 bp, Homo sapiens
agtgaattctctcttgactgtggctgtactggacatttaggcctggttggagaacgccttcaagggtttggctgacactgtactctatggctggaatattactgaggactttgggttctacactgtcaggaggttgataatgcagaaagattgagtgacaagctgtgatgtatcacttgggtctcaagaagaggcaggtgctagaagaaaaggctttccttcttccctggcttcttagtataatagaatcgggcaaggctgggtggagtggagaagtagggaggatgcccgtggccaatgccttagaaagacttgactgctgtggttgcatgtgtggtcgtgttggtacctcgctgcaatcctcttccccgcccagcatcagatggcactcttgcgccatctccaggctgatgacgccccgagtggcgacgctctagtcgccatttgtctatggcaggcagggtggctgccttagctgccggaggttccgcactctctaaggccccgggtgaagccccacctctgctgcgcgcagcctgcggtgcgggtcatggcgcggctaccgaagctggcagtctttgatttgggtgagggacgggaaggggagaatttcgtaaggtgctctccttttccacatccctaacagcagctcccgaatccctgcatctcccgccccaggctgaaccttccctctccttcctctcgcagattacactctctggcctttctgggtcgacacgcacgtagaccctccgttccataagagcaggtgaggtagggacagggaagactgggggcgagataggacccagccagggctgagcgcactcttgccctctccagtgatggaactgtacgagataggcggggccaagacgtccgactgtacccagaggtgcctgaggtcctaaaacgattgcagagccttggggtgcccggtgcggctgcttcaaggacaagtgagatagaaggggccaaccagctactggagctctttgacctcttcaggtactttgttcatcgggaaatctatccaggcagcaagatcacacactttgagaggttgcagcagaagactggaattcctttctcccagatgatcttctttgatgatgagaggcggaatattgtagacgtcagcaaactgggtactgagtgatgaggaacagccatttggggtccctaggagggattaggtgttacctgcattcacatccagaatggaatgaatcttcaaactctaagtcaagggttagagacatttgcgaaggcccaaactgggcctttgaggtccagccttgaggagagcccatttgaggcctaaactgaaaggaaatcaagaaggcattttcaggtgcatttgtaatttattaaagttcatctgtgtgtgacagaagagatttta

SEQ ID NO: 10936 - DNA, 1839 bp, Homo sapiens
agtgaattctctcttgactgtggctgtactggacatttaggcctggttggagaacgccttcaagggtttggctgacactgtactctatggctggaatattactgaggactttgggttctacactgtcaggaggttgataatgcagaaagattgagtgacaagctgtgatgtatcacttgggtctcaagaagaggcaggtgctagaagaaaaggctttccttcttccctggcttcttagtataatagaatcgggcaaggctgggtggagtggagaagtagggaggatgcccgtggccaatgccttagaaagacttgactgctgtggttgcatgtgtggtcgtgttggtacctcgctgcaatcctcttccccgcccagcatcagatggcactcttgcgccatctccaggctgatgacgccccgagtggcgacgctctagtcgccatttgtctatggcaggcagggtggctgccttagctgccggaggttccgcactctctaaggccccgggtgaagccccacctctgctgcgcgcagcctgcggtgcgggtcatggcgcggctaccgaagctggcagtctttgatttgggtgagggacgggaaggggagaatttcgtaaggtgctctccttttccacatccctaacagcagctcccgaatccctgcatctcccgccccaggctgaaccttccctctccttcctctcgcagattacactctctggcctttctgggtcgacacgcacgtagaccctccgttccataagagcaggtgaggtagggacagggaagactgggggcgagataggacccagccagggctgagcgcactcttgccctctccagtgatggaactgtacgagataggcggggccaagacgtccgactgtacccagaggtgcctgaggtcctaaaacgattgcagagccttggggtgcccggtgcggctgcttcaaggacaagtgagatagaaggggccaaccagctactggagctctttgacctcttcaggtactttgttcatcgggaaatctatccaggcagcaagatcacacactttgagaggttgcagcagaagactggaattcctttctcccagatgatcttctttgatgatgagaggcggaatattgtagacgtcagcaaactgggtactgagtgatgaggaacagccatttggggtccctaggagggattaggtgttacctgcattcacatccagaatggaatgaatcttcaaactctaagtcaagggttagagacatttgcgaaggcccaaactgggcctttgaggtccagccttgaggagagcccatttgaggcctaaactgaaaggaaatcaagaaggcattttcaggtgcatttgtaatttattaaagttcatctgtgtgtgacagaagagattttacccacagtgtggggagtttctatttttctagcctgtgaaatggggttggttgtcctgaggtgcagagaccagaatgtgagacattagactgcatcaggtttgccatctaaacttagggcaaccccaagtgcttgaacctataccaccccactttcctgagctctgtaaagagcatgaagttttcccactgaccccatacactgaggtgccatcacactgcacatttccttccggagaacaagcacgtactcaggtggagatagaactgtctttttacttaatagaaaatgatgtggcagctttaagaggagcgcgtcggtctggggctggtggcttgggtcacgtgacaccggtggtctcgtttgcgcctcttgatgtcgcggcggcgccctgaggacggattgggcaaggctggtccctgtgtgatgagacat

SEQ ID NO: 10937 - DNA, 1791 bp, Homo sapiens
agtgaattctctcttgactgtggctgtactggacatttaggcctggttggagaacgccttcaagggtttggctgacactgtactctatggctggaatattactgaggactttgggttctacactgtcaggaggttgataatgcagaaagattgagtgacaagctgtgatgtatcacttgggtctcaagaagaggcaggtgctagaagaaaaggctttccttcttccctggcttcttagtataatagaatcgggcaaggctgggtggagtggagaagtagggaggatgcccgtggccaatgccttagaaagacttgactgctgtggttgcatgtgtggtcgtgttggtacctcgctgcaatcctcttccccgcccagcatcagatggcactcttgcgccatctccaggctgatgacgccccgagtggcgacgctctagtcgccatttgtctatggcaggcagggtggctgccttagctgccggaggttccgcactctctaaggccccgggtgaagccccacctctgctgcgcgcagcctgcggtgcgggtcatggcgcggctaccgaagctggcagtctttgatttgggtgagggacgggaaggggagaatttcgtaaggtgctctccttttccacatccctaacagcagctcccgaatccctgcatctcccgccccaggctgaaccttccctctccttcctctcgcagattacactctctggcctttctgggtcgacacgcacgtagaccctccgttccataagagcaggtgaggtagggacagggaagactgggggcgagataggacccagccagggctgagcgcactcttgccctctccagtgatggaactgtacgagataggcggggccaagacgtccgactgtacccagaggtgcctgaggtcctaaaacgattgcagagccttggggtgcccggtgcggctgcttcaaggacaagtgagatagaaggggccaaccagctactggagctctttgacctcttcaggtactttgttcatcgggaaatctatccaggcagcaagatcacacactttgagaggttgcagcagaagactggaattcctttctcccagatgatcttctttgatgatgagaggcggaatattgtagacgtcagcaaactgggtgttacctgcattcacatccagaatggaatgaatcttcaaactctaagtcaagggttagagacatttgcgaaggcccaaactgggcctttgaggtccagccttgaggagagcccatttgaggcctaaactgaaaggaaatcaagaaggcattttcaggtgcatttgtaatttattaaagttcatctgtgtgtgacagaagagattttacccacagtgtggggagtttctatttttctagcctgtgaaatggggttggttgtcctgaggtgcagagaccagaatgtgagacattagactgcatcaggtttgccatctaaacttagggcaaccccaagtgcttgaacctataccaccccactttcctgagctctgtaaagagcatgaagttttcccactgaccccatacactgaggtgccatcacactgcacatttccttccggagaacaagcacgtactcaggtggagatagaactgtctttttacttaatagaaaatgatgtggcagctttaagaggagcgcgtcggtctggggctggtggcttgggtcacgtgacaccggtggtctcgtttgcgcctcttgatgtcgcggcggcgccctgaggacggattgggcaaggctggtccctgtgtgatgagacat

SEQ ID NO: 10938 - DNA, 1217 bp, Homo sapiens
agtgaattctctcttgactgtggctgtactggacatttaggcctggttggagaacgccttcaagggtttggctgacactgtactctatggctggaatattactgaggactttgggttctacactgtcaggaggttgataatgcagaaagattgagtgacaagctgtgatgtatcacttgggtctcaagaagaggcaggtgctagaagaaaaggctttccttcttccctggcttcttagtataatagaatcgggcaaggctgggtggagtggagaagtagggaggatgcccgtggccaatgccttagaaagacttgactgctgtggttgcatgtgtggtcgtgttggtacctcgctgcaatcctcttccccgcccagcatcagatggcactcttgcgccatctccaggctgatgacgccccgagtggcgacgctctagtcgccatttgtctatggcaggcagggtggctgccttagctgccggaggttccgcactctctaaggccccgggtgaagccccacctctgctgcgcgcagcctgcggtgcgggtcatggcgcggctaccgaagctggcagtctttgatttgggtgagggacgggaaggggagaatttcgtaaggtgctctccttttccacatccctaacagcagctcccgaatccctgcatctcccgccccaggctgaaccttccctctccttcctctcgcagattacactctctggcctttctgggtcgacacgcacgtagaccctccgttccataagagcaggtgaggtagggacagggaagactgggggcgagataggacccagccagggctgagcgcactcttgccctctccagtgatggaactgtacgagataggcggggccaagacgtccgactgtacccagaggtgcctgaggtcctaaaacgattgcagagccttggggtgcccggtgcggctgcttcaaggacaagtgagatagaaggggccaaccagctactggagctctttgacctcttcaggtgttacctgcattcacatccagaatggaatgaatcttcaaactctaagtcaagggttagagacatttgcgaaggcccaaactgggcctttgaggtccagccttgaggagagcccatttgaggcctaaactgaaaggaaatcaagaaggcattttcaggtgcatttgtaatttattaaagttcatctgtgtgtgacagaagagatttta

SEQ ID NO: 10939 - DNA, 1197 bp, Homo sapiens
agtgaattctctcttgactgtggctgtactggacatttaggcctggttggagaacgccttcaagggtttggctgacactgtactctatggctggaatattactgaggactttgggttctacactgtcaggaggttgataatgcagaaagattgagtgacaagctgtgatgtatcacttgggtctcaagaagaggcaggtgctagaagaaaaggctttccttcttccctggcttcttagtataatagaatcgggcaaggctgggtggagtggagaagtagggaggatgcccgtggccaatgccttagaaagacttgactgctgtggttgcatgtgtggtcgtgttggtacctcgctgcaatcctcttccccgcccagcatcagatggcactcttgcgccatctccaggctgatgacgccccgagtggcgacgctctagtcgccatttgtctatggcaggcagggtggctgccttagctgccggaggttccgcactctctaaggccccgggtgaagccccacctctgctgcgcgcagcctgcggtgcgggtcatggcgcggctaccgaagctggcagtctttgatttgggtgagggacgggaaggggagaatttcgtaaggtgctctccttttccacatccctaacagcagctcccgaatccctgcatctcccgccccaggctgaaccttccctctccttcctctcgcagattacactctctggcctttctgggtcgacacgcacgtagaccctccgttccataagagcagtgatggaactgtacgagataggcggggccaagacgtccgactgtacccagaggtgcctgaggtcctaaaacgattgcagagccttggggtgcccggtgcggctgcttcaaggacaagtgagatagaaggggccaaccagctactggagctctttgacctcttcaggtactttgttcatcgggaaatctatccaggcagcaagatcacacactttgagaggtgttacctgcattcacatccagaatggaatgaatcttcaaactctaagtcaagggttagagacatttgcgaaggcccaaactgggcctttgaggtccagccttgaggagagcccatttgaggcctaaactgaaaggaaatcaagaaggcattttcaggtgcatttgtaatttattaaagttcatctgtgtgtgacagaagagatttta

SEQ ID NO: 10940 - DNA, 1162 bp, Homo sapiens
agtgaattctctcttgactgtggctgtactggacatttaggcctggttggagaacgccttcaagggtttggctgacactgtactctatggctggaatattactgaggactttgggttctacactgtcaggaggttgataatgcagaaagattgagtgacaagctgtgatgtatcacttgggtctcaagaagaggcaggtgctagaagaaaaggctttccttcttccctggcttcttagtataatagaatcgggcaaggctgggtggagtggagaagtagggaggatgcccgtggccaatgccttagaaagacttgactgctgtggttgcatgtgtggtcgtgttggtacctcgctgcaatcctcttccccgcccagcatcagatggcactcttgcgccatctccaggctgatgacgccccgagtggcgacgctctagtcgccatttgtctatggcaggcagggtggctgccttagctgccggaggttccgcactctctaaggccccgggtgaagccccacctctgctgcgcgcagcctgcggtgcgggtcatggcgcggctaccgaagctggcagtctttgatttggattacactctctggcctttctgggtcgacacgcacgtagaccctccgttccataagagcagtgatggaactgtacgagataggcggggccaagacgtccgactgtacccagaggtgcctgaggtcctaaaacgattgcagagccttggggtgcccggtgcggctgcttcaaggacaagtgagatagaaggggccaaccagctactggagctctttgacctcttcaggtactttgttcatcgggaaatctatccaggcagcaagatcacacactttgagaggttgcagcagaagactggaattcctttctcccagatgatcttctttgatgatgagaggcggaatattgtagacgtcagcaaactgggtgttacctgcattcacatccagaatggaatgaatcttcaaactctaagtcaagggttagagacatttgcgaaggcccaaactgggcctttgaggtccagccttgaggagagcccatttgaggcctaaactgaaaggaaatcaagaaggcattttcaggtgcatttgtaatttattaaagttcatctgtgtgtgacagaagagatttta

SEQ ID NO: 10941 - DNA, 614 bp, Homo sapiens
gggcggggccaagacgtccgactgtctcgtacagttccatcactgctcttatggaacggagggtctacgtgcgtgtcgacccagaaaggccagagagcagtgatggaactgtacgagataggcggggccaagacgtccgactgtacccagaggtgcctgaggtcctaaaacgattgcagagccttggggtgcccggtgcggctgcttcaaggacaagtgagatagaaggggccaaccagctactggagctctttgacctcttcaggtactttgttcatcgggaaatctatccaggcagcaagatcacacactttgagaggttgcagcagaagactggaattcctttctcccagatgatcttctttgatgatgagaggcggaatattgtagacgtcagcaaactgggtgttacctgcattcacatccagaatggaatgaatcttcaaactctaagtcaagggttagagacatttgcgaaggcccaaactgggcctttgaggtccagccttgaggagagcccatttgaggcctaaactgaaaggaaatcaagaaggcattttcaggtgcatttgtaatttattaaagttcatctgtgtgtgacagaagagatttta

SEQ ID NO: 10942 - DNA, 1357 bp, Homo sapiens
agtgaattctctcttgactgtggctgtactggacatttaggcctggttggagaacgccttcaagggtttggctgacactgtactctatggctggaatattactgaggactttgggttctacactgtcaggaggttgataatgcagaaagattgagtgacaagctgtgatgtatcacttgggtctcaagaagaggcaggtgctagaagaaaaggctttccttcttccctggcttcttagtataatagaatcgggcaaggctgggtggagtggagaagtagggaggatgcccgtggccaatgccttagaaagacttgactgctgtggttgcatgtgtggtcgtgttggtacctcgctgcaatcctcttccccgcccagcatcagatggcactcttgcgccatctccaggctgatgacgccccgagtggcgacgctctagtcgccatttgtctatggcaggcagggtggctgccttagctgccggaggttccgcactctctaaggccccgggtgaagccccacctctgctgcgcgcagcctgcggtgcgggtcatggcgcggctaccgaagctggcagtctttgatttgggtgagggacgggaaggggagaatttcgtaaggtgctctccttttccacatccctaacagcagctcccgaatccctgcatctcccgccccaggctgaaccttccctctccttcctctcgcagattacactctctggcctttctgggtcgacacgcacgtagaccctccgttccataagagcaggtgaggtagggacagggaagactgggggcgagataggacccagccagggctgagcgcactcttgccctctccagtgatggaactgtacgagataggcggggccaagacgtccgactgtacccagaggtgcctgaggtcctaaaacgattgcagagccttggggtgcccggtgcggctgcttcaaggacaagtgagatagaaggggccaaccagctactggagctctttgacctcttcaggtactttgttcatcgggaaatctatccaggcagcaagatcacacactttgagaggttgcagcagaagactggaattcctttctcccagatgatcttctttgatgatgagaggcggaatattgtagacgtcagcaaactgggtgttacctgcattcacatccagaatggaatgaatcttcaaactctaagtcaagggttagagacatttgcgaaggcccaaactgggcctttgaggtccagccttgaggagagcccatttgaggcctaaactgaaaggaaatcaagaaggcattttcaggtgcatttgtaatttattaaagttcatctgtgtgtgacagaagagatttta

SEQ ID NO: 10943 - DNA, 411 bp, Homo sapiens
gccagtttttaggcaggtcaagactcacattacaggttcagagaaaccgtgagtgacaggcagccttgattacaatcaaagagcagctgcccaagattccagcaaccattaagaaagggagatgctacaatttaggccctagagagcaacatctaaggttaaggttgacatactaagtctctttctagcaccattaggcaccttgggggcaaggaaagtgcacagaatcaaagccaggcagatgtgggtttcaattctaaccagctgctggcctggggagaggggccctgctcactctgtgcctcagtttcctcattttcgaaataagaattttactacctgctggatacatacgaacttcatggtaaggatgaaaaatgtgtataaagatgaacagaatatagagctcag

SEQ ID NO: 10944 - DNA, 324 bp, Homo sapiens
gaagcctctgctactgtctggaattgactttgagtaagttactttcacagattagttcctcagttgctcatctaaaaaaaccaggaaaataattttctgcaaagttgttatccagtattatgtgagatcatgcatatcaacgtgcttcataaatggtaaatctctaaatacaaatactagttattaacccaggctaaactgcacttgctttccctggcagccaacgaacactttggcttggattgactttttagtgaaataaaaccttcactttttcaagtgaactctattaaaccatccccctaagctatatgctaatcagaa

SEQ ID NO: 10945 - DNA, 683 bp, Homo sapiens
tgtcatgcagtaaaatgtacgcctttttgataacatgcagaactgtgttatcacctcagcaatcaagatacagaacagttccgtcacccctcaaaactccctcatgctacccttttaaaatcaaatcctccccagccctgacctcagggaacggctgattttttctctacccctaaaatattggcatataaatggaatcatacttttataaaacctttagagactgaccgctttcacccagcataacaccctggagatgcatccgagttgagtgtccccagcgggcctctgcttttgtccctgggcagtattccatcatatgaacataccactgcttcagatccatcctgcagttgaggggcatttgggttgttttcagcttttggcagttatgaaaactgctattgtcattcatgtacagttttttgtatgaacataggttttcattttactagagtaaatacctaggagtgtgatttcagggtcatatggtgatatggtttggctgtgtccacacccaaatctcaccttgaattgtagtaatccccaagggtcaggggtggggccaggcggagataattgaatcgtgggggtggtttcccccatactgttcttgtggtggtgaataagtctcttgagatctgatgattttataaaagggagttcccccgcacaaagtccct

SEQ ID NO: 10946 - DNA, 426 bp, Homo sapiens
gtgacagagtgatactccgtcttaaaaaaaaaaaagaaaaagtgccacgcattaaaaattaaccataaggagttgtgttgtgggatctggaagagggaaaagtagactcagagagagggttcaggtgaggtccagtattggcattctctatttcagggtcagtcatgtcttgccttttgtaatgaagccataatccctaaggaaattctagacaaggcagatttgaagactttttgcctccataatgcatttcatgtttcatttcaaatttctgctttgtcctttccattaagagacttagacttatcagaaaaaacaaacgttttagttctcatatctcagaagatagaaatttgttgacattgaagcagaagggggataactgagacataagaaagcatggtataaaagggaccacgatggtgt

SEQ ID NO: 10947 - DNA, 802 bp, Homo sapiens
aggtaaacccttatgagacaggaaacagcaaaggctagctttaggagagaaagtacagcacctggtgtttttatttatgagaaccttttctttgtccactttctctgtaatgaccttctatccctccgtttttgcctgcctgccattctcctattaggttggtggtttttattttcctctaagttccttccaccaaataaatattacgtaaaaaattcataccaaatcaatgagaatactggcaaggaatacatagggactttctgctatatatgtaactttttattacttaaaggtaccgaaggaaggccaggtgcagtggctcacgcccagcactttgggaggctgaggtgggaggatcccttggggccgggagttcaaggttacagtgagctatgatagtgccactgcactccagcctgggtgacagattttgtcttaaaaaaaaaaaaaaaagttgatatgagttttattttctgtccgtttgaaatattttgtaatattccctgcattctctgtcgtctgcctcttccacataatgtcctttgctttcatgtttgttatcttctttttctgttcactcagaggtcatcaatttctttctctccgtccttaattggattatttttcttttggcctttgggcacagagtctgacctctggaccactctaactggagaaggaactttatgttccctctcctgctgtgtccacaaccttagaaatctgtagctagatttttgttgttatagatagaatttactgtttctgaaacccaaatacagttatcagtttaaggtta

SEQ ID NO: 10948 - DNA, 481 bp, Homo sapiens
gcagccgcctactactactaaattcgcggccgctcgactctgaaacatgtgtttatttaactttaggagccttaagcatgttgaggaatgttatggagaataagtataaaaatcatagtatagctctaataagcacaaatgaagtatacatctgtttgatcaaaaacattttcttatttttcttccttaatcacttgttgaatgctaactatatgccaggtattgtgtctggtcttgagggcggttgggatacaaagaaagtaagacagttttataccctgtaaggagcttacagtctagtgaaagagttacaccaagccatgtgtgctggcttgcacctgtaatcctagctacttgggaggatcgcttgagcctaggagtttgaggctgcagtaagctatgatcatgagactgcaccacagccttgacaacagaatgagaccctgtctcaaaaaaaaaaaaaaaaaaaaaaaagacaagg

SEQ ID NO: 10949 - DNA, 517 bp, Homo sapiens
ttagttaggcaacatagaacaaaatagaggtcacaggttccatgcactgaagaatggaattgaaatagagactccagggtcatagactcttggaaggaagactagagtacattcatgaccctcacccttaattacttcacaggtgagaaaaccaagagctacagaaaataagttattcctcagtaccagggcctggttccttggagaattgggttaaaattcaaaataaccttctaaaaaattctttcagaaacgagtagtgaaagccagtggatcaaattcagtgatagttaacagagaaacagcagcatagataagtaagccaatttaatgtagggagcaaccactagtgtacatgatctcagctcatctggtactaccaagtaaaaatgaacctgggccagccacagtgactcatgcctgtactctcagcgctttgggaggccaaggtgggaggattgtttgaggccaggaatttgagaccatcctggtcaacatagcaagaccctgtttgttt

SEQ ID NO: 10950 - DNA, 286 bp, Homo sapiens
atttgctttaaagaccacttcataataagaaaggcagcagaacattcagtagggttaaatgaagtccttttacatacacttttgtttttatcttcagctagatttttaattaagtactggttatgatgtatatattttggtgctagttttatttggggttgctttttttgtttgttcacaataacctagtcatatgatagttacacattgtggttatgattgcctgtgaacaaaccgtacatttggagggactatttgcaatattaataatgtctcataaatctgt

SEQ ID NO: 10951 - DNA, 472 bp, Homo sapiens
  misc_feature (426)..(426): n is a, c, g, or t
gaaaaacagccatttattataaaatatttattctaaattttaagttcaggttagtaaagacaattttaaatttttgagcgccattaaaatgaatgacacattatttttactctttaatcgatagtggcatcaactatgcatatacaatatctacaaaaatgatttaagcatttactttagaaagagagtttagacaatcctgtgtttcttatcaatatcgactttattaagaaaaatatccactgtgcccagccatagttgaatttcatggtcagtggaacacacagcaggtcctccactgtgccagcttctttcacttactgtttttgacactcacatgtaccgtcgtgggcgccggtgtggtctttgttgctgagtgccgtcccgtcatatggacgtgcgtcgtggggcgccggtgtgtcttgnttgctgagtgccgtcccgtcatatggacacctcatgatttgttggg

SEQ ID NO: 10952 - DNA, 799 bp, Homo sapiens
ctgtctagactcttaatgctgtgacccttgaaaacctagagaatttaatgtctccagttgggctgaatttaggtttaggtttggtagaataatgggaagggtaagtcttcagagacacttgacggagtcctcagagacacttgacaaacttgggaaaggaaagaagagtaggaacaactgggcatgctcagtgataccctgagcaaccacattacttcgctagatcctgccctttttctcaacaaaaagtagttcaagaattatttcctgagttgatcaaaaagacttattgtcatatggttaattatgtgttgagcatgtctttttattatttttgtaacagacaaaaaaaattaccatataatttaagaaaagaaggtactttccatatctcctgagttggagatacttctgaaaggagcagaagagatgggagaaatgtacaattctactttattcctgaagtcctggttttaccagataaaatgaagtgagatgaaaattaaactttcttgtctgattttttttttctaccaagttatagactttaaattttggcaggataaaaataaaatgtgagacagatttactttttggctcacataacttcaaataaggcgacttaaaaatggtttggagcattagtattttgactgtagaaaaaatttattcatttaatattaactgtttatgtgtctagcgttttccttgggtctgttggtctctgctttctggtaccttatttgtctagtaccttatttgtggaaacaaaaccaatctatacacaatggtcacagaa

SEQ ID NO: 10953 - DNA, 1143 bp, Homo sapiens
ctgtctagactcttaatgctgtgacccttgaaaacctagagaatttaatgtctccagttgggctgaatttaggtttaggtttggtagaataatgggaagggtaagtcttcagagacacttgacggagtcctcagagacacttgacaaacttgggaaaggaaagaagaagatgggagaaatgtacaattctactttattcctgaagtcctggttttaccagataaaatgaagtgagatgaaaattaaaaaaaaaaaaaaaaaaaaaaaaaaaaaaaaaaaaaaaaaaaaaaaaaaaaaaaaaaaaaaaaaaaacaaaaaagaagaaaagaagaaagaaaaacaaagaagaagcaaagaagcgtaaaagagacagcggagagcagagagagaagagaagaggacgaacagcgaggcgagagagggaagacggatgagccgaggagacgcgacggagacgaacgcaagaggcagaggaaggagcagacggaagacgaagggggtgggacgaggactgaggaagaaggacggcaggcaagaggcgggtgacgcacgtgacaggagcagaaagcagaacagagaagcagacagcagaaggaaaagaaaaggcagagtgagcgagacagggaagacgacagagaagcaggaggagtaggaagaaggtcagagggagcgctgagtacgaaagaccagtgcgagggaggcagagaggacagacgacgggacgaaaacagcacaagcaagtgctgaggacagcggagaagcagagcgaaggaaacgcgaacagcggcgagggcaacgacaacgaagaggcagaacaagagatacgagggggagaaccaggaagacgaaagaccaacaaggagtagaaggacgtgacacgcgaggatgcaagagggagagaaggagaggacgaagagagggacaggacggaagagccggagcacgacagaaaagaaacgcgacgagggagacgagacaagacgcgaggcgcgagcgaagacacaggggggagagtagggacgaaaagagaacgagacagcataaggcggagccaggaacacagccaccccgccagaaggcaagccagcagagacacaacacgcaccgaaaagacagacgacgcccaccagcaacgaagcaggg

SEQ ID NO: 10954 - DNA, 449 bp, Homo sapiens
tgccatcagtgtgctggagggggaagggggagacagcatttctctgtcctagagcagtgcacagcctgttcatgcacctgtgtgtgtgagtcagctcaaactgccataacagaagaccacagactttgtcttaaacagcaaacatttattgtctcccaattctggaggctggaagtcttggatcaaggcctcagtgggattggcttctcctgaagcctctctccttggcttgcagacagccatcttctccctgtgtcttcacgtggtctttctccgtgagtgtctgtgtcctgatcttttctaataaggacaacagtcatattggattagggcccatcctaacagccttattttaacataatttgctctgtaaaggccctgactccaaatagagtcacatcgtgagtgctgggcgttaggatctcaatatctgaattagggagtggagc

SEQ ID NO: 10955 - DNA, 370 bp, Homo sapiens
tactcttcctgacttaaagtccattttatctgatataagtatacctagttactcctgctcactattggtttctgtttgcttggaatatattttttcatccctttatttcagtctatatgtgtctttaatgataaggtgagtttcttgtaagcagaatcattttttgatcatggatcatttttaatccacttagctattctagcttttaagaggataatttaatttgttcatgttcaaggttattcttgatatgtaaggctttgttcccgtcatgttgttttctcattgtttcatatacttcttgttcctttcttatactttggcattgtgctttggtggatttctgtagtggtagcatttgagttctttc

SEQ ID NO: 10956 - DNA, 494 bp, Homo sapiens
taaactcccaggagagttggcaacccacttctggaaggctgcccacaccttctctaatctgagaccaattgagaactctaacccagctctaaaacaaattctagtcttctaagaaaagtagcaatgatgttagtagtttcctaattttttataatccagaaatgtcactcttatgtggcagtgaattcgcacattcccaaggaaccaagtgactcaacataacacaacagtcacccccaggatgtaatgtgacacgcacaggcccctccgttccaggagatggtttgcccataatctggggacgaaatcgctggaggccttgcatgtgggtgttgcgttactgtgggagggttttgttggcatcaaggctacctttaatgaatgggctttaataaatcaaagagatgtggctaataaatgcgtttcatgacatgccttaaacaaaacaaaacaaaaaaaaaacctcttgtaacttttaaatattttgatttata

SEQ ID NO: 10957 - DNA, 408 bp, Homo sapiens
aggaaggctccaaacaggccattgagctgggctgggagtcataaaagagcctgaggaagagaatgaaggcttcgagaaaagatgaggatggagcatggagtcagggcccaggctagggactaccacagacaactctcttgagttctgaagccacaggtcactaccctcatgtcaccagaatccctgccttctacaagcccagaggcaaggacagagcagcggtgaaaggaccatggatccaactaaacccttctcccatgtgcagtttacaaagctgacttctcaaacttcttccaccttgagaaagatcactcctgcccctcgcaacccgccttctgccccagatcccagacttcaagaacaaccccctatcctctagatcttggttctctggagcaatgagaggcc

SEQ ID NO: 10958 - DNA, 879 bp, Homo sapiens
ctctcttccagcatccagatcagtctgtaaaacatacactgattggcctggcttggttgcatgtccagccctgaattgatctcttggctggaaagacggaatgttctgatggccactctggggcagggaaagagggacccttcattaacagcacctccaaaatcatgtgaagtgggtgagttattggcagttttcaaggaaaagggaagcaggccggaccaaaaaaacaaagccgtagccatctgctattttcaccaagtatagagcagatgtaatgaaaaagacacacacttctcaaaaaattgggaaagtttcagaactctaacaatcagatggaagtcttaaaacttcttaaggaaaatatttaggatacctaaaaagaaacaacaatcaaagtagcatttgatttttcatatgcaatgggcttgctagaaggtaacagagcaatgtctacaaattctgaagggaaatcatttggaatctcttatacaagtgtgaaggcatagtaaagacacatttagaggttcaaggatttggatttatttggtgcaccaccacccctgttatgcacattttctgaaaaattccttgaagatatactctggcaaaatgaaaactgaattcaagaaagagggagacaatagattcaaaaattatagaattaacccagaagaacaatggaaaggaatactagtaggacagttgtgcagctgacctaataagcaattagaacaagaaatcagagggctcataaaaaataacctaaagaagaaaaaagcattaaccatatcctatgagtaagaagctgacatgctggtataagacacttctaagaaacaagaaaagcaaggtatgagacacttctcagaaacaagaaaa

SEQ ID NO: 10959 - DNA, 376 bp, Homo sapiens
aacacagaagaagatgtggtctgtcacctatagtcctgtcattcccttgggtgctcacagttttctgaagagaactctcaaaattctcaaaacataaatacctgtatcccacttcatttttaagaagagtaaagaaattaagtcactttggtattggtatggagacagattttctaagttcaaatagtatactacagcatcttcagacattcatggaacattgtagtatgtgccatcattataaggagatacaaacataggtaaaaagatgtggtgattggaggcaaaactagaatctaaaagaccaagtctgcctttggaaatggaagctattttccctgccatgaaccgagagtgactccgtctcacaaaaaaa

SEQ ID NO: 10960 - DNA, 439 bp, Homo sapiens
atagtccttgctgacatttgatttacatgcagttttatgtcagatcctttaaaatcacaaatatatggagagaaaaatggtatagacaatagaatattctactgggcctataactggtccattaagtgcttatttaaattgtaaacaatcaaatttaatttggtgtttataaaaaattatgtatgtgaacatacattctgttatctatatgtgtctgtaatccattagcttatttacaatgatcaaagaatagaagtgtgaataaatcagaatggcacatgattgaaaatgctgtgtaactgaagatgcatttgtgtagtcttgaatttcatttgaaacaaaattgttagtctgtatcttgaagcacattgctactttgtatttttattgatgtataattaacattcaataaaatgcacataatatccagttcaaggag

SEQ ID NO: 10961 - DNA, 2607 bp, Homo sapiens
ggcacgaggggcgacggagcctggctgtgggcccatctttggaaaaaagatctgggaatgattgtctagcctccagcctcaacttacttgatgcttgagagactcaaagccccgtggtcagctgccctgcaaagaaagtattttgaccttggcatttggacagctcccatctctcccatggccctgacaatgctgaatgggctcctgattaaggactcaagcccacctatgctgctgcaccaggttaacaagactgcccagttagataccttcaactaccagagctgctttatgcaaagtgtctttgaccatttccctgagatcttatttatccaccggacctataacccaaggggtaaggtcttatataccttcctggtggatggacctcgggtgcagctggagggtcatcttgcccgagcagtctactttgccatccctgccaaggaggacactgaaggcctggcccagatgttccaagtattcaagaagtttaatccagcatgggagagagtctgtaccatcctggtggatcctcatttccttccactgcctatcctagctatggagttccccacagctgaggtccttctctcagccttccacatttgtaagttcctccaggccaagttctatcagctgtcccttgaacggcccgtggaaaggctgctcctgacctccctgcagagcacaatgtgctcagccacagcaggcaacctgagaaagttgtatacactcctgagcaactgcatccctccagccaagctgcccgagcttcactcacactggctgctcaacgaccgcatctggctggctcaccgctggagaagccgagctgagagcagccactacttccagagcctcgaggtcaccacccacatcctcagccagttctttggtaccaccccatctgagaaacaaggtatggcttctctgttccgttacatgcagcagaactctgcagacaaggcaaacttcaaccagggcctgtgtgcccagaacaatcatgctccctcagacaccatccccgaaagccccaaactggagcagctggtagaatcccacatccagcactccctcaatgccatctgcacagggccagcagcccaactgtgcctgggcgagcttgctgtggtccagaaatccacacacctcattggctctggctcagaaaagatgaacatacagatcctggaagatacccataaggtgcagccccagccccctgccagctgcagctgctactttaaccaggccttccacctgccctgccgccacatcctagccatgctcagtgcccgccgccaggtgctccagcccgacatgctgccggctcagtggacggcaggctgtgctaccagtctagacagcatcctgggcagcaagtggagtgagaccctggataagcacctggcagtgactcacctcaccgaggaggtgggtcagctgttgcagcactgcaccaaggaggagtttgagcggaggtatagcaccctgcgggaactggccgacagctggattgggccttatgagcaggtccaactctgattattctcgatgcccagagatgctcatgcacctgtgcacactcacatccacccatacacacacacacacacacacacacacacacacacacactcccttacactgttgtacttccgtgggccctccttccagaacaaggacaacaaggacaaggttgaagggtcttctcatctaccatggcctgctacctagcatgtgtctagctcaatgagacaggagtcagcaaatcttaatctgtttagtttactcaggtggccacatacagtctctgttgtatattcttggttttgttttaatattttttttctttttttttttttttttttttttgagagggagtctgtctccagcctgggagggtgagactccatctaaaaaaaataaaataaatggcaacccctggtctaagataagagataaaacatcaggtggtgaggttgaggtttggggcttggtagcagttgccccagtcatgagatgactcacttaacccgtctcctttaagtgagctgggctgggaggcttcttttccttgtcccatcctggggtcaataaaactgaatgttgcatattctagcacttgtctagttttttttttgttccatagaaggcagtttagggtatatcatggagagaatagactttagagtgttatacaacatgtgaatcctggttggttccttccctgcttgatttttgtgcctggttctgccttttactagctatgagacttattaggataagttacccctctaaacctcaacctgattatctgtaaaaatggggatctccacagggtatgttcacagagcaggcatacctagtgggtgctcaattaagtattaattttccttccttgcctatggtcctatgacctgccttcaacatgctgggaaatttaaggcaagaggagaattcaaatacctaggacttaatataagaaattctggccaggcatggtggctcacacctgtaatcccagcactttgggaggccgaggcaggcggatcacctgaggtcgggagtttgagaccagcctgaccaacatggtgaaaccgt

SEQ ID NO: 10962 - DNA, 2661 bp, Homo sapiens
ggcacgaggggcgacggagcctggctgtgggcccatctttggaaaaaagatctgggaatgattgtctagcctccagcctcaacttacttgatgcttgagagactcaaagccccgtggtcagctgccctgcaaagaaagtattttgaccttggcatttggacagctcccatctctcccatggccctgacaatgctgaatgggctcctgattaaggactcaagcccacctatgctgctgcaccaggttaacaagactgcccagttagataccttcaactaccagagctgctttatgcaaagtgtctttgaccatttccctgagatcttatttatccaccggacctataacccaaggggtaaggtcttatataccttcctggtggatggacctcgggtgcagctggagggtcatcttgcccgagcagtctactttgccatccctgccaaggaggacactgaaggcctggcccagatgttccaagtattcaagaagtttaatccagcatgggagagagtctgtaccatcctggtggatcctcatttccttccactgcctatcctagctatggagttccccacagctgaggtccttctctcagccttccacatttgtaagttcctccaggccaagttctatcagctgtcccttgaacggcccgtggaaaggctgctcctgacctccctgcagagcacaatgtgctcagccacagcaggcaacctgagaaagttgtatacactcctgagcaactgcatccctccagccaagctgcccgagcttcactcacactggctgctcaacgaccgcatctggctggctcaccgctggagaagccgagctgagagcagccactacttccagagcctcgaggtcaccacccacatcctcagccagttctttggtaccaccccatctgagaaacaaggtatggcttctctgttccgttacatgcagcagaactctgcagacaaggcaaacttcaaccagggcctgtgtgcccagaacaatcatgctccctcagacaccatccccgaaagccccaaactggagcagctggtagaatcccacatccagcactccctcaatgccatctgcacagggccagcagcccaactgtgcctgggcgagcttgctgtggtccagaaatccacacacctcattggctctggctcagaaaagatgaacatacagatcctggaagatacccataaggtgcagccccagccccctgccagctgcagctgctactttaaccaggccttccacctgccctgccgccacatcctagccatgctcagtgcccgccgccaggtgctccagcccgacatgctgccggctcagtggacggcaggctgtgctaccagtctagacagcatcctgggcagcaagtggagtgagaccctggataagcacctggcagtgactcacctcaccgaggaggtgggtcagctgttgcagcactgcaccaaggaggagtttgagcggaggtatagcaccctgcgggaactggccgacagctggattgggccttatgagcaggtccaactctgattattctcgatgcccagagatgctcatgcacctgtgcacactcacatccacccatacacacacacacacacacacacacacacacacacacactcccttacactgttgtacttccgtgggccctccttccagaacaaggacaacaaggacaaggttgaagggtcttctcatctaccatggcctgctacctagcatgtgtctagctcaatgagacaggagtcagcaaatcttaatctgtttagtttactcaggtggccacatacagtctctgttgtatattcttggttttgttttaatattttttttctttttttttttttttttttttttgagagggagtctgtctccagcctgggagggtgagactccatctaaaaaaaataaaataaatggcaacccctggtctaagataagagataaaacatcaggtggtgaggttgaggtttggggcttggtagcagttgccccagtcatgagatgactcacttaacccgtctcctttaagtgagctgggctgggaggcttcctacaggggaagaggcccctctggggagctgactcagccaggctccctgaacttttttccttgtcccatcctggggtcaataaaactgaatgttgcatattctagcacttgtctagttttttttttgttccatagaaggcagtttagggtatatcatggagagaatagactttagagtgttatacaacatgtgaatcctggttggttccttccctgcttgatttttgtgcctggttctgccttttactagctatgagacttattaggataagttacccctctaaacctcaacctgattatctgtaaaaatggggatctccacagggtatgttcacagagcaggcatacctagtgggtgctcaattaagtattaattttccttccttgcctatggtcctatgacctgccttcaacatgctgggaaatttaaggcaagaggagaattcaaatacctaggacttaatataagaaattctggccaggcatggtggctcacacctgtaatcccagcactttgggaggccgaggcaggcggatcacctgaggtcgggagtttgagaccagcctgaccaacatggtgaaaccgt

SEQ ID NO: 10963 - DNA, 1042 bp, Homo sapiens
ggcacgaggggcgacggagcctggctgtgggcccatctttggaaaaaagatctgggaatgattgtctagcctccagcctcaacttacttgatgcttgagagactcaaagccccgtggtcagctgccctgcaaagaaagtattttgaccttggcatttggacagctcccatctctcccatggccctgacaatgctgaatgggctcctgattaaggactcaagcccacctatgctgctgcaccaggttaacaagactgcccagttagataccttcaactaccagagctgctttatgcaaagtgtctttgaccatttccctgagatcttatttatccaccggacctataacccaaggggtaaggtcttatataccttcctggtggatggacctcgggtgcagctggagggtcatcttgcccgagcagtctactttgccatccctgccaaggaggacactgaaggcctggcccagatgttccaagtattcaagaagtttaatccagcatgggagagagtctgtaccatcctggtggatcctcatttccttccactgcctatcctagctatggagttccccacagctgaggtccttctctcagccttccacatttgtaagttcctccaggccaagttctatcagctgtcccttgaacggcccgtggaaaggctgctcctgacctccctgcagagcacaatgtgctcagccacagcaggcaacctgagaaagttgtatacactcctgagcaactgcatccctccagagcctgggagggtgagactccatctaaaaaaaataaaataaatggcaacccctggtctaagataagagataaaacatcaggtggtgaggttgaggtttggggcttggtagcagttgccccagtcatgagatgactcacttaacccgtctcctttaagtgagctgggctgggaggcttcctacaggggaagaggcccctctggggagctgactcagccaggctccctgaacttttttccttgtcccatcctggggtcaataaaactgaatgttgcatattcta

SEQ ID NO: 10964 - DNA, 2178 bp, Homo sapiens
ggcacgaggggcgacggagcctggctgtgggcccatctttggaaaaaagatctgggaatgattgtctagcctccagcctcaacttacttgatgcttgagagactcaaagccccgtggtcagctgccctgcaaagaaagtattttgaccttggcatttggacagctcccatctctcccatggccctgacaatgctgaatgggctcctgattaaggactcaagcccacctatgctgctgcaccaggttaacaagactgcccagttagataccttcaactaccagagctgctttatgcaaagtgtctttgaccatttccctgagatcttatttatccaccggacctataacccaaggggtaaggtcttatataccttcctggtggatggacctcgggtgcagctggagggtcatcttgcccgagcagtctactttgccatccctgccaaggaggacactgaaggcctggcccagatgttccaagtattcaagaagtttaatccagcatgggagagagtctgtaccatcctggtggatcctcatttccttccactgcctatcctagctatggagttccccacagctgaggtccttctctcagccttccacatttgtaagttcctccaggccaagttctatcagctgtcccttgaacggcccgtggaaaggctgctcctgacctccctgcagagcacaatgtgctcagccacagcaggcaacctgagaaagttgtatacactcctgagcaactgcatccctccagccaagctgcccgagcttcactcacactggctgctcaacgaccgcatctggctggctcaccgctggagaagccgagctgagagcagccactacttccagagcctcgaggtcaccacccacatcctcagccagttctttggtaccaccccatctgagaaacaaggtatggcttctctgttccgttacatgcagcagaactctgcagacaaggcaaacttcaaccagggcctgtgtgcccagaacaatcatgctccctcagacaccatccccgaaagccccaaactggagcagctggtagaatcccacatccagcactccctcaatgccatctgcacagggccagcagcccaactgtgcctgggcgagcttgctgtggtccagaaatccacacacctcattggctctggctcagaaaagatgaacatacagatcctggaagatacccataaggtgcagccccagccccctgccagctgcagctgctactttaaccaggccttccacctgccctgccgccacatcctagccatgctcagtgcccgccgccaggtgctccagcccgacatgctgccggctcagtggacggcaggctgtgctaccagtctagacagcatcctgggcagcaagtggagtgagaccctggataagcacctggcagtgactcacctcaccgaggaggtgggtcagctgttgcagcactgcaccaaggaggagtttgagcggaggtatagcaccctgcgggaactggccgacagctggattgggccttatgagcaggtccaactctgattattctcgatgcccagagatgctcatgcacctgtgcacactcacatccacccatacacacacacacacacacacacacacacacacacacactcccttacactgttgtacttccgtgggccctccttccagaacaaggacaacaaggacaaggttgaagggtcttctcatctaccatggcctgctacctagcatgtgtctagctcaatgagacaggagtcagcaaatcttaatctgtttagtttactcaggtggccacatacagtctctgttgtatattcttggttttgttttaatattttttttctttttttttttttttttttttttgagagggagtctgtctccagcctgggagggtgagactccatctaaaaaaaataaaataaatggcaacccctggtctaagataagagataaaacatcaggtggtgaggttgaggtttggggcttggtagcagttgccccagtcatgagatgactcacttaacccgtctcctttaagtgagctgggctgggaggcttcctacaggggaagaggcccctctggggagctgactcagccaggctccctgaacttttttccttgtcccatcctggggtcaataaaactgaatgttgcatattcta

SEQ ID NO: 10965 - DNA, 976 bp, Homo sapiens
ggcacgaggggcgacggagcctggctgtgggcccatctttggaaaaaagatctgggaatgattgtctagcctccagcctcaacttacttgatgcttgagagactcaaagccccgtggtcagctgccctgcaaagaaagtattttgaccttggcatttggacagctcccatctctcccatggccctgacaatgctgaatgggctcctgattaaggactcaagcccacctatgctgctgcaccaggttaacaagactgcccagttagataccttcaactaccagagctgctttatgcaaagtgtctttgaccatttccctgagatcttatttatccaccggacctataacccaaggggtaaggtcttatataccttcctggtggatggacctcgggtgcagctggagggtcatcttgcccgagcagtctactttgccatccctgccaaggaggacactgaaggcctggcccagatgttccaagtattcaagaagtttaatccagcatgggagagagtctgtaccatcctggtggatcctcatttccttccactgcctatcctagctatggagttccccacagctgaggtccttctctcagccttccacatttgtaagttcctccaggccaagttctatcagctgtcccttgaacggcccgtggaaaggctgctcctgacctccctgcagagcacaatgtgctcagccacagcaggcaacctgagaaagttgtatacactcctgagcaactgcatccctccagccaagctgcccgagcttcactcacactggctgctcaacgaccgcatctggctggctcaccgctggagaagccgagctgagagcagccactacttccagagcctcgaggtcaccacctgatgttttatctcttatcttagaccaggggttgccatttattttattttttttagatggagtctcaccctcccaggctggagacagactccctctcaaa

SEQ ID NO: 10966 - DNA, 731 bp, Homo sapiens
ccttccccagcttactctctgacatgttactcaggtttatggtctttgtaagcttcattattggatatatatttgcttatttgtttacatgtttattgtgtatcttcccctagaacagtgctgacatatagtaagtgttcaacaaatattgtgtggatgaataattgaagagccaggtccctgctgtctccttaaacctctgttactctccataggcccatctttggaaaaaagatctgggaatgattgtctagcctccagcctcaacttacttgatgcttgagagactcaaagccccgtggtcagctgccctgcaaagaaagtattttgaccttggcatttggacagctcccatctctcccatggccctgacaatgctgaatgggctcctgattaaggactcaagcccacctatgctgctgcaccaggttaacaagactgcccagttagataccttcaactaccagagctgctttatgcaaagtgtctttgaccatttccctgagatcttatttatccaccggacctataacccaaggggtaaggtcttatataccttcctggtggatggacctcgggtgcagctggagggtcatcttgcccgagcagtctactttgccatccctgccaaggaggacactgaaggcctggcccagatgttccaagtattcaagaagtttaatccagcatgggagagagtctgtaccatcctggtggatcctcatttcctt

SEQ ID NO: 10967 - DNA, 2123 bp, Homo sapiens
cacacacgggcgcacgcacacggcagccgggccagggacgaccctgtcagctgcagccccagaggtccggggcgcgcagccgggtcccctcgagggcgcagccggccgccccgccccgcccctcgaagcagccgggccgggcgcgcagtgggctacaaactttcgcagcgcgagtccgccaaggcagcgcgccgactcgggctcggctcggctctgcgctgctccggacggctgtgaccgctggccgggggctcgggccgccggtacccacggaccgcgcgcccgggtgcctgctccgctaagcccctcgccccgcgcggacctcggtatccagcgccctgctgcccgggctctccccgcgcgccctactgccgcgaggtcagtccgcagcctccggtgcgccagcgctcgccttcctcctcctggacttcggccctttgccgccctcaccacgccatggcctggcgcccccaccgcgcggcctgtggcaggccaaggacatctcccccatcgtcaaggcggcccgccgggatggcgagctgctcctctccgcccagctggattctgaggagagggacccgggggtgccccggcccagcccctatgcgccctacatcctagtctatgccaacgatctggccatctcggagcccaacagcgtggcagtgacgctgcagagatacgaccccttccctgccggagaccccgagccccgcgcagcccccaacaactcagcggacccccgcgtgcgccgagccgcgcaggccactgggcccctccaggacaacgagctgccggggctggatgagaggccgccgcgcgcccacgcacagcacttccacaagcaccagctgtggcccagccccttccgggcgctgaaaccccggccagggcgcaaagaccgcaggaagaagggccaggaggtgttcatggccgcctcgcaggtgctggactttgacgagaagacgatgcagaaagcccggaggaagcagtgggatgagccgagggtgtgctcccggaggtacctgaaggtggacttcgcagacatcggctggaatgaatggataatctcaccgaaatcttttgatgcctactactgcgcgggagcatgtgagttccccatgcctaagatcgttcgtccatccaaccatgccaccatccagagcattgtcagggctgtgggcatcatccctggcatcccagagccctgctgtgttcccgataagatgaactcccttggggtcctcttcctggatgagaatcggaatgtggttctgaaggtgtaccccaacatgtccgtggacacctgtgcctgccggtgagaccactccagggtggaaagaagccacgcccagcagagctgccttctcggagccttctgcaaccaggacttgtggtgcagctgcagacacagagcacagctcatgggcaacatcactggggcccagagagagctgtccgccagtgcatcattagggggtctttcattgctagtgactagccccttaaatgccagcctgagtacctgaaggaatctgggaattagccctggcctgaaagtggcccatcattcatacccactgttctgaaggcttgaaaacaaaacatatccacaacattggcttgatgtgatcatcatctcataactgagcaagaagactatgcaaatcttagggcgctcgctccctgcacacggaaagaactctgtttaaatgctcagttcagaacactttgggccacatagtgattttggaaaacaggataatcgtggtgtaaatgagtgtttcctttcaaagtccactgcagagcttttatccatatggtatgcacatgtagccaatattggtttctttttcttaatatatatattttattttaaaacaacaaaaagggagggcgttgacaccattccccacagagatagtcatgctgagtgtgggttgtttaaacatgcatattgaaataacacatatagtaacgtgggaatactaaaaaataaccaagattttatatttttgtaaattatactttctatactgtagattgtgtatgttatgtgtttttatggaaagctaataaattaaaggtacagtggtatcttgaaaaactgaaaaatcaaccat

SEQ ID NO: 10968 - DNA, 1572 bp, Homo sapiens
cacacacgggcgcacgcacacggcagccgggccagggacgaccctgtcagctgcagccccagaggtccggggcgcgcagccgggtcccctcgagggcgcagccggccgccccgccccgcccctcgaagcagccgggccgggcgcgcagtgggctacaaactttcgcagcgcgagtccgccaaggcagcgcgccgactcgggctcggctcggctctgcgctgctccggacggctgtgaccgctggccgggggctcgggccgccggtacccacggaccgcgcgcccgggtgcctgctccgctaagcccctcgccccgcgcggacctcggtatccagcgccctgctgcccgggctctccccgcgcgccctactgccgcgaggtcagtccgcagcctccggtgcgccagcgctcgccttcctcctcctggacttcggccctttgccgccctcaccacgccatggctcatgtccccgctcggaccagcccgggacccgggccccagctgctgctgctgctgctgccgttgtttctgctgttgctccgggatgtggccggcagccacagggcccccgcctggtccgcactgcccgcggccgccgacggcctgcagggggacagggatctccagcggcaccctggggacgcggccgccacgttgggccccagcgcccaggacatggtcgctgtccacatgcacaggctctatgagaagtacagccggcagggcgcgcggccgggagggggcaacacggtccgcagcttcagggccaggctggaagtggtcgaccagaaggccgtgtatttcttcaacctgacttccatgcaagactcggaaatgatccttacggccactttccacttctactcagagccgcctcggtggcctcgagcgctcgaggtgctatgcaagccgcgggccaagaacgcttcaggccgcccgctgcccctgggcccgcccacacgccacctgagtacctgaaggaatctgggaattagccctggcctgaaagtggcccatcattcatacccactgttctgaaggcttgaaaacaaaacatatccacaacattggcttgatgtgatcatcatctcataactgagcaagaagactatgcaaatcttagggcgctcgctccctgcacacggaaagaactctgtttaaatgctcagttcagaacactttgggccacatagtgattttggaaaacaggataatcgtggtgtaaatgagtgtttcctttcaaagtccactgcagagcttttatccatatggtatgcacatgtagccaatattggtttctttttcttaatatatatattttattttaaaacaacaaaaagggagggcgttgacaccattccccacagagatagtcatgctgagtgtgggttgtttaaacatgcatattgaaataacacatatagtaacgtgggaatactaaaaaataaccaagattttatatttttgtaaattatactttctatactgtagattgtgtatgttatgtgtttttatggaaagctaataaattaaaggtacagtggtatcttgaaaaactgaaaaatcaaccat

SEQ ID NO: 10969 - DNA, 481 bp, Homo sapiens
ggtgagggcggagctgaggtaaccctactccttttctgccttgcagatcgttcgtccatccaaccatgccaccatccagagcattgtcagggctgtgggcatcatccctggcatcccagagccctgctgtgttcccgataagatgaactcccttggggtcctcttcctggatgagaatcggaatgtggttctgaaggtgtaccccaacatgtccgtggacacctgtgcctgccggtgagaccactccagggtggaaagaagccacgcccagcagagctgccttctcggagccttctgcaaccaggacttgtggtgcagctgcagacacagagcacagctcatgggcaacatcactggggcccagagagagctgtccgccagtgcatcattagggggtctttcattgctagtgactagccccttaaatgccagcctgagtacctgaaggaatctgggaattagccctggcctgaaagtggcc

SEQ ID NO: 10970 - DNA, 568 bp, Homo sapiens
aggaatctgggaattagccctggcctgaaagtggcccatcattcatacccactgttctgaaggcttgaaaacaaaacatatccacaacattggcttgatgtgatcatcatctcataactgagcaagaagactatgcaaatcttagggcgctcgctccctgcacacggaaagaactctgtttaaatgctcagttcagaacactttgggccacatagtgattttggaaaacaggataatcgtggtgtaaatgagtgtttcctttcaaagtccactgcagagcttttatccatatggtatgcacatgtagccaatattggtttctttttcttaatatatatattttattttaaaacaacaaaaagggagggcgttgacaccattccccacagagatagtcatgctgagtgtgggttgtttaaacatgcatattgaaataacacatatagtaacgtgggaatactaaaaaataaccaagattttatatttttgtaaattatactttctatactgtagattgtgtatgttatgtgtttttatggaaagctaataaattaaaggtacagtggta

SEQ ID NO: 10971 - DNA, 2694 bp, Homo sapiens
cacacacgggcgcacgcacacggcagccgggccagggacgaccctgtcagctgcagccccagaggtccggggcgcgcagccgggtcccctcgagggcgcagccggccgccccgccccgcccctcgaagcagccgggccgggcgcgcagtgggctacaaactttcgcagcgcgagtccgccaaggcagcgcgccgactcgggctcggctcggctctgcgctgctccggacggctgtgaccgctggccgggggctcgggccgccggtacccacggaccgcgcgcccgggtgcctgctccgctaagcccctcgccccgcgcggacctcggtatccagcgccctgctgcccgggctctccccgcgcgccctactgccgcgaggtcagtccgcagcctccggtgcgccagcgctcgccttcctcctcctggacttcggccctttgccgccctcaccacgccatggctcatgtccccgctcggaccagcccgggacccgggccccagctgctgctgctgctgctgccgttgtttctgctgttgctccgggatgtggccggcagccacagggcccccgcctggtccgcactgcccgcggccgccgacggcctgcagggggacagggatctccagcggcaccctggggacgcggccgccacgttgggccccagcgcccaggacatggtcgctgtccacatgcacaggctctatgagaagtacagccggcagggcgcgcggccgggagggggcaacacggtccgcagcttcagggccaggctggaagtggtcgaccagaaggccgtgtatttcttcaacctgacttccatgcaagactcggaaatgatccttacggccactttccacttctactcagagccgcctcggtggcctcgagcgctcgaggtgctatgcaagccgcgggccaagaacgcttcaggccgcccgctgcccctgggcccgcccacacgccagcacctgctcttccgcagcctctcgcagaacacggccacacaggggctactccgcggggccatggccctggcgcccccaccgcgcggcctgtggcaggccaaggacatctcccccatcgtcaaggcggcccgccgggatggcgagctgctcctctccgcccagctggattctgaggagagggacccgggggtgccccggcccagcccctatgcgccctacatcctagtctatgccaacgatctggccatctcggagcccaacagcgtggcagtgacgctgcagagatacgaccccttccctgccggagaccccgagccccgcgcagcccccaacaactcagcggacccccgcgtgcgccgagccgcgcaggccactgggcccctccaggacaacgagctgccggggctggatgagaggccgccgcgcgcccacgcacagcacttccacaagcaccagctgtggcccagccccttccgggcgctgaaaccccggccagggcgcaaagaccgcaggaagaagggccaggaggtgttcatggccgcctcgcaggtgctggactttgacgagaagacgatgcagaaagcccggaggaagcagtgggatgagccgagggtgtgctcccggaggtacctgaaggtggacttcgcagacatcggctggaatgaatggataatctcaccgaaatcttttgatgcctactactgcgcgggagcatgtgagttccccatgcctaagatcgttcgtccatccaaccatgccaccatccagagcattgtcagggctgtgggcatcatccctggcatcccagagccctgctgtgttcccgataagatgaactcccttggggtcctcttcctggatgagaatcggaatgtggttctgaaggtgtaccccaacatgtccgtggacacctgtgcctgccggtgagaccactccagggtggaaagaagccacgcccagcagagctgccttctcggagccttctgcaaccaggacttgtggtgcagctgcagacacagagcacagctcatgggcaacatcactggggcccagagagagctgtccgccagtgcatcattagggggtctttcattgctagtgactagccccttaaatgccagcctgagtacctgaaggaatctgggaattagccctggcctgaaagtggcccatcattcatacccactgttctgaaggcttgaaaacaaaacatatccacaacattggcttgatgtgatcatcatctcataactgagcaagaagactatgcaaatcttagggcgctcgctccctgcacacggaaagaactctgtttaaatgctcagttcagaacactttgggccacatagtgattttggaaaacaggataatcgtggtgtaaatgagtgtttcctttcaaagtccactgcagagcttttatccatatggtatgcacatgtagccaatattggtttctttttcttaatatatatattttattttaaaacaacaaaaagggagggcgttgacaccattccccacagagatagtcatgctgagtgtgggttgtttaaacatgcatattgaaataacacatatagtaacgtgggaatactaaaaaataaccaagattttatatttttgtaaattatactttctatactgtagattgtgtatgttatgtgtttttatggaaagctaataaattaaaggtacagtggtatcttgaaaaactgaaaaatcaaccat

SEQ ID NO: 10972 - DNA, 1186 bp, Homo sapiens
cacacacgggcgcacgcacacggcagccgggccagggacgaccctgtcagctgcagccccagaggtccggggcgcgcagccgggtcccctcgagggcgcagccggccgccccgccccgcccctcgaagcagccgggccgggcgcgcagtgggctacaaactttcgcagcgcgagtccgccaaggcagcgcgccgactcgggctcggctcggctctgcgctgctccggacggctgtgaccgctggccgggggctcgggccgccggtacccacggaccgcgcgcccgggtgcctgctccgctaagcccctcgccccgcgcggacctcggtatccagcgccctgctgcccgggctctccccgcgcgccctactgccgcgaggtcagtccgcagcctccggtgcgccagcgctcgccttcctcctcctggacttcggccctttgccgccctcaccacgccatggctcatgtccccgctcggaccagcccgggacccgggccccagctgctgctgctgctgctgccgttgtttctgctgttgctccgggatgtggccggcagccacagggcccccgcctggtccgcactgcccgcggccgccgacggcctgcagggggacagggatctccagcggcaccctggggacgcggccgccacgttgggccccagcgcccaggacatggtcgctgtccacatgcacaggctctatgagaagtacagccggcagggcgcgcggccgggagggggcaacacggtccgcagcttcagggccaggctggaagtggtcgaccagaaggccgtgtatttcttcaacctgacttccatgcaagactcggaaatgatccttacggccactttccacttctactcagaagcttttatccatatggtatgcacatgtagccaatattggtttctttttcttaatatatatattttattttaaaacaacaaaaagggagggcgttgacaccattccccacagagatagtcatgctgagtgtgggttgtttaaacatgcatattgaaataacacatatagtaacgtgggaatactaaaaaataaccaagattttatatttttgtaaattatactttctatactgtagattgtgtatgttatgtgtttttatggaaagctaataaattaaaggtacagtggtatcttgaaaaactgaaaaatcaaccat

SEQ ID NO: 10973 - DNA, 424 bp, Homo sapiens
agcaattacaaggacatttagcaaattactaagccatctaggagtaaaaattagtgtttaatggtgttccttcctttgcctgcctagcaatctaaaatgatatatgatatgcatgcagacagcatgccacaaatacttttcctatgcacccagcagttttcccagtaagatcgtaaaaatcagtgcatggcattagagtcttgtgatgttaaagggccttctcaataaatattggatgttggggcagggaatgatgaacttgagcagtaaaaacttaaccacaaaaggttattggtggtggagtagattatgttcttttttaaagttaatttttctattgtatattttaattttaaaaattaaggaggaaaccagaaaagtgaaataaataaaaatgctgtctataccctttaaaaaaaaaaaa

SEQ ID NO: 10974 - DNA, 321 bp, Homo sapiens
ggcccaaacatagatggtgcatctcatcaacattctaatatagagtaatgatcactggctctaaacaaactttgcaaccaaacagaaacttcgtatctgctaatctcacgttgctccccaagaaaaatctaactgaatgttctggaaaagtagtggaaaagttaattgtttgcagaaagttaacttttacctgaagtgacaaaataaagtggttacccaaaggggtaaaacctagcgttggagtttatcttatgggtgtagtagatttgccttaaactcaaagatttgttttgctgggttaatgggtgtccagtggatctt

SEQ ID NO: 10975 - DNA, 983 bp, Homo sapiens
tccctgatgttccctgggggcttcaaggcatttttaatgcacaaaaggaacagagatatataaaagctatagcagctaggccaggcaggatgtttcacccctgtaattccagtactctaggaggccgaggcagatgaatcatttgaggcaagaaacttgagaccagcctggcccacatggcaaaaccctgtctttactacaaatacaaaaattaactgggcatggtagcacatgtctgtaatcccagctactcaggaggctgaggcatgagaattgcttgaacccgggaggcagaggttgcagtgaaccaagatcacaccactgcactccagcctgggctacgaagcaagactctgtcaccaaaaaaaaaaaaaaaaaaagaggggaagaagctatagaagttagcaattttcaaatcaactattttattaagatatacatgaagcatgcaaaatagcacataacgttgaagctaatttgaatgagataaaaaaaacattattgtcaacaaccaacagtgaagaactcaaagcggttctaatgtatttccaaggccatctctcagtgaaatgatattgtcattgttaccatcatcactgtaaaaattctttcaaataatgactaggttctagtatatgctatctcaaatgttagtgaacaaaacctaagtccctgcccacttggagcttacattctagtgggaaaaactaaacactggaagattttatcatttaaggactaaatacaaagtatattgttgtttaacctttttaaaacttactagctatgaacaagttaattaactactttgtactccagtttcatcctctgtcaactaaggataagatagttcctcatagggttcgctggtgaatttaacgaataaagtatatagaacaatgcctgccacacagtaaatgctaaatttatcattgtaatatgctgactcttgataatgatgttggggcagaaaattttaaccc

SEQ ID NO: 10976 - DNA, 330 bp, Homo sapiens
  misc_feature (197)..(197): n is a, c, g, or t
aagttcaagtggcgcgatctcggctcactgcaacctccgcctcccgggttcctagtgattctcctgtctcagcctcccgtgtagctgggaccacaggcacctgccaccatgcccagctaatttttttgtatttttagtagagacggggtttcactactgttagccaggatggtctggatctcttgacctcgtgatcnacccgcctcggacccccaaaatgctgggattacaggtgtaagccatcttctcctttccagagtgaaccaagcaggccttttggttctagatcttggtccaggtattactttgctctgggaggctctgagcagg

SEQ ID NO: 10977 - DNA, 333 bp, Homo sapiens
gccagtaatttgttcattcgctcactgagggtttatcgggtttatcaggtatctcttgcaagcttataattgtgcaagatattgaaaaatgaagtggttgattctagttctaatttcaggaaatattgcttagagagccaatgtttgagtcctttctctactaagtataaatgtgtgttttgcccaggagcctagaaaaatgattgattagaaagattttagttctggaaagttgaatggcctctgtaatcccagcactttaggaggctgaggtggttggatcacttgaggtcaggagtttgagagcagcctggccagtatggtaaaacctca

SEQ ID NO: 10978 - DNA, 291 bp, Homo sapiens
agtagtttgcactaagacagcagcagtagagatgatgagaaataatctgatcctgactatattttttaaggtaaagccaacaggacatgctgatggatcggatatagcagatgatgagagaaacgaaggaatcaaggagaactgtaattatttttgactgagcagttaggagaatgagatcactatttcctgagataggggaagttagtttgaggtcccatgatgcatgcaggcaggcagtgatatatgtgggttcaaaagtcacaataggggtcagggctagagatatat

SEQ ID NO: 10979 - DNA, 453 bp, Homo sapiens
agggaaggcgcgcagcacggatctgcaccccggatgcatctggtgcagcttgtgccgggcctgctgcatgtgggctcggtgatgcccagaccgaagctgcccccctgccgccactgcacagcgcagcatggcctgtggagcggggatttcctgctcagcccgcctcaggtcccattccctccccgctcatcatttcagtaaagggttagtctctggcagacaactggggagaacacagatgtaagaatgagacactgagtttcctctgaattttaagacgaaattttaagaacaaacacaatcaaatgaagaaagtaagttttgattagaaagtaaaaccgttttaataacattaacaggtgcttttattacaaaaatgaacactaatttattgtggtaaatttagaaagaaacattaaaatacaaaataaaataaaagctttcataatccca

SEQ ID NO: 10980 - DNA, 429 bp, Homo sapiens
ggggctaagggatgagaaccctggtctctgcctcaagaatgatttcgggtgggaccagtctccagagacagcccctcgagtctctttggacttggagatcctctttcaaggaataagccaatggtctcattttgtcttctggtctctgcctcaagaatgatttcgagtgggaccagtctccagagacagcccctcgagtctctttggacttggagatcctctttcaaggaataagccaatggtctcattttgtcctctggtctccctgttctaccccatttttttaaaaaattagtcgctggccagacatggtggctcacacctgtagtcccagcactttgggaggctgaggtgggaggagcacttgagaccaggagttggagaccagactaggaaacatagtgagaccctatctctaaaaaaaaaaaa

SEQ ID NO: 10981 - DNA, 241 bp, Homo sapiens
tgtatctaaacatatctaaacatagaaaaggtacagtaaacatgcagtattataatcttatgagaccgtcatcatatatgtggtccactgtttgggccatcattggctgaaaagtggttatgcgacacatgactgtatatatactttcctgttacaacaacagtgtctctcaatccacagtaattgcagcatccagtaggtcttactttagccctgagtcaccatttgtgtcaacgtgttt

SEQ ID NO: 10982 - DNA, 818 bp, Homo sapiens
tataaaggacatctactgtagccaaattaccatcaaacagctgattggtctttgcaaagtataagtgctatattagaagctcagtgtttacctctgctgttggcagctctaagagctagatgagcctgggtaagtaggagctcatgctgttgggcccgtacacagtctccatctctgccagcatgtctactccattcatgtgcccattgtgtcattggagtagcctatgatcaaggctagcagacttccacaaaccacataattttgactgcctagttatttagtgctgattctgtgttgaatgctttctggtggctgtttaacatgaagtatccaaaggtcctaacagtttatgccactcccataggctcatccagaagcctctaccccagaatttcttgcccttaatcctcctatttttctatttcttggcctctgaccaattggtcaagccattcaccacttcttatgaatatactccaactatagactacttttctttctacattcatgtacttcattattcagtttgtacagaaagaaaggtagcctatggttggaatatattcataagcaactaaaatagttcttagaaataaatttatagcactaagaacttccattagaaaagaaaaaagatctcaacctcatcttctacctagaaactaggggaaaaaaacagttaaaaccaaagtaaggtcttggctaatgcaataagacaagaaaaggaaataaaaggtatacaaattgggaaggaagaaataaaactgcctttgtttgcaaatgcctacttagacaatccaaaaaaatgaccaaaa

SEQ ID NO: 10983 - DNA, 161 bp, Homo sapiens
ggaacaaaacaagctctggaaaggagcctagaatccatgaggtcgagcaaggaggcaagccccctgaagaggaccagccctccagagagcaactgagattatgctgggcaggaaagcaaagctagacactgtaagtcctggaaatccagagtagtttaatg

SEQ ID NO: 10984 - DNA, 553 bp, Homo sapiens
tttttttttttggttggagacagggccttgttctgtcactcaggctagagtgcagaggtgcaatcagctcactgtaacctcaaatccctgggctcaagcaaacctctcacctcagcctactgagtagctgggactacgggcacaagacaccaggcctagctaatttttagttttttttgtacagacagggtctcactatgttgcccaggctggtctggaacacctgggctcaagtgatcctcctcctcagcttcctgaagtgctaggattacaggtgtgagccactgtgcttggcccgatatatttttttgccttgttaagtataaaatatttaatcttcagaataataattttggactctgaaatgcctaagagtaaaatatccatctttatcacagaccattactgagaaaggtatgtaacttagccttatgtcacacgcagcttttcagagtttgaggaaatcatgaaggaaaaaacctattgaggttatgataaaatatgacctttgaaaagcttgaaatgacattacatcctaaagacacaggagggc

SEQ ID NO: 10985 - DNA, 321 bp, Homo sapiens
taaccctgttttaattgaattacttccttaatgattctatctcccaattcagtcagattctgaggtcttacaggttaggacttcaacatataaattttggggggacacaatgcaccccataataataggcaaaattgcatttgaaacagaaatttagacacatttcagaaaactaaaattatatttcttgtgcaccttagtagatagacatatggtgagccatcctttgcacttccatgtaactccacatatccacaatcaaaacaactcccaaggctccctagtgtgggatttggcccctttatgttcagtagcaacata

SEQ ID NO: 10986 - DNA, 368 bp, Homo sapiens
tcttaaggccaagtgttgattgtatatgtgggattatttgttgaatattccatctctcctcttggatttgacctgcctcttctcatatttgcatttgagcctctttctggactctttcccatcgtgtgactgtccagggtctgtgttaattatcatggtcttagaatataaggcgtttcaggatgtgacatggcccatctctctccgtatgctccttctttcatgtgaacttcacaattgctctggatgggcctcctgattcattcaaggaacaagccgtcaggcttcagccaggccagagaatgggccgtgggtcccagcactgggctttcatctgggttccatcccattggcctgtgccccagggc

SEQ ID NO: 10987 - DNA, 389 bp, Homo sapiens
agacacctgggtggaggtggagacgtgcaggcaggagctgcccagggccaggcagaggctccagcagcgagcctcacagctgaagggaatgtgtgaggaggggcctgggccttgctctagggagcacctctgaggctgcagggcgtggaaggaagtgcctattccctgatggaggccgggaaggtgccagaaacccagaaatccaacaggaagggctgcaggaagaggcctgctctgctggctgggccctgatggcactcttctgcaacccaacctctgagactcagttttccttcctgccgcagtcccagcatgcagcactgatcagccagcggcagccgcctggggccctcatgaaaagcaccctgtgggttcggcaccaggtccct

SEQ ID NO: 10988 - DNA, 464 bp, Homo sapiens
ctggacggatgtcaagctctttctctaggacttaatcacccggatcctgactggaataatgcatttgataaagtgtctttggggccagttagttttggtgaagacaacagagagtacagatgggtaaaaattcaacaatataaacagagattatgattcacatttataactatggtgagagtttttatttagcaccaaatgggccctacaggaatggtgtgtttggaccacagcctttccctctgctggggattgggacattagtgcttgtgaacagcagggaagttgcccatatctctccacatttggcacaatccctgggcaccatgtgtttttttggctgggagaagctgcaatcagaaatgctagtggctttccaagtccataatggtccaacttgaatgatactaagtctgacatctgtcaaagtgacaccatggtcaggaaagtactcaaggtggctt

SEQ ID NO: 10989 - DNA, 358 bp, Homo sapiens
gctgattaaaccagcataattgacatacaccctcataaacctgggggcaagggtgttaagtgtcgtgtgttgcctgagtatcccatattcaccctggttctagcttggtggaatgtggaatttagacaatttaggattttagagtgggccaggcgcggtggctcacgcctgtaaaagttcccagcactttgggaggccgaggcaggcgaattgcctgagctcaggagttcgagaccagcctgggcaacatggtgaaaccccatcagtaaaagaatctctggactcacaaagtcattcataaagctgcaaactagtcatctctatacacaataaagaaatggcagataaaggggaaaag

SEQ ID NO: 10990 - DNA, 315 bp, Homo sapiens
taaatgttaatcctttacaagttggttttagtggagtaggaaatggcggagaaggctggaggtggattcagatgcaacagggatggcacttacacctttcgatgaaaaagacgtgtgattccgcgattttgcagttgtgaattgtgctgctatacgcatgtgtgtgaaagtatctttttcacataatgacttcttttcctctgggtagacacccagtagtgggattgctgggtcaaatggtaattctacttttagttcgttaaggaatctccacactgttttccatggtggctgtactagtttacattcccacca

SEQ ID NO: 10991 - DNA, 1600 bp, Homo sapiens
cattattgcagccctagcagcactccacctcctattcttgcacgaaacgggatcaaacaaccccctaggaatcacctcccattccgataaaatcaccttccacccttactacacaatcaaagacgccctcggcttacttctcttccttctctccttaatgacattaacagccatcacagcacgcctatcggatgtgagaggagaagtcccgctgctcgggcactgtctatatacgcctaacacctacatatattttaaaaacattaaatataattaacaatcaaaagaaagaggagaaaggaagggaagcattactgggttactatgcacttgcgactgatttcttggctttttatcattttgaactttatggaatacatcggcagccaaaacgcctcccggggaaggcgccagcgaagaatgcatcctaacgttagtcaaggctgccaaggaggctgtgcaacatgctcagattacaatggatgtttgtcatgtaagcccagactattttttgctctggaaagaattggcatgaagcagattggagtatgtctctcttcatgtccaagtggatattatggaactcgatatccagatataaataagtgtacaaaatgcaaagctgactgtgatacctgtttcaacaaaaatttctgcacaaaatgtaaaagtggattttacttacaccttggaaagtgccttgacaattgcccagaagggttggaagccaacaaccatactatggagtgtgtcagtattgtgcactgtgaggtcagtgaatggaatccttggagtccatgcacgaagaagggaaaaacatgtggcttcaaaagagggactgaaacacgggtccgagaaataatacagcatccttcagcaaagggtaacctgtgtcccccaacaaatgagacaagaaagtgtacagtgcaaaggaagaagtgtcagaagggagaacgaggaaaaaaaggaagggagaggaaaagaaaaaaacctaataaaggagaaagtaaagaagcaatacctgacagcaaaagtctggaatccagcaaagaaatcccagagcaacgagaaaacaaacagcagcagaagaagcgaaaagtccaagataaacagaaatcggggattgaagtcaccctagctgaaggcctcaccagtgtttcacagaggacacagcccaccccttgcaggaggaggtatctctgagtgtgcagcacagaatcgcatgacccaccttaaccttcctgttgtcatggaaggatgcacggctgctctgtccactgtgattcctagccctctcaagatcactgctttctgaagaatttgcaatgactctggcttctggctgcttatctctggacacccgttctccaccagttgtacagttcatgtaatctacttggcttaattgattttccacttctctcttcctcttctaagatataaacattttaaatgatttattcctgtttcttattctggtgtttctttccttgtccctatgagataagtgtctcaactcactaaatctattcccaatgtataaaataattctaattccattttcagctaaaacatatattaccaagaagaaacaaacttt

SEQ ID NO: 10992 - DNA, 3118 bp, Homo sapiens
tggagcgtctcctgctcgcgcacgccagaagcagctcggggtctctccgccgccccgccgctcgcccgcccggatcccgcctgcggcagttgccgcacaacatgctacctgcggccgccccggcggctcctggaaccccggttcgcggcgatgccagccaccccagcgaagccgccgcagttcagtgcttggataatttgaaagtacaatagttggtttccctgtccacccgccccacttcgcttgccatcacagcacgcctatcggatgtgagaggagaagtcccgctgctcgggcactgtctatatacgcctaacacctacatatattttaaaaacattaaatataattaacaatcaaaagaaagaggagaaaggaagggaagcattactgggttactatgcacttgcgactgatttcttggctttttatcattttgaactttatggaatacatcggcagccaaaacgcctcccggggaaggcgccagcgaagaatgcatcctaacgttagtcaaggctgccaaggaggctgtgcaacatgctcagattacaatggatgtttgtcatgtaagcccagactattttttgctctggaaagaattggcatgaagcagattggagtatgtctctcttcatgtccaagtggatattatggaactcgatatccagatataaataagtgtacaaaatgcaaagctgactgtgatacctgtttcaacaaaaatttctgcacaaaatgtaaaagtggattttacttacaccttggaaagtgccttgacaattgcccagaagggttggaagccaacaaccatactatggagtgtgtcagtattgtgcactgtgaggtcagtgaatggaatccttggagtccatgcacgaagaagggaaaaacatgtggcttcaaaagagggactgaaacacgggtccgagaaataatacagcatccttcagcaaagggtaacctgtgtcccccaacaaatgagacaagaaagtgtacagtgcaaaggaagaagtgtcagaagggagaacgaggaaaaaaaggaagggagaggaaaagaaaaaaacctaataaaggagaaagtaaagaagcaatacctgacagcaaaagtctggaatccagcaaagaaatcccagagcaacgagaaaacaaacagcagcagaagaagcgaaaagtccaagataaacagaaatcggtatcagtcagcactgtacactagagggttccatgagattattgtagactcatgatgctgctatctcaaccagatgcccaggacaggtgctctagccattaggaccacaaatggacatgtcagttattgctctgtctaaacaacattcccagtagttgctatattcttcatacaagcatagttaacaacaaagagccaaaagatcaaagaagggatactttcagatggttgtcttgtgtgcttctctgcatttttaaaagacaagacattcttgtacatattatcaataggctataagatgtaacaacgaaatgatgacatctggagaagaaacatcttttccttataaaaatgtgttttcaagctgttgttttaagaagcaaaagatagttctgcaaattcaaagatacagtatcccttcaaaacaaataggagttcagggaagagaaacatccttcaaaggacagtgttgttttgaccgggagatctagagagtgctcagaattagggcctggcatttggaatcacaggatttatcatcacagaaacaactgttttaagattagttccatcactctcatcctgtatttttataagaaacacaagagtgcataccagaattgaatataccatatgggattggagaaagacaaatgtggaagaaatcatagagctggagactacttttgtgctttacaaaactgtgaaggattgtggtcacctggaacaggtctccaatctatgttagcactatgtggctcagcctctgttaccccttggattatatatcaacctgtaaacatgtgcctgtaacttacttccaaaaacaaaatcatacttattagaagaaaattctgattttatagaaaaaaaatagagcaaggagaatataacatgtttgcaaagtcatgtgttttctttctcaatgagggaaaaacaattttattacctgcttaatggtccacctggaactaaaagggatactattttctaacaaggtatatctagtaggggagaaagccaccacaataaatatatttgttaatagtttttcaagttttgttcactctgttttattgtttgttttattgagaaattcttactcttagagactcatgaattaagaaagagaattctgctaactcagagaacctggttcctatgtaattcagaatatattacatttctcagtaatatttgttttttgaatccacctttatctgagccaatggagatttacttatagcgtattaggagatatttattccattttcttattttaatcaacattctaattatagacacatgggcctccctagctgatttcactgctcccccttcattgcttagaaatgggcatcatttcttgtatgtcagatccccctgcatcttcaacatttagtcttttcttctccatattttctatctgtggatctctttaggggattgaagtcaccctagctgaaggcctcaccagtgtttcacagaggacacagcccaccccttgcaggaggaggtatctctgagtgtgcagcacagaatcgcatgacccaccttaaccttcctgttgtcatggaaggatgcacggctgctctgtccactgtgattcctagccctctcaagatcactgctttctgaagaatttgcaatgactctggcttctggctgcttatctctggacacccgttctccaccagttgtacagttcatgtaatctacttggcttaattgattttccacttctctcttcctcttctaagatataaacattttaaatgatttattcctgtttcttattctggtgtttctttccttgtccctatgagataagtgtctcaactcactaaatctattcccaatgtataaaataattctaattccattttcagctaaaacatatattaccaagaagaaacaaacttt
